United States Patent Application Publication US 2007/0054278 A1 - sequence listing, part 104

SEQ ID NO: 97802 - DNA, 12704 bp, Homo sapiens
gaggaatggctgtagtaatttaggactggtatgatcactttcatgtactcatttttatatcatattagatgctcactagattagttgatgcttttcatgacagtcttaaaaataagttttaactgattaattgtagaaaactatgttcttgtttataatctttgatttttaaattaaaaatacatacactatatatttcctatgttaagaaatgaaaaaatttaaaagtcctgacttataattaaggctgttgggatgagccagacttcatcttcctgtcccaaattcccagggatgagaaaaagttgaagagaaaagacctaaagataaacaacaaaccagaattttgatggaaaatggtaaagagtactcatgggatcctggaaatgctggtcctggaaacagtgaggaattttgcaagagagatggctgatgggatcatgccccaggaaaccccagtctgaaacacagataggagaggatggctgcaaagatgggagcagctccagaggagacagccttgagcacaagaagtgacatccagctaggtgattcttccacactcagtgtccatgagggagcagatgattcgtaaacaggtagagccatatcttggaattctttagtagttaaaaagactgaggtggatctctgtatatcaacagagaacatctctaagacattaaaaatggaaagagaacttgtgtaaggacacatatggtataatgataccattaatggtaaaagaatcccaacctaaaatatctttatagttacctatgtaaaagcatacagcataggttctcaacagtggcattgttcacattatgggttagaggactctgtcatgggcgactgtcctgcacactagagggtttttagcagcatccctggcgtcttaccctctagatactagtcgtgtcccctcaggccccagtagtgacagccaaaactatctacagacattgccaactgtgtcctgggggacaaaattgctccaagttgggatcccttggcatatattgaagtctaataatgcatattcacctgttaagtgattaccggagagagacattgtaatggggacaggtgtggtcagtggagttgttagctttattttgaataagaatgtttaggtataacggtagggcgcagtggctcacgcctgtaatcccagcactttggaaggccaaggcaggcagatcatgaggttaggagatggagaccatcctggctaagatggtgaaacccatctctactaaaaatacaaaaaaatagctgggcatggtgacatacacctgtagtccctgcgactcaggaggctgaggcaggagaatcgcttgaacccaggaggtggaggttgcggtgagccaagattgcaccattgcactccagcctgggcgacagagtgagactccgtctcaaaaaaaaaaaaaaagtttagctattacatatatttacatatattacatgtaattaaaaacaaaacaaaagatagttttgcttttttttttttgagacagagtctcactctatcgcccaggctggagtgcgctggtgcaatctcggcagctcgctgcaatctctgcctcctgggttcaagtgattcttgtgcctcagtctcccaagcagctgggaccatagatatgcgccaccacactcggctaattttttgtatttttagcagagatggggttttgccatgctggccaggctgatctcaaactcctggcctcaagcgatctgcctgcctccacctcccaaagtgctgggattacaggcgtgagccaccgcaccggccagctttgcttttttataagatatctgttgtattaaatttaaaaatggttaatggtggctgggcgcggtggctcatgcctgtaatcccagcactttgggaggccgaggcagacggatcacggggtcaggagtttgagaccagcctgaccaacatggtgaaaccccgtctccactaaaactacaaaaattagccaggtgttgtggcacatgcctgtaatcccagctactcaggaggctgaggcaggagaatcacttgaacccaagaggcggaggttgcagtgagccaagatcgtgccactgcactccagcctaggcaacagagtgagactctgtctcaaaaaaaaaaaaaaatggttaatagttagaagaaatacaggtagcttacaaacgtgcaaatgtgcccaaactcactaataaccaggaaaatgcgaattaaaaaaatgaatcatttttctccattacattaataaaattagaaagataaatcatgttcagtgatggtgtagtgttgggaaattaatctctaatagtagtgtaagttgacctaagattttaaatgtgtagtttgtggtatttgtatttaaattaaatatttttcttatagaaatatacatatgtatgcagattggcatgtttagggaagcttattgcagcgcacaatacctgcaaattggaaccatgtccaatactaggagaatggttaaataagttatggttcatctagattactagaaatactgggtagcagttaaaaattatgaggtagaattctaaaaaaaaaaaaaactgagtgataaaattagttgtagaataaaatgtagtgtgattcagtttataccaagaaaaatcttaaacatgaaataaaactctgcacctttatttctgcatatccatatgaaaatgcttaggtaagtttggaaggacacatgcaaaactgatcatggctggataacaggaaatgggactaggagcctttaaaacggggcagggaataatggttatctggtatctatactgcttaagctttttttctttttaaccaaaggagtaactcatacattacttgggtaattacaataaaattgaaaaatgtaagaacatctaaatgacttgctttatatgcatagtgtcatcatttagtggcctgtgttgagcagtgatagctgctgctggggctctggtagggctttaagatcccatgacttttggtggctctccatattttgtggaattggcattagctgttcatatggtttggaaacacttttttaaaaatattgatttcagtggagattatttcccaaccctattcctagaatttcactctgttattgcttcagaaagatgtattcagaaatatatgcctgtgtatttatgacttcatcactagactttgaatgcatgtgtgatagctttctctttagtaagtggaaattaatcttaaagattgcaagctagagctgagcccacactcttactggtattttcttgtttcctcccctaacctaacttgtcatagtttttcttaggtagtattatttatttctttttttactacgtagtgacattcttcaaatgtatactttcactctggcttgtccgtaattggctggaaattgtgatggatctatatagttttttttgtgtttttaataaaatctgtataacataaagtttactattttgctcattttatttcatttatttaattattattttatatttttacagatggggtcacactgtgttgcccaggttggactcgaactcctgggcttgagtgatcctcctgcctcagcctcctaagccgtggggactacaggaactgggccactgcacacggcagttttagtctttttattttttattttttgagacagggtctcactctgttagccaggatggagtgcagtggtggaatcacagctcactgccaccttagcctccacttgggaagcctcttgggtctgccactgcttgtcagaaactttttactctgaattatgtcatatctcaggtgtttttacctagttattttgcacattacccttctcaaaggcatttgttcaagtttttcctaagctaatgaaggaaaacaaacctgagtcatctcttggctgtcactctgcctctcctactctttacatccagccatatgtacagtcctcaccccacccaccccacccctactctactttttcctctgctttattccgcagtcctttcatttgtggtctggtacccaccagctacactgacatgactcttgctaaggttttgcttgaatacttgatgtctcctttctctctgtcattcctccccttctcccttgatgcttctactaaggggtcagtggtatgagaagatagttctcctcctgctggttttcattattttgttgtttactgtatcgtcaggaatgcatgcttgcaagacaaagactaaaacaaaaaacaaaaaacccaaacagcaaaaaaaccccaaaacacctttgttttggttccgagatcgattcagtattagttcccttttgtgaaatgaaaacaggattgtagaaaatgggctgggaattttgcaactggcaaaaacgtattctctttttttcctgtagtttaaaattttaccactttgaaaatcatgtaagttatcttagaagaaaaatagtagtccactaattctaccatccaaaataaccatgaataaatatgtcttggtgctacacatgtagtttttcaaaatggaatcaaagcgaatctttaaaaaaaatcattttgttttctatgatcaaattgcctttctgggaaaggacatgccagaatgttagttttttaaaacttataaaagtatctttagatactttgaatgaaatagaaagagttctattctttttttttttagaaataggattttatctggttgtttgattttttttttttttttcagttattcaaatgaagattgatgcagttggctttcctttaaccttttagtctttcagggtaattttctttctttttttttttgagactcccaacaagtttattattttttaaattgtggtaaaatgcttataaggaaacttgccatcttaactatttttaagtgtacagttcagtggcattaagtacattcacattgttgtgcagccatcactataatctatctccagaactctcttcatattccaaactgaaactctgtacccatttaacagtaactccccattccaggctcgccacagtctctggcaaccactattctactttcaggataattttcattggttagtaatgtttggataatttgattagatttggtggatactgaagactggccgggttatgtaagctgttgctactttcagccaaggagtgcatctagtccgtattacatcatccttggagtgttctacccagtgtcttgcattgaaggacatcagaaggaaaactcctgtattctcagtcgtggtaaatagtgtccacttcattacagatctccttgagtgataggtttcaaaatatctctaggcatgaagaaacatttccaaacctgcttgtcttctctacctttctcagtatgtactagtttagaaggtattcaaaatgtttcactgagaccattgagttttatgctaaatataacatctggcctagcactttttatcactcatatgcaatctatttgataaggacagggaccaaatagaatgtctttttcaatgtattttaggcatctaattgactaatatgaaattttctattaatccagagtttttaaatgcaggcataattcccccccaccccgcccgcaaagattcagtcttgctctgttgcccaggctggagtgcagtggcctgatcggctcactgcaacctctgcctcccaggttcagcaattctcctgcctcagcctcccgagtagctgggattacaggcatgcaccattacgcccaggtaatttttcttttgtattttttggtagagacagggtttcaccatgttggtcaggctggtcttgaacccctgaccttgtgatccacccgcctcggcctcccaaagtgctgggattgcaggcgtgagctactgcacctggctgcaggcatactttttaacctatttatatccaaacatttaaatttattttttatttttattatttttaatatttttatcattgtatatgtttatttatattattatttcaaattgtttattaggtatgaattttacaaactttacttatattagcggtaacggtggagcgggagagtattgcgccttctccaagctccccggcgagaaccaccaatagtgtggtggaacttacggccgtttccaagggccagggctcttttggcctgcagatgtcagcccacacatctccctgtgctgtggactgatttggtgatccattaggtgtcaggatttcttctgatagctttatggaatggatcagtgaggataacctcaaaaaatttgtatgtggaatcttcaccaacccagtaagaattcaggactctcaaagccccacagtggcgtccagcttgctcctctgcaacggactgaaggcttggagcaaactttagctggttaacaccatgatggacaggcttgccataagttgcacccttaggaactgggcgttttcggccaccacggcaaacacgaatcctatatataacgtaaccttgcttggcctcgcagcccagtcagcgcgctttatcaggctgggtggggcrgagagccctgtggagagcagagagctggcggtactgccagcagcggaccctcagaagaaagcgcatgacatcagactgctgctttctccgtagctcctggatgtactcgtatgcacccatcttggcttacctgatggctgctgccagacggaagaaaagaagtttaatttattttttaaaagttaataaagaagatgatttttctcagtcctgtaagatgaaaaacacatctgttgttctagttatttggaaattaggctcatacgggtaatagttgatgctagtaatttttctctgaagaataaaataattcaaaatagaaaactaaatgcttggctgggcgcggtggctcacacctgtaatcccagcactttgggaggctgaggtaggcggatcacctgaggtcgggagttcgagaccagcctgacccacatggagaaaccctatctctactaaaaatacaaagttagccggggttggtggcgcatgcctgtaatcccagctacttgggaaggctgaggcaggagaatcgcttgaacctgggaggtggaggttgcgatgagccgagatcgcgccattgcactccagcctgggcaagagcaaaaactctgtctcaaaaaaaaaaacaaacaaacagaaaacaaaacaaaacaaaaaaaaccctaaatgcttgatgggaaagctaataatctgctttaaaaatctctattggttttctgagaacggagaagtttatgaagacaaactatacttagtgttagtatttaaaatgctttacttttctttttgaaacatatagccagtaaatcctgcttagttgattagtgtacctcagtttaaactttccatggttgttatgtatttcctttgccattaaaatatataaaaaggaatttatatttttcaagatgttgaaatttttgaaacaaatatatctactcagcctatgcaatattaagtcattctgcagaatagcatctgcattgcttgaatattgtttgtttgttttgtattattaagccaaaaaaaacacctcacacatttcatacaacaatgacaacaaaattgaaatagagtttcaaaagtttgttagattgttctttccaggttgactcttaagtgtctctttaactaaggcagtagagaattcaaatgttttcttttgcatggccttttgctactagtgaccctgggctagactgtgggcttgttgagatgtgaatgtaccctgccccctgaagtaagatttgttcctgcaaatggaggaaaagaagccaaccaatcctttataaacaatttgtgtttagtccttctttgtaaagtccatagcagttttgacctgcttttaatgcatgatttattcaattgtttattggagcactctttttttttttttttaaactggaacaatcttaatcacccagtaaaatatattaggctctgagctagttcttgatatgtttattttatttatttatttatttttttgagacagagtctcactctgttgcccaggctggagtgcagtggcgcaatctcggctcactgcaagctccgcctcccgggttcacgccattctcctgcctcagcctcccgagtagctgggactacaggcgtccgccaccacgcctggctaattttttgtgtttttagtagaaacggggtttcaccatgttagccaggatggtctcggtctcctgacctcgtgatccgcccacctcagcctcccaaagtgctgggattacaggcatgagccaccgcgcccggcctagttcttggtatgtttataaaacgtttgtgataacataggaaaaatgtctattatgctagttaaaaaacaaaagggtgaaaattatatatgcggtatcattacgaaagtgtatttagagaaaagactaaaaatgtcaatactattaggattctctctctcctttttacttttgaatgcatgttcattatagaaattttggacacataaacacatgtgcctatgtgtatcttttaatttcttttccttgataaaccaccaattgccatatgtattgccaagattaagaagactttatgtaggtgtagatttttaccttaaacataatgaaaaaaaaataataaaagttgcaactttttgtacctcaaagacaatggcttttaacatttgataatgaaagttattaagcaagctgctatccaagtgtatctatgagtaaatagctttaatcacataacattgggctaggggagattaaaaaaagaatttaaggcgtaaccttatgatctggtggaggagaaattgtaactgtgcaaagcagttaaaatgagattgttgggtagatgagattatatgctaaaatttgcactaactactctcagagtttagattagaggagattcatcctaaattgaagtacttgggaaagatccagtggtagatgtgaaacttggagtccatcttctataataggtggtatctgaggacaataaaacaagtgtggatttaagtttaaacaaagacttaaatgtattctttttaaaggattgtgaagtactcaatttctttcttacagaagaaaactacaatcacaattacaacaacaaaattgacagtaacaggatctgaagtggacagagggcaatagggcaatagaggagggggcatcctggtctgagggcagaagagcaacttgaggttgggggcataccaggcaacgataaccacgaggaaggccttgctttgaacacagggatatttagaagccctttgcaagcagggctgcttttccctacaattggtattattaaataattaccgaatgtatatatttggatattttatagtaagatattgacctgaaaatcccttgggcatttacctgatcttttacctttcaatactcaatataattttttactaaagtggaaaatatttattgaattgacaaagagaattcttagctttctaaaagactacttttttagttttttaagatctcatttaaaacaaagtatttaaaaattatttcataactgaagactctaacagaaatactcaggtatttgccacctttgacttttttttttggtagaaggtgggtcataaatgtttaggtatatgtttgtgttccagtttttatatctgccttgcaaaataattgtaatctggaagtttctgaaactggaaagccattaggaaattaggaaaagtcatttaaaaagatagtaatcctttcatcagttaaaaagaatagactccttttagaactaagcagtttactctttttcatattgaatgcttagcttctattatgcaaaataaatagatttaaacattatagagtgagtagtcttaaaaatggagcatacattcctgaattttgagtagctttagaacttaatacacatatcatttcttttaggaataaatgtaaaatggatgaagattgaatgtgagagtatttaaatgattctcaagattttctggttcatgtgttgtgatattgaactctttctttcgtcttaggctttaatttgtgcctggtgctgacctgatgctgtgcagggacactcactgcatccctccattcagtccctctaattatcccaacttcctggggagcttgcttagaactgggcatgagtgctctttattaaaatattgggctaccctggctacatgtaacaaggtagtttttgatatcaaatttatgtattgatgaacggaataggaagctaaaattgtttgctgtgattttacataaagagataggggatattatggaaattatttggttagacaatgaattaggctgtaataaatgaaatcatggttaatagagttcctgagtttatttgttgcattgttgctttttagtgcatactcaaaaagaaatacgactctataaatgataggcagaacaatcagatttgcaattttgtgtgtatttgcagatgatggtaattctttttgctgggcgcatctgttaatgcagaaatttgtctcctcaggttcatgtgaaaatggcggatgaggctgtctgtgttggcccagctcccaccagtaaaagctacctcaacatggatgccatcatggaagccattaagaaaaccagggcccaagctgtgagtctgaatgaatctatctactgcagctgtttcatatgtagtgagcagaaagctagagtttgtatttaaaaaaaaaaataggaaagaatgattgaaaatgctgttgcagttagttcatgtcacatgagttaaatgtggtcgaattcgctactggaaatcaaaggctttgtagcatctggcagtgttggttgctgatcctgcaggtggctgctggattcagctttcacaccagggagcagtttcagttcatttccaaatttgctaggaaaaaagaaatcccaattagttttgagtattaaccctttccgtgtaataagagcattttaaaaaattctgtgttataaacaggatccaaagactgtgttcaaattccattttaataatttaaaaattacttatacctagtacacttccagaaataaaaacagcacatttggtaattattttagtttgttaatgtcagtagaatgctcataatttacaaggataaatcattctctccacccccagttctgtttgaatagagtggaatccaaggaaaaaaatgatttctgatatcagaaacagtgttttttcttctattttcttttttctttttttaattatcagaactaattatatatagtgttaaaaactatgcaaagttatctctaaaactggatggaaacatccaacaccagcaattaagcctggagcgcttcaattagcgctcacatttcttttgaaagaaatgttttagtaagatgaatgtttaaataaaaagcctaattcgtgaacccatattatagatgtttacagtttattagcacagttagtgaaggtaaaacactttaaccttttaactatagcttgccaaaataaatatgtagttgagtgttgataaaatgaagttggtggaatgaaaactcttcttctctgatacagtagtttaaattcttctgtaccatgctcataaagcttagttcagctttttttttgttttgttttttgagatggagtttcgctcttgttgcccaggccagagtgcgatggcgtgatcttggctcactgcaacctctgtcccgccaggttcaagcgattctcttgcctcagcctcccaagtagctgggattacaggtgcctgccaccatgcccagctaattttgtatttttagtagagaaggggtttcaccatgttggtcaggctggtcttgaactcctgacctcaggtgatctgcctgcctcagccttctaaactgctgggattacaggcaggagccactgtgcccagcccgagttcagcatttaaaagtcgctgatacgtagctatttctggattatgatactggttcctttagaaatttgactctctttttagcagaattattttactagaagtatgttcaacactggctgatactgaagtggcgaaatttatgtttggccagtctgggagagccaaaaattacttgattggatcaggctggtagattgtagcaatgtggcttgtgggtgaggatagtataaagtagttgtggatggcaaagtttggggtgaggaaggaaagaagagtagacattagaagaaaaaaaattcagagcacaaaataaaagtaaaaccacacctccattttagttcagtttgatagaaacggcttgttggtagttgccgagtattattaatgccatcaggaataaaatgtgttagctgtcctagtagtctgggttttggaaattaccagttcgtgagtactgtaaagaaaggagaatttagagtttttcatccatctttgccaaggttccttttacataattctttgatgcaccagccattgtgaaattctccagaattgtgggcaaagttagcctcaggaaaaggagagagagttttgttgaatagtgtagacaaatgccagtgggcaggaagctatgtgggcatatactccccattgtggttaggacaaaggtagtgtgtggaaaatgaatcagttaggacaaagggagtgtggagaaagtaaatataagaggcagtttcttggaatttgattctgatcctagaaatgtgagtta

SEQ ID NO: 97803 - DNA, 30400 bp, Homo sapiens
aaagcctgcgggagcagggcctggcctcagtgccacccccatatctgggcacaggccctgtccccgctgccagcagctgggtggtcagggcacacgtggctcaggttccgtttcctgctggcggaggtgctggccagggcctgcctgggctggggccacctgcccgtgctcccgcacccctagcccctggctaagcacctccttgatgtggccgctggaccagcagcgtataggtcatgggcacacgggtgactacctcgtcctgccctccccacccccagtccaacccaagggagcccatagtcaggcaagggacatgccacaatgtgactgccgccagcatgaaccccacttcagctgcgaaatagctccactgaacacaaccagatcccctgtgtagccgggagtccagagcccctagccagtgccagccgccatcaatgcccagagctgtgggagccatggcgtgagcgcgtggcctggacacccccacacgggttgccctcctgcatccatcaagggccagagtgttgtggtgggaccccacctgctcagagatgagcccccagcagtcccagcccccagtgtcactgcctccctctgacagcctggagcatgagtccctttcaagggaggtgttgtgggagtacagcgggggtacgagggtgaataggggctcccttcctgccacctccaaagtcacctgatgtttctgcctgggagcctcccagcctaacccttcacaatggtgtccggctggcctgtgggagagccaccctgcattggcttgaagtcctgtcttcccctgctgtcccagcactgtcctggctgccccctggaccgtccatccttgtgctgaggacctcctggagctaggcccaccaagcgagtcactcagagccgggggtcactgccgagagcctccggggaaggctcctcattggaccctgccagctggccagggaaccccactcctggattcaaactctgcctaaccagccctgatgccagccccagctctgggggctaaggcccttccgctaggacccggcagggtcccaacctgtctctaggagccagcccaggccccgaatcctctcctagtctctgctgcagagcatttgaggaactgtgaccgcaggctagggggtgggggtctcccaagggaccctcccctaaggacccagggtgggattcattgccccaaagtggctgcgggcgctcagctcagttggccaggtaccggggttattagctcatcccatggaccggtggttgggggcggggggctagggctggcatggcctctgatcctcaagtctgccacctggcacccactccctacccactggcaaaatgccagaggaaagcaagccctacaagtgccctggctgccagagagactaggtggagctgtggcatgcataaacagtggccacagcaagcatgccaagagccgaggcctcccgagctgcgtggacactgtagtcagatccctggccagataggggtggggagaggcccctgagggacacctgccagctcgtggagcagccccagtgctgctgtgggttacagtgctcctgggaggacagggtgcaggaagcggggagagctgccgggtgcccggctccgcggggagagctgccgggtgccgggctccacgtggagcacgggccccagcttcctggagctgcccggagcccagccaggaaggcacaaggcccattttctaggtctggagaagtcaggagtcccaggtgacagtcagggggcttgtaatataggcacgtaggactgatcctaagagcgtcgccccctctgtccccctcccctggaggggcagcaggtcccagtcagggaaggtgcccatcccccaggaagccgtggcacttgttcattctacagtttttcccttatctgctcctacggcctctgccagccagcagtgggaagccgctggggagaggcaggggaggggagcggaggggagggcgggggagggggccctccttcctgcccccctcccgtttggcggcctgggaaaaggcagcatattgaggcgcggggctcccggcatcaggccccgggatgctaatgagggcgagcgcgttcccacagcccggacattgtgccgcgcggcccacctgctccttggggagcgcccattgtgcccgcgccaattcacaggcaatttagcgtgcgctaatgggccggcgcctttgtgcggcccgcccggccattggccgcggagtgtgggaacggccgcggcgcccggactccaggcgccaggccgccgcccgcgcctatatagggcgtcggcgcgcggggccggtgtccgcgccagcccgggacgcgcttggccttgcccgcgcccgctcgcctcgtctcgcccggcctccccgcgtcgcctcgtcgcctgttccgcgccaggcatggcccccagcactgtggccgtggagctgctcagccccaaagagaaaaaccgagtaagtaccagactcgcccggcgcgctgtccccgcggcctccggtcctcgggggtccctgcgccgtgccgggccagcctgacaccccctcctcccgcagctgcggaagccggtggtggagaagatgcgccgcgaccgcatcaacagcagcatcgagcagctgaagctgctgctggagcaggagttcgcgcggcaccagcccaactccaagctggagaaggccgacatcctggagatggctgtcagctacctgaagcacagcaaaggtgagcgcgcccgggccccccgcgccccgagttcccaccgcgccccggctcccccgcgccccgccgcccgctcaccgccgccgcgtctccccgcagccttcgtcgccgccgccggccccaagagcctgcaccaggactacagcgaaggctactcgtggtgcctgcaggaggccgtgcagttcctgacgctccacgccgccagcgacacgcagatgaagctgctgtaccacttccagcggcccccggccgcgcccgccgcgcccgccaaggagcccaaggcgccgggcgccgcgcccccgcccgcgctctccgccaaggccaccgccgccgccgccgccgcgcaccagcccgcctgcggcctctggcggccctggtgacccggcgggacctgcgggcgcgcggcccgacgaccagagggcgagcctgctcctctcgcctgtagggaagcgccttcccgccgtcgtccgccccgggcttggacgcgcccttctccggaaggctctggccccaagctggccggcccgcaggagccccattctcagagaatgtgtgtgcagagtccctgccgttttaggacaatcagggcccatcttctgccaagtgtctgaccccatggggttgttctgtgtttgcatttaagcaagtgacttctgggaagtccccggccgcccggggttctatgatatttgtagtgccggggctcgcacactgctgcccccagcctgtagaggactttcttcagggcccgtagctgctgggcgtacccctggcaggcgggctgtgccgcgggcacatttgccttttgtgaaggccgaactcgagctgtatcctcataggaaacagtgatcaccccggacgggcgtccaggaccctgagggccatggccaaaaggctcctgagtgtgcctggtggtctggctggggctcacggtgggctgtctggggagggtgggtgcctccactatgatccttaaaggattcctctgtgtgggtggatgcgtgtgggcacgactttgtactcagaaattgaactctcagtcacgtggaagccacgggactgctccgaagccgccataataaaatctgattgttcagcccccaacacagtgtcgtctgctgtgcctcacgcctgtccttggcagccatggagcgggtctgcaggggtgaaggggaatgggcagggccatggtagcagttaagcagggagggacccctgccagtggccccctggaccccggaagaagggtggggtccttgctccggaagaacagggggagggagggatggagggaaagcaggtgaggggcaggggcagggggaggtgggctggaggggtggacatggtcggagccctgggtctccccccgcccaggcctttcactagcttccggaaggtaggggtggggcaaggtgacagcgcaggaccttaggctgtgtccactgagaggcgacccagggccacagcccgcagtagatctgttgctacagccaaaggggcttggccctgggccaaacaggagaaaacatttgccccgagttgctgctgcacactcccacggcctgcagcgccagtcctggcatgggctccggggacacctgcccgctggccaccgtgccaaggcaggatctggcagtcctggcaggagcctgcacggggccatcccttgcctcagaaagggcatgtatttttaggcaggccacagggtgttggctgagtctgcaagaactgaggcctgtggctcccagggaccagctcccaaggggcaaaatccatccagcaaggattgggccggagtgggccgcattcccacccccgctgaatggtagccccgtgtgtgggcctgccctgcctgctccttcctgctcagcccctctcgctccgctcagccttcagcccctttctggctactccacaggcagtctagacagggtccccccaccagaccaacccagtgcctgccagtggtccctaccgagccccggggtatggtgggcagaggacagggaaggcccccattcacctgcatgtttcccgcatgttcagtgggcacacaggtgggcgcccctcatggagggcacctcctgccagcctggcccatggcacaccatgctgccaggggtctgagctgccagaggtctaagccgcctggggtgtgctccactcttccacccaggcctccctggggcaggctccccctccagagccacacacccacccccttggaagacacaggcaaggatgcctcctccctgaaggcttgccctgcgcacacagatgcattatccctggagtttgtgccgccccacaggcctgtgctcccaggagccctgccaggcagctggtggcattctccacgtgcagacagaggctgagggccagagacatgcagtaatgaccccgggttacccgggaggggctgatctgtctgcttccaacactgggctttttcccaaggcgcccagagcctctggagaagacgcatctcttcatgccagcagggcttcccagccactcaccctggaaccctggcctgccccacctatacccctgtcctggctccagctgcttccaaggcttgttcctgcagcctcccaggcacctgtcttgcccacaggcagcctgcctggcttcccccgaccacagcactttccacggatcgccattacagcacacatcttccctacccgcaggtgcatgccaggctggggctcctcccaggtggggcagggttccccactcctctggtttgcatgggacttttaacattgaaagtcccacgcccctgggaagccaggattgagtcaccctagcaaagagcgcatcacattcgccctggcgtgcagggccaagcttacagcaggcactcgctgaagggcagggctctctgacagtctgcagacccacgtgcccccttagaagcaggtgggcggcctctgcggcctccctcagcagggctcagagcacttgagttaagcctgtggacagcgcggtaaaagaacatcagtccagatgttctgtgctgatgcgcgatctctggaggataaccgcccgcccgcccgcagccccgggcctctcggacccctgcccagcactggccctagctcgccctgtagcggccgagacctcagaggccgggggtgggggagggaaggggcggggccggcgcctcattaacataatctatgcgagggggcgtttggcagtcaaatatatgcgcatatatctccatggctgatgagctggccgggcactttcaaaatggcggagtgtggagcgagcggcagcgggagcagcggggacagtctggacaagagcatcacgctgccccccgacgagatcttccgcaacctggagaacgccaagcgcttcgccatcgacataggtagccgcaggccgggcgccgggcgcgggctgcgggggcgggcggggcgccggcggtgggccggcgagcgggggcggcgggaaggacsaagggcgggggcgcgggcctcgcgcacagcctcacgggccttgtagtccgcgggcccgcgcacagcctcacgggccttgtagtccgcagggtcgctgatgcgcgggctcggggcgacggccggactacagctaccggcaggcgccgcagggaccagagcggggcctgccgggcctggtagttcgcgcggccgtcctgggtggctgggggccggggtccagcgttacccgccgcgaggtgggagggtcggcggaattttatgtcttcggccacatcggcatctgggcgccccggctccgccgcttggctggtggctggcctgagatttggggtccttagttctggtcgagacgaggacgagctcggcgggaagcccttggcagagtggccccgaaaaggccgcgcgttcccgcggcgtggccagctgtggcccgcgggccggacagtccgtgcacaggccccgctctctggagagtggacgccgggcgtgagttcaggcggccgtggacgtgggacctgggaactcgtgcctctggtttaaaagccacccgtgccttccgtggcctttaaggcggcctgcacttctgccctggcctctccagggtccgctgcagaccctcctgcctgatggctgtgctctcagtaatgacggcgggccaggctctgttctagacctttttcccacgctcctgactcccggacacctcccagccacctctaggggaggaacgcgaattactcccttttcgcagatgaggataccaagccccagaaaggtgaactaatttgcccagggtcatcgggctagaaagtggcagaaccaggatttgaaccagccactccctgctctcctactctgcccatgtttcaggcatgagggcttcctgggggcagcttcacctggagaaaccccccttgaatagccgctgcggcttcacatacctctccctcttagcactcatctcggtcgtaggctgagtctgcttgtgtgtgaatcccrcaagagcagcggtgtgtcttgtagccccagcccccgaaaaggatgcccaacctgtctttgccgcccagtaaatactgggatgaatgggcctgccgctgactgcttcccacctccctggaaaagctgggactcagagagacccaggccattccctctgagctgtgtgctcctggtgcatctgacatgtttgctgctgtggtgtcctcggggttgttggtgtcatcatctctctgagatgtccagccagggaagggtgtcctctagggaagtggggggcgatgagaatggaagtagctataggtcctggctcccacctttcagtgagcttatgggaggcaatgcttcttagggggtgtggcctggtgccaggtatgagaacgtgtgagtagcatctttagggaccgctgataggacttgggactgactggttattgggctgcaggtgctgagcttgcagccctagcctaggggattgtctaccgcaggcctcaccagaggctccccagccatgcttcccagccttctgagaccttgaggcccggtagagcgtgtgctctgcaaggttctgctgcccttacactgggggattctgttactggaagcaagtcgggaytaaatgtttctgaaatgcaattgcagttgacctgcataagtcacttggggaatggccaggagaacagggctcaccgtggatgttctgtgtggccccgagaggccagtgaagccgcagagctggggctgtccaggaagggctgtcgcagccctagagggccctggagtaccagcctgttctccaggctgagcccagggggtttcttggtagaaggatactctaagaggtctgtttagtgctggtatttatttcccctcttcaaagtttctccctgcgtctgggtcctgtgtctctggttcttaagaggacctgttgactgatactgagagaccttttgttkgttactcctgaccgagctgctgggaggccacgctcagggtggggtgtcttcaacccaggaaccctcaaagccaaagtgcttgtcaacagtgttgtttaaaagcaggcttctcccatttcctcttcccttgcctgtgtctggatctaggaaagctcacctgccctgtgttctggcaagctgttttcctctcgatgggacgctgatgtctgctgagcagattcacctctttgaaagcagcagggacgttgtatttctcaaaacatactgcagcttcgatctgattttaggtttctgcgggctgtggggagggttcctcagaggcaggtgagacaggaaggggccacggggcggtggtgtctgctkggctgtcctgccctccattggtgcccaaagaggaaacacaggaccagagagaatggcagaggggatggggcctgtgggacagggagaactagaaggccatggctcagatgtgaagagcacaggtgaccaaacctctgggaagcccccttcccccaccagctgttggcctcagggccgagcgcgggcagcccggagagccgccaggaggcactcctgtcactgccttgccaggcgcggtttgctgtgattccgaggggtccctgagctcagcccggaagggtccccgcccgcaggcggttccctctgctctaacagatctccctgctgtgcgtgcccctcgcgcctcaggtcccgttttgtccccccgggtgtggggagtaggcagacggaacactggccttgctgggcctctccgtgcaggggtctcagggagggaggatgcgtatcttgcagaaaccaacccacccccacctctgtcccaaccccagtacatcctgtttgggcatgtatttaacacaaagaacccagggcctgaaactggatttctgtgacctgagagtttgtttatastgacttttgatgagtctcttaaaatagatcttcatcctcttgcatcatctgtcgttttagaaaacgatttatttactgaggtgagtcggcggcatggtgcatgttagtgagactctccgggcccggccagcactgggggcaggggaggggataaggaggcttaaagccacaggctaggggatcagattgagcctgtgacgcgtccaccagactgtacgccrgccgtcggggagcctgccctcaccaccaggcaggaggtgccctgggatggctgttgtggggcctggacacggtgggttttgctacatgaacagcattggctgtttgcttggtgtttccaaatctttttactgacctgagtgcttgttctcagacatccttatagtattttgtcaaaaaacaataatttgaaaataactttagcctcattactctcatgatgtgggatttttgcctctttttgtcaggccctgtaagaaatgcactgtgttaagtcactatagcaccatccagtgccctccgttaagtcactataacaccacacggtcccctcygttaagtcactatagcaccatacggtgccctctgttaagtcactatagcacacacagtgctctccgttaagtcactatagcaccacacggtcccctccgttaagtcactatagcaccatccagtgccctccgttaagtcactataacaccacacggtgccctccgttaagtcactataacaccacacggtcccctccgttaagtcactatagcaccatccagtgccctccgttaagtcactataacaccacacggtcccttccgttaagtcactatagcaccatccggtgccctccgttaagtcactataacaccacacrgtcccctccgttaagtcactttagcacacacagtgccctccgttaagtcactatagcaccgtacggtgccctccgttaagtcactataacacacacggtgccctccgttaagtcactatagcaccacacagtgccctccgttaagtcactatagcaccatacggtsccctccgttaagttactataacacacacggtgccctccgttaagtcactataacacacacagtgccctctgttaagtcactgtagcaccgcgcaatgcactcaaagtcacattttgtttctttttctatttgtcattcatgttgtttcaaatctatgaatacaactctagcctcaacaatgtctgtttttttttttaacttagaagaatttgtccttgaaaaggccttcttcaagaatcttttcacttttccctgaaatctggttcaggtacatagagccccttccatttcctgatatttattcaacctttgatcacaggcggcatcctggaagccacagggcttctcgagagcatcagagagactttggcctgtggggaaacggactttggtggcctctgacttytggctacttttggggctggggctgcattttctgcctggagcctctcaagagtagccagcggcaccgtttgcctctccagggtaggggagctgctcaggccccgttaccgccctgggctgtgaggagagcctcctttgtaagcagggacggtcgagggtgtacttcttaaaacgaaaacagcctggatttgtcagcttatcgctttgggtcattagcaagatcacttgaaactgaattttcttaaagcagtgaggataaccaaggttacccaaagcaagacagctctccctttcctctgcaggacttggtgccaaggggaagcgggacctcttgagctcagtttggccagggagctgaggaggagcagaatttgagaaagaaaagtgtagatttgattgttcgttttcctgtcctctcttttgtgcccacagggtttttaagttccagtagccccaaacccctcatctacagagactttagtctccaggacacccagagagtgtggggcatggacccccaggccccgctgtgtcctggtcctgaatcctgcccggtttgtgtctcccctgcaggcgggtcgttaaccaagctggcctactattcaacggtacagcacaaagtcgccaaggtgcggtctttcgaccactccggaaaggtgagcctgcactgtggccacccggggcagggcagccgcttctctgtcgtcttggacctggcacttgtctcgcagtcatccctctgctgctgcagacctcgactttagtgtcctgggagtttctagcagggacagcctcccctgccttccgccgtgtcccttcaagaccctttgtaggaacctgcgcccgcctgtgctcccccgggagaggcttccgctcctgctgggtggccctgaggtcgccacggtcctaggctcctccctcttgcccaggattctgcctcagagcgccgcctggttgaaggctggcgcgaacagccagctccactagggcagggtgcgcacagcccagcccggcgcggtgtcccacacacatgcggcctcccctactctgttttccaggacacagaacgtgaacatgagccgccctatgagatttcagttcaagaagagatcactgctcgactgcacttcattaagtttgagaatacctacatcgaagcctgcctggacttcatcaaagaccatctcgtcaacacagagaccaaggtcatccaggcgaccgggggcggggcctacaagttcaargacctcatcgaagagaagctgcggctgaagtgagtggggatctcaagggcgagaaaggaacatgtgtctgcccccgagtccctgggtgtcccagagccgcgtccctggcgctcgtgtgtcagatygcgcatggggcatggctgccccttcggaccaggcaggcttgcatggttgcacctgtctgtggcccagactctttaaggggttggcgyttccttttcagagtcgacaaggaggacgtgatgacgtgcctgattaaggggtgcaacttcgtgctcaagaacatcccccatgaggccttcgtgtaccagaaggattccgaccctgagttccggttccagaccaaccacccccacattttcccctatcttcttgtcaatatcggctctggagtctccatcgtgaaggtaagacccggcttcatgaatgaatgagtggatggtttagccatagtttgttaagccctcgctgtgtgcaggagccagggctgggcacatggatggggcccagtgggcgggaggggggtggcgaggctgtgagctcagagcctctgtgggaggggcatcagcgcccccaggcttggccatgagagtcctcccactggcggttggggtgggggcggggttcaccccagcgcagcacatggggcggggggcgggggagcctgtgtggctgagggcccactgagggcacacctgccctggctctgttgcaggtggagacggaggacaggttcgagtgggtcggcggcagctccattggaggcggcaccttctgggggcttggcgctctgctcaccaaaacgaaggtatgcggcagctgccagagaccttccaggggtctgcggagatgtctgcttccttcccccgaaggcctgcagctgggcggtgcaaaagctgcttccgggcctccctcctgactcgcgtcagtgggtctctggcctctgcggcttcactctttgcgccctgagggttgggtgtcccagcaacccagagcttctatcctggctgggtggcccgagggtcccgcttgccgcctcctgcctttggtcccacgcgatgagggcccatttaccccctgcccgcgcgtgcctcctgccatgggcttggtttctggggtcgtggggattccagcagctcctggcgcctcacccgccccctcgccgtgtcctgcagaagtttgacgagctcctgcacctggcctcgaggggccagcacagcaatgtggacatgctggtgcgggacgtctacggcggcgcccaccagactctygggctgagygggaacctcatcgccagcagcttcgggaagtcggccaccgccgaccaaggtgctcacccyggcctctgccgccagagagcaggatggtggggacacttggggtctcacggacaggagcttcccccaccattgctttcccacaactgctccctggagagtcggggtcttgggtgtcagccctgtaacctcttcctgccgagtcgctgcagctcaggcccactgctcagaacgtcggcagataaacgccacggtcttggttttggaagaaaaaatagtttcctgattgggttttttcctccttcaaaacaaagcttaatccgtccaggaatgattcacacatcacacgcagcctcccgcacttgggctccagttcccccactcagctctctctccccctcccctcccactcagctctctctccccctcccctcccactcagctctctctccccctcccctcctgctcgctctcatgtcgtgcacttgctgtacttggagatgagtgccttttccttcccttcctcagagttctccaaagaagacatggcgaagagcctgctgcacatgatcagcaacgacattgggcagctggcctgcctccacgcacggctgcacagcctggaccgcgtgtactttggaggcttctttatccggggccaccccgtgaccatgcgcaccatcacctatagcatcaacttcttctccaaggtaacggatgcgccgccctccccarcctctaacgcagaccccccaggatcttcccaatcagtcatgctggttagacaccgcagcacccccagggaggcctggagggtgggggccaagaagcccagcacccctcccttctgactgattctgggcagcctacattttgtggcaccgtggccacctgagtytgagtacatcaccagtgatgagcattctagagagctccaggcaggcctgctgatctgcgctggggtcagggtgcccctgcccccgcagaggcacgcccacccacatgcctgacgcagagacttgtgggccagggactcgctgcatgggagaagctatctcacccttagctttcttcaaacagcagcccgccctctggtgccaggcgcgattccactggcaagtatgccgtgggtgccatggcgcctcttcgagggtttgggccgcgcrgtgcgaggcccgcgcacgttgagctggtttgcggaggcaccgggtgttgtgtggggccaacagcagcacgtgtgctttggccacggcagggggaagtgcaggcgctgtttctgaggcacgaaggctacctgggagccatcggagcgttcctgaaaggagctgagcaggacagtgagtcgcggtgctggcgcccctgagcagygtggggcctcagctgtggcctgggcctgtgctccaggccagggcggcccagggtggaggtggggtggggagcgtgagtcctcagaaagtgacagcagcaggcatgtctaacattttaacaatttagttaataagcgattttataccctttcctcctccactctcctgcttttgaatcaagggcaaggttaacacaagtgacctggcttcttgytttccagatcctaaccagtacagctggggagagaactatgcaggcagctccgggctgatgagtgcatcacccgagctcggcccggcgcagcgggcgcggagtggcactgtgagtagtgggctctggccgccccgggccccaggggagcagcctatgccgcactcacctcgcctgtccctgagcgaagcctcttgtggctgtcccggctgaaaggcgcctctgcccatggcgaatcctcccatggacctggggtataactaggggcaagagaaggacactgtggcttgctttcccatctccctcattgggtgctttcgtattttggaaacattcagcaggaattacggagtctgtgtgatccggccttcttgtttgcagagagattgctaaagttcaggggtgacggggacctctccccacgccagaaggcccgtccactttggagttgaaacccgaaaccgcaggagccacccagggccctgcctaggactgcgcgctctgccgcacactgccgcgcactgtggctgatggtctgtcggttacagtctgctctcctcggggtgtcccggctcattccttggatccccagtgggtttgccctggcctgagctgggtggcactggcgggctaggagacgcaccccatgtctgccgagttggagctgctccggaagggtcccccgccaggacctgcgtcagccacgggatgcccccagcacagccccacatggcaggaaccgccccgtgtcacaggctgtcagggtcctcgaccgtgcccccccgcggggctcattccttctgtagctgtgagcagttaacctgaggtcacgcacaaagctagtcrgacccctcaggacaggccgctggcattgttggcaggaagttgcttgtcatttgtagacatggggttcagtgtcagtattttcaagaccgcgacttgttgagttytggcttctcaggagggcgcctcccttttgtgtgggtcctgcagttcacaccaggccacggcctcgcacagacgcaccacactggccgcagccctggtctgcctttcccaccgccagcactaggcaggggagtgggggcgaggctctgggggcctggcagagccccaggctctcagcttttgccctgctgttgggcagaggggcttggtgtcttccagcctcagtttctgatttgccaagtgtgcataatttgccaaatgtcctggactgtaacctggagtgactgcgtggacggccacagtgcttcgggggccccgttcaggaggcgcttgttacctatttggtaccccaccagtggcacagccctgccaggcaggaggggcccccaccttactgaggatcaaactgacatgcagagagatggagtcatttatttcagtttatattgtccaaaaaagtcaaagcgaagatttgaacccatttgtcaggatagaaggagcctgcgacctggcaaggcagcaccaggcgatcccggctgtggtccgtggtagttaaggtggggctcctgccgccttcygcactggctttgggaagtcactggctttttccacgtggagcttctgcccggcatgggcttcccacctggaaggcgtcccctttgctctggaggtccctgcccacccagaggctgcttctccagccccaggggttgccagcaggggtgccccagtggagaagggcagagggccagcatgtgacctgtggggtagccaccrgagggtgggaagaggcggtcagctacacagttcccctcatagcccctctggtcccagagcagcrgctgctgcggtgagygtgcagagagccgagtactgatgtgtgcgtcggctcagttcagttcacttcctcccggcataaggtagaaaaagccagcagggcccgtgagcgcgcctgtgctgggtgcaggtggccccggggtgccctgggtgcataatggcctggccctgccatagtccttcatggacagaacgtgctgggaggcccggcagccatggaggaagaagggtgcatgtggggcgtggggactccctgcccggcacggagtggaacactgcctggtgcttagtgaggacagaaccccaaacctctgtgtgcagacacggccacctggaggaccagaggtgggaacagtgtgactgcaggggtcacgggaggaggtgaaactgtaggggtgacagggaggggtgactgcagggaggtggtgatgggggagggagttactatagggatggtggaggaggggtgatgggagggtgactgcagcggtgattggggaggtgtggctgcagcggggaggtgctgggggcaggaggcgtgtggtgggagcagacgcaaccccagtgtcaaaccagggggtaagtcaaggtatccggctcaggccgccgggcagctgagggggcccagtgggggtctcgtctgtggcccagagacgtggcrgaagaaggcagtacatctcccttcttagagagagagtggaagcttctgagtgtggcttgggtcgttctgaaccatggtgacgtttccaccctgccactgcctgtcttccagtttgacttgctggaaatggaccggctggagaggccactggttgacctgccgctcctcctggacccgccctcctacgtgcccgacacggtggacctcaccgatgacgctctggcccgaaaatactggctcacctgctttgaggaggccctggacggggtgagggctccgggtgccgtctagacgattccaaggccgyrgccgggttaaccttccaaggctccgggggcaaagccaaggtggcgaagggggacaggccagtgttgtccagaaacccctygatctgcgtctgagtgagggggcgattttggtttctcaggcaaaaataccgctcctggccacctggtgggtcagtgaggacgtggcgtctgcgaggcacgttgcttctaagggcagctgatagttctgctagctagcacattccttcaaaaagcaatttaggagacgtytctgctcttttgaggtgtgactgaggtgcgggaggcattgtgggaccctgactctgggggtggggtgagactcagccccagcaagctcccggcgaggccaccttgggactyctgcgtcccaccttctccaaggctgggctggtcccgtggagcaaatgccaggccctgggccacgctgcccctcaggagctcagctcggggccagggagccccggtagcaacacgcactcttcacgaagccctcggagaggccgggtcgtgccagggtttgtcctgagggaggagtcccagccctgcccaggacccggagtgagctctgagtgcccagagcccctcgtccccggcacaggatgggggctcgagtctgaggacgtgggtctyggcctcgggtttcctggggggtgagggaccaaggtcactcctgctcctgcctcccagggcaactgggagrggcgaatggcaaagggaagcctcgggtgaccgtgaactgtcaccgtcagcctttcctgttccagtagaaactgccctgaccacagcccaggcagcccccaccctgcccgagtcccccacagcaggccctgaccctgccccgggaagccccccatagctagcccccaccctgccccaaacagcccccgacagccggctcccaccctgcaccaggcctcctacagccgcccccaccctgccccagacagtcccccacggccgacccccacccttccccgagccccctgctgtcacgtggggattcgcaagcagcagggccagcgcttgactaaccccctccttctgtcgctggcaggtagtgaagcgcgcagtggcgagccagccagactctgtggatgcagccgagagggcggagaagttccggcagaagtactggaacaagcttcagaccctgaggcagcagcccttgtaagtgcccagcaccccggtgtgtggccacctcttccatccagagggcccctgcacctctgagaaagtgccgtgatgttggcattcggaccccagctcgctgggggtgggtgtgggccctggcggcacagcccccttggaccccgcctcaagcagcgtttgcactgccgggctcctgaggacgtccgtggcacagccgaggatggcagacgggcgrgtgttcggcctgccctgctcagcgccctctgccgtgtctgtccccagcgcctatgggaccctgaccgtgcgcagcctgctggacaccagggagcactgtctgaacgagttcaacttcccggatccctactccaaagtaagtgcagtgtgccctggccttccgctcgctcytgtccccgtcccgctggcaccgcgtgtcctgtctctgtcccgctggctcggggcatcctgtcctgtctgaggccatgcaggtttggtagcggccccaactccagccctggcaccacaatagccagggcctctgttggcagcatctgctgaggagctgtgttacccccacagatgctggggccacttaggggtggggactgctgtgactagagaagaagggtgtgaaccccagtttggatgtgttcctgacagacacaggctgcctgcctgcaggagccaagggcctcccagcttctgtgagggtgggcgattgtggytggggactgctttcccctcatggggaggggctggaaccctggaccaccctggctccctcctaggaggctggacagtgaccagaggcctcctatcccggcaacgtgcagggccgtgcaaggtgggcctttccgggcgtccgttttgcttccccaagtctggcggccagagccctccttggccctttctgccaggaggcagcgggcagcagcggaggcatggactcctcccacctcttctgggaagggccagcgccatgcctccctcccctcacacgccgagccttgtgacagcggaagtctgggtgtcgagggttttgaggccagggctgtgggtacctgtgggggccgtgtcctccactcttgtcctgcccttcacccactgctcagtcacatgggggctgaagttgtcctgggcctcgtcctcagagccccgtgcagctgtgcgstggccactgtcccggaccgataggcttgtgcctggtggggtcccagttgggcctgagtcttcgatcctgaggggcgtggtatggaacaggctgcgcctggcaggtgtccagggtgggctgaggccacgtcttcactcaggcctggcatctggcactctccacaggtgaagcagygggagaatggcgtggcgctgaggtgcttccccggggtcgtgcgctccctggacgygctgggctgggaggaacggcagctggcgctggtgaaaggcctcctggcggggaatgtcttcgactggggggccaaagccgtgtctgcgtaggtgtctgcrggctcggagcaggctctgcagcctgtgggtgcctgtcctgccccaggcttgcgggcaaggaggtggagcgggtcccttgggggtcacrtggcgcttggtggcttggtggctcagggctttggggcccagggagtgcacatggcagcagcgccaggggctgggcagggcgcagcgcccttgtctgtcccctcaggttctgaggaggccccttccttaagcatgggtgccgcagaggcctaagggtgtggatttgaaaatcggggctggcattttctattgtcagaatccaaattcatgtttcctatgtgtggtaggaattaaacatttctgatgtgatgatcaaagggtgctttgcaaagcagtcccctagactggcctgtaggacacgcaggtgtctagcacctggcgccgtctcctggggctctgaatcttgaaaatgaacccccccaccatcatttaccttcactcccaaagaagctgcttccagtctctgggcctccccaggcggccgcaccacctctcgtggtccctgctttttttcatgtggggctggagggaaatgcctgggttytcagccctccctgggtcccactcgtgtctcgagacatagatgagaacgccgcctccaaccatggctgcccctctgggacacaggcccytcccgcagcctgtcaggagcattggaggagggtcctgacccatgggattggccttgtggctgggggctccccacaccrcctgcatgggtgccaagcacagggaccatactgcggctgccagtcaccgagaggcttccctggccccgtggctccgagtccaccttgagaaacagcctgtgctctctcagacctttgcttggtggccccctgagccttctgcggatcgcagcatgttaagaacgctgtatctgttctgcctgggagtgatttggggtcttcacgttgagcagctgcctctgtcccacctgggagggatttggggtcttagcagctgcctctgtcctgcctgggagtgatttggggtcttcacgttgagcagctgcccctgtcccacctgggagggatttgggatctttacattgagcagctgcctctgtcccgcytgggagggatttggggtcttcacattgagcactgtggctgaaggtttttgttctgttgtcttaattttcttttctcctcctccatgcagtgtccttgaatccgacccctactttgggtttgaagaagcaaagaggaagttacaaggtacggatggccaagtaacttggggccttgccttgtgctggggccatgcctggacgttctctgcaacagcgaatgcagttgcggtcggggtccaggcacctcccctgctcaagkctctgtcagctgggcttcgggggcggggagaacttgcttcctggagagacgaacacctgaagacgcgtctccctgacccctgacctggagcaccgggctaatcatgtgtccctctctctgtctcagaaagaccctggctcgtggattcctacagcgagtggcttcagagattaaaggtatgtggaggggcctcccacctctgctgctggggacacagcggggcccgggggggtggtcactggagggaggtgggcatgggctgcctcgggtggccctcccctcctgttagagtctcaccatcctgcgagccaagggtctcagcatcccctgccccacacttgccctcctgtcgtgactgcttcttaggtcacctgctctaggcacaaagccttgccagaagagacaggcactggcccctgcaggccaatccgtccctggcgcctctggggtcctgaagccccagtctcagcccctgcaggctggcccgtcccggtgcctctggggtcctgaagtcccggtctcagcccctgcagcccagcccagtcccggcacctctggggccctgaagcccctggtctcggcccctgcaggacagcccatccctggcatctctggggccctgaagcccccagtctcggcccctgcagggcagcgtgacgggcagcaggggtgcggactgactcgcttggatgcgcctgttcccaactgaacgtcctggttttgtcttacaggggccccctcataaatgtgccttaattttcgcagataacagtggaatagacatcattttgggagtcttcccctttgtcagggagctactccttagagggacagaggtgagtgttgaggtggtgggtggggcccttcccctgggcttctctgctctcggtggggttggcgccgctgtgggcctctggcggtggtcggggctcctccggacgcagcaggtaggtgcaggcagcagcacgggggaggcggcccagagccgtcatctgctggggtggaggctccgagccccctgggctcaggctgagggtccatgtgctgaagcccagggttgacgccaggctcctggaagggtgctcacagcaaggaggctttggggctgtgacttcacagacaggcaggtcccaggggcaggctctaaactcagctctgcccctcggctcagctccctcccaggggccacagagtggcaaggtcaggcgaggtccctgctcctcagcagcaggtggctggccaggcccgctgggcacagcaccctcacccagcccagccactcgaaggccggggtgcacgcaggctccatgctgggccagcacaggttcctaaagagcctgggccctcctcctgcaggtcatcctggcgtgcaactcaggccccgccctgaacgacgtgacccacagcgagtccctcatcgtggcagagcgtattgcgggcatggaccctgtcgtgcagtgagtgttggcgggcagtgctgggggggccttgatggggaggggcaccagctgggcagagtgggccatggggattgtcactgaactgggagctcctgggggcrctgaccaccttgtatctggcagctctgcgctccrggaagagaggctgctgctggtgcagacgggctccagctccccgtgcctcgacctcaggtaaccccgcaccctgcacctgttctctccctcctgggctctgtgccctctgtgccgtgcacctgcacccaggtgcatgcgggacaccgacctcaggactgcccctgcggcctctcctgaccccaggcccggattgatctcaggaggggacagatatgccatccccgaaggtggcctggggagggtgaatggattcagggtctgaggtggttacacatgggctgggtttggggacttggggcaagaggggccaatgtccctgtggccactcagctgagaccgagggcgacctgggcagctgcccggtgtctgtcacctccgtgtcccacatagatgccaggctctgcttctgtggttctggaggtcattagtcaattgtatgtggtgctgtctgtcctcctgattgcagaggaggaaggaaccccttaaatgagcgggttctgagtgctggggccgctggtctgctctgcctggtgggattctccagtgctggcttcatctgtgccccagccccactctcaccaacaaggagggcgtgaaaatgacaaggaatccatccctagagttcacaggagatctagggcagagtttccaagctgcagctgctctggccctgtgtgagctgytgctctgaggaagccccaggctgaggcagctaccaggcggaggctgggtttggaggcctccacatcagggaattgagcggtaggggtttcagccttcacgttggtcgccgcactgtatgggaagtggggtctggggtctgcttgcccagtctcaccgtcctcttcctccccaaagccgcctggataaggggctggccgcactggtgcgggagcgtggcgcggatctggtggtcatcgagggcatgggccgtgctgtccacacaaactaccacgcagccctgcgctgcgagagcctcaagctggccgtcatcaagaacgcgtggctggccgagcggctgggcggccggctcttcagcgtcatcttcaagtacgaggtcccagccgagtgaggcgctgcagctgccggactcttctgcttgtcacttgtcaggaatgtgtttttaccaccacagggaaactgcgttcaaatcaacgtatttatatggtactgctgtgacgcggcacatacaccccagccgcacagatgcgtgtgacccagaggcgagacgcagctttgtcctgggagacgttcatattggaatctatttaactgctaaagaaccttttatatatatatatatataaatagagagatctatacaggtatgtctgacgggacgcagcaccgtgggcacgcaccaaatagagtttttaaaagaggccggagccatctgcgatgttttatttcggagcaggggcccctcccgactcctcccatggggggagcccagagcgggagcccttccctgcgctgcttctagaccttgtaggcaacgagtgccagccgccccgcagaccccatggccccgggcccctgcgtctctcaccgctccctccgggccagaagaaccaactcagccaccctcgtccctccagcgccctccccctgcacctgcgggatgtgtgggtgctgagcagcaattcctgactcgagagcctgggaaaggagcgctcaacatcgatcaccctcaagggctctcaggcagccaggggccgacgtggaccctgctaggaactgtgtggaccgcgtgggttttgttgctatggccttgggaccaggctccctggggccgtgttctgtggctagggtgggcatggctggggggagctggcagcagggaggcccgctgggcctggcccctgggagctctgaggcgcctgggggtcctccccctcagcccaggtgtgggattgagaccacacatagcatcgtagagagggcaggagggcacagggcttgcggaggccctgctggggtgggctggctgcaggcccccagctttgacttcatgtggtgggagctgttcctggtgctgagctgctgggcaggccctgaggaggctgagctgctaccttgccccaccacccccacccccgctggggtcccccacatccagaggcttcactgagacccccaagcacaggctgtcctaggccaaggaggtggggtggcatggatcaccttccagacagctttgcttggtggtctggaacctgcagaggctaagacccctccctcatggagacctggcctgcccagaggtgcccagtggccatttctggcccccactgtggtgtctcttcgtgacctgcccttggagtctgcgtggaacctgagtcccagccctcgtgcagcggccaccaaagggtctcgtgtcctggcagaggagcccgggggcagctgggctatcctgaggtggactgtccccctggctccagcttctccctcctgtgggtccccagggcagaggcccagcccccggaaccccatgggccctcaccactttccggccctctcctcaggcccggctctctgatggggaagccctcccagcctgcatctctgtagccttccctgaccccactcagcccctccagctcttgctcccatcctggccccaccctcactggtggtgggtggcagcagtggcctggccgctctgggcacccggatgtgtgactgcctggcctgacacccacagggcttgaccccggggttggagagtccatctgtgctggggacgcacccactacagaggtttggcctgagcctggcccagacaggatgccgaggaggaggtgggggatgcacagaggcctggaaggacagagccaggacaaagacaccagggcctagcccaggctcagcccctgcacacccccatgcagggcctgccggtggccacggcctcagctcccctcttgcacaaggggccacccagcctatgagccaggcacccctgtgcctccgggcaaccccagcctctgtgaccccagcccttccccagccctttcccagcccttccccagccctttcccgccgaagccggagctggagcaggagggctctggcctctgccttgttcccttgatgtggccatttcaacggcgctttcctcaaaacacgagctggccccaggccctcagcccctccttgactcccgcagacccccagctggctccccaacttctgccctgcccacggcaccacttgggggctcgccaggaggcctcggtcaccaggctgctgtcagtgtcactgccgggggctctgtgagtcccctgtcccagagctgagactcctcaggttcaggtgccgccccgggccccaggcaaccagctcaccacacccctgctctcggtggggctgcagctgcccacacgcaagtgttctggggctcgaggatgacgaagtcctgccaggctctctctgaggggcgtggtggggctgggggaagggcggcaccagtggcccctctgcctggctgagctggggaagtggtgacagcgattcctgtggccgcccacaatccctgtcagtgcaggaacatggtgagggcagaacagcccccttagagctcccccagcaccccaggatcccggcctccgggcctcaggcccgccttcccaagggccctgcctgggcacaacgcagccaggggtgagacgggataccccgacagagcagtgctcatccgggtggtgcgccgggcaggccccttgggcagccgcaggtgacagagcctcatggggcaggacatcccctgactcccctggccacagggtgggccacacccactcccactgttggggcagcagaggacgggctgcagcacaggcttccagaggcccgaccagcaccccagcttctctagggtaggggcctttctggaaccaccatgctctgcaggcagagcagtcccccgggttggggggcctgtggcccggggttagggcctgcgtcctgaggagcaggctttgcagcctaccctgggagcctgtccagctcagccctctgaggacaggccaggtcttttcttggggtgtcttctgggcctggcgcaggctccgacgggcacctggtaagtaagtggcacaggaggctgagcgaacgggaagcccatgcgtgctggtgagcacgtttatcagaaccacgtttgggagttgacagaggcttaggcatggtgcagagggtggcgtggtcggtgcaaggcagatacaggcttcagggcaaggcccagacggccgtcctgagcagccctggtgcctcacaagcacccccgcctgtgccgtggccaggtcagccgcgcctcccggggcaggctcaggacaggtgcgcacagatgcacaccacacacacctggggtgaaaaaccaggtaaaaatggaaagggacttggtatcattttaatgttgtataagttttgcttctaaaaatttaaatatttctctatgtacagatcctaaaacgccgggaaaactgcctggcagggccagcctcgaagcccctcctgtgggccccgggccagcagctttagcctttcctccccgggagcaggggcaggagggaggcaggggtggaggggacacagggcagccagggggacacagttttgggggcctggctgccctgtttcctgagcaaacaacacgcccacccctgccctgggcctccagagccgcccaggttcccaccactgacggtcagaggcggagcaggaccaggttttcagcagccgcggatgctggcccgagggctcccttggagggtgctggtgcatccacactgccctcgtggcccacggagcaggcgccctcgggggtgccccgctcctcttctgggggtccctgccggcccaggccctgcagtctctgctgccgctcctgggcctggcgggcccggctggcaatggcacgcacgcggctgtggctgcgggaggaggagcgccgcacaaaaccagggccccctgccaccccctccccagccgggcccaggctggtgggtgacgtgatgtctcctgcctgctggaagacagtgagccagcgcagctgctctgtcagggtgtcccgtctcacccctggccccgacacccgccgtgtccctcccgggaggcccaggctgtggctcagtctgcgggagccgccctcaaagctaggggcaaagtcatcagcagtgaggtcgcccaggctcttggacttggcagccacggggcagtcctgcacgcccaccagggaaaggcagccccagggaggccggaaggggaggccagccatccttggggccagggacctgggctgcagttcgtcaggtatgggaggccgctggcctgtagcccgaaggttggggttggatttgctcttggtcacaggtggcaggtctgggcgggcagccgaagccgagtggggcctggggggcaggcgtcccatgtgggctccagcgaggttctcacggctgcggcccaggcccaggctgggcagggagaggtcaatgacagtgtcgctggatgacatgctggaggaggaggaaacgctgtctcggtggccacatggctccagccgctgccacagcgggtcactgcccgtggcatcggagtacacggcaggagctggaaagggagcggccaggggccgccaccctcccaggggctccgtgggcacctgcccctcactcttcacccttctaatcacgggcaggtggcccagggtccggggctggctcctgccgtccgtctggctgccgggggccctctcgtatgccccgccggcgccctcgccgttgcacggccgaggcctgctgtctcggggctcctcagtgtcctctagggggcttgccacattggctccgggtcctgtggggtatgggggccgtccctgagaagagctggtggggacagccgctggtggcgggggaccagggcctggggcgggctcctcagcgatggtttccaggctgcacagtggggggagtggccgctgcgtggagagggggcgggtgtctgtggggaggtgggggagtgagagagagccagagggagaagcagaagagagagagggaggcagggagagaggcggagaggagtcggatcagggtggtgtccccggtgccctgtgccgagggtcgccaggcccagctcccaccccgaggcatcccccgggcgcggcacactcggtgtccccaccctgctgctgctggggcccagtccacgccctgtgccgcacacggggccctccttgggctgggacagcacgggacaccggggctgggccccgttacctgtcactcgccgctctcagttcctaactacggaggcagcgtgggtgggggcagaaaggaaagcttggtcaggggggtctggaggggcagggtggtgtggggcgggctccgtgtatgtccctccctccaggctaaggagacacccttctagtggggtgcttcagcccaaagcagcgaagccctggggcccagggaatctactccacgcagcactcagcaggctccaggcgtcccaggggcgcaggagacgcccagcagctgcactacctgcccacatcagacttcccagtagggacccctggagcctgccctagagggaggtgggaatgggatggtacgtggcccccagtcccaggaaaggcatcaggggccatgcaggtcgccagccgcccaggaggtgagtttggggaagcgcccagccggaggggcccagcatgtcaggccacagtcccggccccagaccctcagcaagagcagctggttcttcccagcctgtcgggcctcaaaccagctccacccaagtcccagggcctcaagctcagacaggagggctggggctatgggccacaggcaagccaagggagcagagtgccacggagacagtgccacggatacagagccacgagcacgagcacacgaggcgacaccgtccacgcagaagcagcagcaggtgacccaggcccagccatgccaggggcgtgcgggaggaccacgcagggcaagaggggcttaccggcggagaacatgggggatttactcctgatctcctccagcttttgagcaaacaaggcactcatctctccctgcagggcccccggttgcctgcaggcaccctcaggccagcggggggacctttcggggatgcccgggctgtctgggctgctggagtccgaggacatggagccgctaccgcctggaccctgcctccaggccccaggacccttgggggcctctctgcttctccccgggatagcgtgagggtccaggccacagcagggggcccccagtgagtcagcccgggcccggggctgctggcgaatggctgcctgcctgcttgcaggccccgggctgggtggccgctccctctgcaggcccccggtgttcacgccggcgcag

SEQ ID NO: 97804 - DNA, 289683 bp, Homo sapiens
  misc_feature (1)...(289683): n = A,T,C or G
tcactgcaacctctgcctcctgggttcaagcgattctcctgccccagcctcccgagtagctgggattacaggtgtgtgccaccacacctggctaatttttgtatttttagtagagatggggtttcaccatgttggtcaggctgatctcgaactcctgacctcgtgatccgcccgcctcagcttcccaaagtgctgggattacaggcgtgagccaccgcacccggcccacatccactttactttttaaagaggtttttttttttttttttttttttagataagagtctcactctgtcaccaagactggagtgtagtggcatgatcttggctcactgcaactagcaggctcaagttatcctgccacctcagcctctgagtagctgggactacaggcatgcaccaccatgcctggctaattttttgtattttttgctggagatggggtttcgccatgttgcccaggctggtctcaaacttctgagctcaaacaatccgcttgtctcagcctcccaaagtgctgggattactggcgtgagacactgctcccagccttaaagaggttttacaccctactgtgttttctcaatgcttgtcccttctctctatccccaaaatgtgtggattataaacttgtcttatttatggtcttcattaagttttcttggaaaacacaccttttagaatgaaactacttttaatctgcagctttatttccagttaagaatccaaaccaaatatttacattctaataacaattatttgaaatgttattgtgtcaatcatgagattcaatggaagtatctgataataaatgaatttaggtcaaggtaagaaataaatagcaaaaacacaaattcactctacagcaaatgagacctattcttccattctattcattgtagcactgcccgaaatgtacagatcagtaggaaaataaagcctatgcagtaggtgctatatgaaacagtttgcatacacttgacaaaagtgcacatttcagttaaattatatagtgaaattatacaattcctccctcccacacagtaacataacagcaaaacaatgacaaaagttcaaaattaatagagaaacatcaagtagaggccaccaataagatcttaaaatgtggaatattttactaacaactatgtaagtcaaatcttggactcctgcctgaatagatgtaagatgatcattttgatgtacttgaatgagtagtatgtatatgtaaatgttttgaggtcctgatagccgcaaaactgacaataaaggcacaaccagctaaaagtgcccaaaataataatcaagaaaacacctgagccacgtgttctaaaaagttaataatgcaaatgatcagatgatttagataaggttagtagtgaaagaatgtgtaggttttaactgaatatcacttatattggtaatcttccatcttggagtatcagcacatatagaaggcaattttccaaacattttatagttatatgtggcaaagacgggtttcaaattcaatgcctagaacagttgcagcacctagaagtacccagtaaatattaattgagtaatgaataagaaatggagggatggattccttaaaagtggtttactatatccatcatactaactccggcaaatgcattttcctaggaaaagaacagtcaagcatatcacaactaagattataatggttcagtaagtataaaagggagtgggaattcaatgtggatacagaaaagagagaaagtcctaagaaagtccttaggacacaggaaggccgaagcccattcttggcccatcactgggaagctagttcagtggggtttagatcatttgaagcatcatgttttcatccttgatagctctgtgagaatcaaactctaatttgagcatttacagaggtggtaacttttggaatttagtgtgataaagaggtgattactaagatggtggcctttgagaaatcattgattcctcccttcagtttccttattagtaaatagagacacctaccttacaggtatttccattaaagagggacattatgcatataaaatgaaataatgcactaaaagaaagtttgcacttttaaaagagagaacttttagacctaaaggcgatttactctgttttcttgcctgagagggtcaccacccaggcataatcataaatgcatggagtcttcctacaaggggcttgagtaatatatttgatttgacttattataaagtggagagggcaaggcagtagaaaaattaggaaacatctggaatactctaggatggcgaaggcctaaataaggcaatatcagcagaatagagagataaggctaaatttgagaactaatttgattgggctgcagttcatgtacaaatatcacaaggtagggtttatgaagctcagaaagcaggaatgagcaatctttcttcccttaattgatctcccagatcactgggtcacttgtgctgggctaactgatgagacgccattagtctacaaggtggaagtttgctcctggcaagtgcattcatttttttttctctctctctctcttttttttttttttttttgagatggagtctcgctttgtcatccagtgcagaagcgcgatcttcgctcactgagattgctccacctccccagcctcctgagtagctgggattacaggcatgagccaccttgctcggcccaattctgctttctctgagtctttttgccaagaagtagatgagtcggttaaaactggaatgaggctggactgtggcacgcacccgtagtcccagatactcagaaggttgagatgagaggatctcttgcacccaggagtttgagaccagcctgagcaacataaggaaaaacaaaaacttaaaaaaaaaaaaaaagttgatattgccaggtgtaagatgaacaggacaccatgcttcttccaagggcaggctgtgctgtgaaatgtcaacaacagtccccttttttgagtgactacttctttctaactcattggaaaatcttgcttcctatgctcatagactatcagaaaatttgatttttgaaattatgtcagtaaaaatgaaacctcccataattgcttgtaggatctaactcactttgacaacagagacatggccccgatttacaactcaagtacagagcttcagataaggagtttcccaagacagcattccacatttatccaaggaaacagaacccttggtcacagcccaaacctcatgttgactcccagctctgctttgctttgagcctatcaaaactccacttcatggttcctctagtttgcagtatctctactgtaacattgagtcaatgaacctgactttgtgggactgcaggttttgtccttgatggtcttaggctggttggattggacacactattctattccgtgttaatgccattcttttcattattatagcttaattacatgtttcttttttcattgccttatcaaaaggttctcagggctggaggcagtggctcacaccagtaatcccagcactttgggaggctgaggtgggtggatcacaaggtcaggagatcgagaccatcctgcccaacatggtgaaaccctgtctctactaaaaatacaaaaattagctgggcatggtggcggtgcctgtagtctcagctactcgggaggctgagacaggagaatcacttgaacctgggaggcggaggttgcagtgagccgagatcgtgttactgcactccagactggcaacagagtgagactgactccgtctcaaagaaaaaaaaaaaaaaaagttctcaattttttttgtcttagaaccttcctttatttacactcttaaaaagttttgaggactccaaagaacttttatgttatagcaattaaaactgagaaattttaaaaatatatttcactactaagctcattacatgttaacatgaatagcatatttttaagtgaaaaatacctgtattttccaaaaccaaaaaagtttaatggtaagaatggcattattttatattcttgcacatttctttaatgtctggcataacagaagacgttacctgtttctgcattcaatctgttgtgatatcacatattatggagccactggaaaacttcatcataaattcatttaaaaaatgggagagaaaaaggagtggaaaaaagtcttattattaaagtaattttggtcctgtgaacctcccgaaatggtttcagagaccgccccctgacccccaacaaatttcccctagaccacactctgagaaccactggacttagctcttctagcttctgtagttttcatatgaattctagaatatatttgtctcttaatttgggaggtagtaattatgtgtttaacatcttgtcttctaacttaggattccagtgtctttccaattataaatagtctgtcaacaatcctgcatttttaaaatttttcccacttttctcctatatttctcattttttatcattcttagttatttcatgttctttcatgcttctattgtgaatgggatctatttttctattgtattttaattgggtgttgtttgtctctattgagattgtgactttattttgcatgtgagcactcagttgctctaattcttaaaatctcccaggtatgtccaaatggccataattatgttgaataatatatttgctgtgatctgtttttgatgagacaacttcttgatttgaagctgttcatatatgttaggctattgattcaatataatccctattacaagtccactattcaatttctaattttttttttttttttttcgagacggagtctcgctctatcgcccaggctggagtgcagtgacgtgatctcggctccgtcactgcaagctctgccttctgggttcacgccattcacctgcctcagcctcccaagtagctgggactacaggggcctgccaccatgcccggctaatttttttgtattttttagtagagacggggtttcactgtgttagccaggatggtctcgatctcctgaccttgtgatccggccgcctcggcctcccaaagtgctgggattacaggcgtgagccaccgcgcccggcccaatttctaaattttaaagctactttaagaggaagggtcttgaatatactgaatgaccttttgaaacagatttttaacatcacattttttccttaagatatgcattgattaggattagatgacctctctttggtctcttctataattctcatttagataacatgaacgacagacccattgagataattaacagaatcaaaggatgttttggttgtagttctcacctgttcaatggatgaaggtatagcaatacccaatatgtccctagagactgttcaagagaatctggccatcagggtccccccaggtgagccctgtgtgacaggagaccacagaaggtctggaaaggattgcaaaggaccaagtagagggttggtgactaacgggctgcctcccgagggtagaagttcttgcctttaacttcagccccagccccaaactccttagcagtctgcaaaagggaactggaccctgggagcgatctcattagccactcactatccctcttggacctgaaacccattacattttccgggtccgagaccctcgtagtgtggggaatttcctgggaggaagatactacgcggggccgggagcagaatttgctccaggcactgggccagtccatgagggctccaggatccaggggccccactcccttctcgccgggctccgggccaaggaagcgcggccggagtcccgggaagcccctcggcagccagccaagggccctgcgaggatgtggatggcgcggatggcgcggcctccacctgcgggcagtggagagagcggcgagaggaagaatattccccgcgagccgggataaggggccccttcggctcggttgacccaggtcagatcctcccgccgaccttcggcccgccctctacaggcggcccagttcttcccctgctcggctgcccctgcccgcccctcgagggagcgcccgtagccagcgcccccgtaaagaaataaggaggcgcccggcttcccgcccaggtacgtgtcgggacagcgcaggggactggcttggggcggcggtgggtagcggcgcccgcgcggcgctggaaacggccccgcttccttggaccccggggcttgcagggcgggcccggggctctctgagcgcgaggctgccgcgaccgcccgcccgcccaggtcagatccggaggacctgtgtgtttgtcggggcctggggtgagagaggggactcgaggggagaagtagagcgggaaaccaagagggggaatgtgaggcttgaacgagctggatgggagagctcgaggggaggagagggatgaacttgagggggaaacgggggcgggggtgaactcgagggggagccaggaggagggaacgggaagggtgaacctgaggggtggacttgagggaagatcttgtgggtgaacccgaggagggaacgcgaggggatagtgaggggggatctcgaggagggaacgtgaggaatgaacttgaggagggaacgggaggggtgaacgtgaagtggaaacaggaggagggaacgggaagggtggcgtaaggggtgaaggaagatctttaggggtgaacttgggaaagaaacgtaaggggaggacctcgaagagtaacgaggggcgagaactgagggggccctgcagggagactggagggaggaggcgccgagtctggcgggtgtcgcctcggagacctgtggcgcgcgcgggctttgcggcgccgcccacaggtggcgctgggtcggcccgtccctgagggaactgcgttccgggtgatttctcagaacaagcaggtcggtggagctgggctccctgcaaccccaaatgcatccgtaaaggagttttmattttaaggagaaagagcagacaagaaaagtatgatcattattgagaaatagagaaacctaccaggaaaggatgtcctttcaagtctgctcaccaacagctctgttctgttctccaagtagttgctaactcgcaccttgctactatcccccttccagaaaaaaaattttattattgttagaatggaaattggccataagccttgaaatgactgttgtaatgccactgaaccctacacactaagcgtttttgaaaactcaaaagaatcttcatttctggttgtttctagttttcttggtgaattaactaattgtacaggtgcacttaaaccttcttaagcatttttataattcagacggatctsgtagcttgagagttgtttaatgccagcatatgaaatgaggggctttaagttccttgttcattgtgtaaaagtgcgaaaacttagttactgaggaataaactatttgtcttgcccttctacctagaagtttctaagttcaacttctgattattttccccagatcctgaatgtttactcccataaagccatgatctttttgttttgggttacaggcccagggccccagtgcagcctggacacagtattcaaagttttggcgtctgagcattgttatgcgttattttcaagctttgctaacggtaggtgataaaattgacaagtgttctgggtttgccagaacctaagtgccaagttttgacagataaattgggtgcatgttattcgtgccatattgatttttattacattataaaagataattattttaaaatgggaaaatttacagatgcataagctttcaaagataacatgggctttatgaatatattgatgagatgtctagcatgtgaaaaattacattcatttgtcttagtcctttaaaattattatttggggacgaaaatgcaaactaaaagattcaattttgtaatctttaatatcaacttaatatatatgtgtatatatacatatattaaaatttggtcatgtcacataatttgatagcatcatcttgtcctttttcgactgcatctttatagcctaattttttttttgcatatattctttgaaaaataactttctctgtcaaatccaaaatatttgaaggtccattatttgctacaagtggttttgataaataaatatttggaggctgaaataccctttagaatgtatagttcttttatataaatcatataaagtttgtaaaatgtttattatgtaaataatttttgcagtgttatttccagctgcgttttctttttctttttataaacaaggatcctttcattagttttgtccgggaattgataatttgaatgattgtacctaacaaacaaactccctccccctagtaataggaaacaaattcagttattcattagagggtaaatagaagatttctgataagctttcaaattgatacacagacgatcccttactactttggcgacacattgggagttaggaacctcaagttgggaagcattactcttttgaactaaaatcatctatcattggacacgtaatttctaccatgaacttaaacattatgaccttaaaaactttctaatcttcagttttcttttatgaaaatatgggttacagtaatgcttttctaaagggcttctcctgataattaagtgacatactgcatgtaaaactttaagcacagtaggtacctggaatatggtaagcagttaaaaaaaatagccactgttaatatccatttttcctgatatctgagggtgattagacaatgtcgatatgtttatagttatagatcatgtcttgataaaaaatgcagaacctcatatagaagtcgtatgcgatagtttcaagcctgaaattggcctttagaaatgtttctttgggtcagctcagtactttaaaataattgatttacttaccrgtattttcaaattagtaaattttgtgtaagttcctggagtcctggcttctcctgaaaaaaatggaggaccaggcaagacagctcttgcaactgctcatggcagaagccaggatgagttgcccactttgggtggggtatacattctccactttgccacattgctgccatcctctgcctttmtttcatcaagtcctgcttcactcatatattttacctccctcactcctgcagacatttgagtytgtgatttcagactctggaaatatcccttactaacttgaacggttaattatrtggctcacacaatagcttaactgtcatcctttgaaaaggagaataatcctgtattgcaatttacgaaacagttcctcataaaactcaggtgatgcttatatcaactctgagaatttgttcagacatgcattattatcccattttacagctgtggacattgacttttaggtttatactaaaacttaaagtaatgatctggtgacttaaagttttttggaggctcactaacaccaccttttaaagatggagattttttttaaaggaaattatagyctttcttttggttctagcatttattttaagaagtacttttatcctcataaagggagaaaatgaatggtggagaacggaatacaaatacaaaagtatttaagtagattttgtatttcctctttgcaaaacatttttaagcaaattgaagggaataaaacattggttatggctcattcaaaacagagcatacatgtaactggacaaggtctgttttaaactatactgttattggaaagctggaaagaatgtgtgtccagttcatgtggtctgtaattaagctagaccagatttctgtgaccagttaagctagacccattcctstgttttaatgttctgtaagaaaggagacacccgaaacttgtttggcgattcagactagtgttttacagggcaaatttaattttttgtaggtttctttgaaccaggagggctttgttttattattttcatagtcattccaggagaataatctatagaataaattaaaatcaggcatattgcatttacgggtgtagtaactgtgtatggtcctgctgatatgtgactgtgtatgagagacgttcaaaccagtctgatagaggcttggggaaagcatctaggcaaagacaacaggtcctggggcagaaaagggtttaacaatgttgtaagtcccgtcggaaggcaattgaggctgaagtcactgagagtggtgagaacacaggaaagtcagaaatggccagatcattcagggtctggagaacttggtaaagaatgtggattttgtggggtttttagcaggaaaataagatgatctgatttctatgctgagatcatcctggctactctgtggagagagacaaaattctatagctgaccagctgaaactccagtgtgtttcttccatcataggcagcaacttcttttgaatctgatgtaatccttatgtgatgcagtgtaagcagcttgacagaagtgggtccataaagggaaggatctgtgaatagtattctacagaatatacatgatgaatgtgtataaaagtgagactcatgatattaaaatattgcttggttttgagtaaagccatctgctgtcttcttagcatgttctatatcaatgaggcaatttatattttcattaaaaagtcctgytttctgcatgtattttggaaagttaatgattaaatttattgatatttgcattatattagaaaagaaaacatgcccgtgttcacttatgaagcagttattactaaggtgggtttctagcctctttcaccaatagatttggtcattacatatgaagtattatgagatacagaacttggagagaatgatttttttgtttaacttatgtactctccttagaggttatatgagtaaagaattaagtgtttggagttaaaatatgaaggcacatgaatgcagtcatttcaagaaaaatagcttttttctttctatttttccttctgtaatatttctaggaaattgtccatctaatctggttttagatttattaatataaaattatctttttagtctctgctctaatttgttagtcttttcatccttaatgttgcacatctctaccttctttcttgctagttttttcttgatcaatcttgacaaggatctccctatttaaaaaaaattatctttaaagaactattacatttatgaatcccctaatctttttttcctgtaatgtttttctttaatttatacccttctctttttctactgtcattggttttatataattttagcttttcttcctttctaatgtaaaatttgaggctatatattttcctctgtgcactactttagttgctggtcatacattttgttgagtaaatttttcattattattcagttctaagtctattttaaaatgttcattatgtttactctttgacttttaaattgtttagtgcctttttaaggtatgcaattgtatagttgtttttttttaacaatgtagcttgcagtagttaatttcttacttaattgcattgcaatcatacgtgctcagagagtgtatctattcttttttgtatgtaggatttcatatgtattctggcatatccattaaattctccttgttaattatgttgttcaaattttatttatccttacaaacatttttttgtttagttaatcaaaaaattactgagaaggtatgttaaaatctcccattaaaattgtgaatttatttctttatttctttcagccttatttgacatgttttggggttctgttttgagtttttgtattttcttgatgaattaagtttttgattactatgtagtggccatcatgcctctaataaatatttttgctttaaaatatattttgcctgatattgagctagccacatcactttcttttattgaggattacatggtaccattattgtacttccattcttttctctctgtttaggttttaggtggatgtctttcaaacagcctgtagttaccaatttctgtcttttcactggtgagtgtagtccagttataattattgtggttactggtatattataatgatttccacttgttatttyatgctgtctatttctactgctttttctatgtttcctttattctcctttcttgaattttttaattgaatgacttttgtaaagtcaggttttttttttctgctaatattttggagactatacatggtaatctgagattctgctgttacaagtatttgacatgtatatttttcttttaaagtctaaagttatttctaactgcttcctgaactatatgaggaacgtagaacattttaaatcctatcacatttccacttttgattattactgttcaatcttgtccaacagagcccattattgtatcctacaattatataacatacagtttctttgctgtttttggtaatttagacctttcttgcgggatcattgtcattcttgaaacatatcctttagaagtgctctttctcaggggtcagtggtgttaaactttttttctgaaaaataccttcattttgcctttcatcttgaaagatacttttatgggtacttttgttaatttcagattaacaattattttctttcagtgttttgaatatattatgctactgtcttcttttgaaaaaccagcaatcattccaattattttcctctgtatgtaataactcttttctatctggttgactttaagaacttcttactgtctttgatgatgctgtatagtttcattgtggtatatataagtgtggatttctttttatttatcttatttgaattttcctgaattggagtgttctacctttcaactattttggaaacttctcagtcattattgattgccttttctccattctcttattttcttctcaaattctgattagatttgtattaggctgaatcagtcaagaaaacagttaatgccatatagttcaacagaaggaatttaatatggagaattagtgacaaatgtttgtcatatctgaaagccaaataggggatagtgaggcaatttaaaagttaacagtagcaaaagactgttgtcacttctcaggctgcaggaggtagtcttagcagaacccagaatccgaggctatctagaaccctgacagtttctgtcctacagggacagggaccatagagagccacagcaactgatggagacatcaccatagaaagcaaagaaagcagaggaaaaatattttgatttctcctttctctctacttgggactcactggcagaatttctcagggcaggaagccagctggacaaggagtgtaggaaatacggttttgagatgtcggtccccgagattcaggagatggatgatcatgcatggatctgagagcatcctggtcatcccattctcctctccctatcttttaacttgtttttcacatttttctattattttgaccccctgtattacattctgggtaattatattgctgtggtaaaacataaattacataaaatttaccctttaaactatttttaaatgtgcagttgagtggtattaagtacagtcacattgttgcccaacctttaacaccatccatctccagaaattttttattttcccaaactgaaactctggattcaacaaaattcctgttctctcttaccccagctgctagcaaccacaattctactttttgtctttgaatttgactattttaaacatctcatatgagtggaatcatataatgtttccctttgcgactggcttatttttctcaacataacgtcttctcggctcatccctctcatacatgttgtagtatgtgtcaagtttcctttctttttaaggctgaataatatttcttttcttttcttttctttcttactttcttttttcttttttttttttttagatggagtctctctctgtcgcacaggctgtaatgcagtggcatgagttcagatcactgcaatctctgcctcctgggttcaagtgatgcctctgcctcagcctcccaagtacctgggactacaggcatatgccatcacacctggctgatttttatatttttgttagagatggggtttcgccatgttggccaggccggtcttgaactcccgacctcaagtgatctgcctgcctcagcctccaaaagtgctgggattacaggcatgaaccaccgcgtccagccaattaataatctgtaggtgtatacagcattttgttatccatctgtcagtggacatgtaggttgtttctgtctttggctattgtgaataatactgccattaatgtgggtgtacaaatatctctttgagcctttgattgaattctttggcttatattcaagagatgaaatttttatcctatggtaagtctatatttacttttgtgaagaactgctgtactattttcctcagcagctgcaatatattcctgctagcaatgcgcaagagttccaatttctctacaacattaacaacactgaaatcgctttctgggtttcttctttctaaataataacttctaatgagcatgaagtggtattgcattgtgactttttgatttgcattttcctaattattaggatgttgtacatcatttcatatgctcattgaccatttgtatatattatttggagaaacttctagtcaaatcctttgctcattttttaattgggtttttttttttagttgtagagttatttatatattctgtatgttaaccctttatcagatatatgatttgcaagtgttttttctcattgtgaagattgtcttttcactctgttgttaatgttttgtacattccttgatatccaaaagttttggttcttaccaagtccaatttatgtattttttctcttctgcttgtgcttttggtgtcatatccgagaaatcattgccaaatccattttcatgaagcttttcccttatgttttcttctaagtgttttattattttagctcatatgtttaagtctttgatctattttgagttaatttttatatatgatctaacagtaatgttcttttgcatgtggatatccagtttttccaccaccacttgttaacaagactgttttttccctattgttggaaatcatttgactatatttctgggctatttcactctatttgtctatgtgtaccagtaccacaatgatttgattactgtagcattgtagtaagttttgaaatcaggaagtataaaacctccaactttgttcttctttacaagattactggagatcctttgagattccatatgagttttaggatgtatttatttctatttctgcaaaaaacattgggattttgctaacaattgcattgaatttatagatcactttgggaaatattgacatttaaccaatattaaatcttctaatccatgaacacagatatctttccatttatttgtgtgttctttaatttctttcagcaatgtttgtacttttcaatacacaagtctttcatctccttggttaagtttatttctaagtattttattctttttgattctattgtagattaaattgttttcctaatttcttcttctggttgttcattgttagtgtacagaaaaacaacagatttttgcatgttgattttgtatcctgcagctttgctgaattcattaattagttctaacatttgtgtgtgtgtgtgtgtgtgtgtgtgtgtgtgtgtgtgtgtgtgtgtgattctttaggatttggtacatataagatcaaatagtctgtgaacagagataatttcaattctttctttccagtctgaatgcttttatttatgtttcttgcctgattgctctgactgggatttccagtactatgttgaatagaaatggtaaaagtggacatttttgtcttgttcctgatcttaggaaagaagcttttagtcttgcaccattgaatataatgttagctacaggctttttataaatggttattatgtcaaggtcgtttttttctattcttagtttgttgagtgtttttattttgaaagggtgttgaattttgtcaaatgcttttgctgcatcaacttaaatgatcatgtgttttttcccctttcttctgttaatatggcatattacattgattgattttcatatgttgaatcatttttgtattccagaaataaatcaccattggtcatggtgtatgatccttttaatatgctgttgaagttagtttgcctgtattttgttgaggatttttgcatgaatcttcacagagatattcatctccagttttattctcttgtagtgccattgtctggttttggtgtcaggataatgctggcctcatagtatgagttaggaagtgtgccctctttttaatatttttggaagagtttgagaaggattgtcgttaattattctttaaatgtttggtagaattcaccagtgaagtgatctggtcctgagattttgttgttattgtggtagagaagtttttgattactaattcaatctcttttgtaagtgatacctcttcagattttctacttcatcatgattcagtcttggtgaattgtgtgtttctaggaatttgtccacttcatctagtttatccaatttgttggcatacaaatgttaacagtactctcttataatcatttttaattctctgtaattggtaataattttccctctttgatttcttgctttagttatttatgtcctctctcctagtaaatctgcttaaaggttttaaaggtttcgaagaatcaactcatggttttgttgattttctctacatttttattctctattttatttatctctgctgcatcttcattatttcctactttttttgtcacctttaggttcagtttgctcctcttattcttgttccttaaagtgtaaagttacgtcattgatttcatatttttcttcctttttaaatttaagcttttagagcaacaaatttatctcttagcagtacttttgctggattctgtaagttttgctatgttgtatttttattttcatttgattcaagatattttcagttttctcttgtaatttcttctattggttgtttaatagtgtactgcttaatttctacatatttgtggattttccagtcttctagtttcattacattttgatcataaaggatatttagcatagcatgttttcagtccctttaaattcattaaggcttgtaatgcagtcaaacacatagtctatcctgaagaatattcctgtgcacttgagaaaaatgtgtattctgtcactgttgggtgcagcattctgtatatgtctgttagatccaattggtctatagtgttgatcgtgtcctttatttctgattttctgtctcattgttctatccattactgtggatattgaaatctactattattgtagagctgtctgttttcccctttagttctgtcagtgtttgttcatatattttggagctctaaattttggtacatatatgtgtataattgttatgtctacttggcaaattgaccattttatcattttcccattttcttctttgtctcttgtaaaagtttatgrcttgaagtcttttgtagatagtatatagttgcatcagatgtgttcctttataaaattcattctgccaatctgttttttgattggagagtttaatccatttacatttaaaagaccaatagagaagaacttaccattatcattttttggttgtttttcgatgttataacgtttttgttactcatttcctctaatactatctcccttgtatttagtgtatattttgtaatgacatgttttgattcttattttctttgtggttaccatggggattatacataacatcctgaaattatagcaacttattttaaactgataccaacttaacttgattgcttataaaaattctactgctttacagccctgcccccacactttatgttattgatgtcacaaattacgttttatatattgtatccccacttaacatagatttataagtatttttatgtatttgtgtttgaaattcaagataaaaaaagtggcattaactaaaattacaatactactgggtttgataattttccatgtaattacttttactggagaactttacattttcatgagacttcaagatattgtctagcatccattcatttcaacctaaagggcttcatttagcatttcttgtagggcagatggagtggtaatgaactccatccatttttgtttatctgggaacaaaaattaattttttttctcatttttgaaggatagttttccagatatagaattctcagttgacaggtttttatctttcagcactttaaatatattatccctctgccttctagcttgcaagatttctgctgggaaattcactgataatcttgagagtcccttgtatgtgataaattgcttttctcttgctgcttttaagtttccctttttttttttttgtctttgtcttttcacagcttgattataatgtcttggcatgggtttctttagatttgccttgcaggccagttgtggtggctcacaccggtaatcccagcactgtgggaggccgaggcgggtggatcacgaggtcaggagatcaagaccatcctggctaacacggtgaaaccccatctctactaaaaatacaaaaaattagccgggcatggtagcgggcacctgtaatcccgctacacgggaggctgaggcaggagaatggcgtgaacctgggaggtggagcttgcagtgagccaagatcacacgactgcactctggcctgggtgacagagtgagactccgtctcaaaaaaaaaaaaaaaaaaaaaaaaaaaaaagatttgccttgcaattcagtgagcctcttggatttctagatgcatgtctttccttaaatttgtgaggtttttggccattatttcttcaaataagctctcttcccctttctgtttctcttttctatcttgaactctcataatgtatatattggtcttgttggtggcgttctatatatcccttaggctctgtttatattccttcgttcttttttctttttgcccttcagatgataattacaagaaatttgtcttcaagttcactgacattttcttctgcctattcaagtctgctcttgaactcctttagtaagattttcaattcagttattttattttttatatccagaatttccatttggttctgtttaataaatttatctgattttgtacagtctgtcttattatagatactttcacatgttccgtctatctctattctctgaaaaaaaatgcataagatggtattatttcttttctttttctttttttttttttttttttttgagacagagttttgctcttgatacccaggctggagtgcaatggcatgaccttggctcactgcaacctccgcctcccgggttcaagcgattctcctgcctcagcctgctgagtagctgggattacagggatgcaccaccatgcccggctaattttgtatttttagtagagacagggtttctccatgttggtcaggctggtctcgaactcccgacctcaggtgatccacccacctctacctcccaaagtgttgggattacaggcgtgagccactgcgcctggcaaagatggtattatttctttggaaaatatttgataaaatgggttgttgaaatcatttgaaatttttctatggactcttttatattcatttctatttaatattcaccaaatatttatggactatctactatgtgtcaggcatggttttaaagtctttgaagtacatcagtgaaaaaacaggacaaacatttcaggcctcaaggggcttacattctggtagtggagaaaacaaaacataattacaggaaattatgtagagtgttaggaagtgataagtgttatcaaaatagagcagggtaagtgagacaaggagttgggaggcaagatgggatgcaggaagtaagactgggattgtaagtaagatgatcagggtgggacttattggggaggtgatggctgatgtaagacttgaaggaagtgagggtgtgaaccatgtcaatatctggagaaagagcattctaggcagagggaacacagataacccaatgggaaaccagccctgctatgttttagaatgagcatgaagccagtttggttattttattaaagaagaattaggtgcatgtttacaaaaacaagcagaataattgttgagatgaatctgaagatcctgaagatacgtttttcattgtattatgatcaacttttctatcttaaaaaaatccaaaagctcaatatataataaatctattcaaaaagatgagtattcatttcaaaaatgtagctttgctagtaccttttcagaattatggtaaatgcayatatcaaattatgttaaatatatatgttgaaaataattatttggcttacatgatcatataactaagaacttatttatatgttttaattttataggctagagaattacttttcattctttgcatgctaaagtattagggaaaatatatgaacattcatttttatgtcaaatgcaatttaccatagttattaagtaattagttgtttactagctgtgacattctatttcattcttaaagaataaacagctttgtatggaaaaagtgtagtttagcagtcaagagacttgattctagcctaattcttgaaattatttaatgtattattttgaagcagtcattttaaatggcttcattttacctatgtgttgggagttttgttcatttgctttatatggaacatgactaggtgtattctgtttccaaaatgcctcttttttgtcattttgtgacttttttaaataatgttttacactatattgatacactgctttaaatatttgtctgattgagaactgttaaagaaaaaattgcattttaaacaaattcctgcttatttttagtgtcagctcaaatcttttcctgaccacttcagaattttttctgaatcttttcctggtcagttcagaataaactgcttttcacctgggctattacagcactttatgcatattcttattatttatcactttttataatatgttatagttacatgtttattaatctatccatgagttttctatctttgtatttccaaaactcataaaaatactttgcacatatttgttgttcagtcaatttttcattgaattcttatgtctgtgtattgaaaaactaacagttaactcctgagagttaatatatcagaaatgaagactgtgttcartaacattactgcttgaaaggcagtattccatgtaatgaatgtttctgttggttgacaactcctatttcagacctttaacaagatttaatttggttttttggtctaacgtttatgttatagagatggcataaatgcttatttgcatgactcaagtagatgtaagaagtagtgattttgtcactgattatgaaattgttaaagaggatgattattactgattacctctttgcattttggatcaaagacatgaatttcataaggattaagtgttctaagaactattcagaagtgtgtttttatatagtaatayaatttttagcatgyattcatagccatttactcgataatgtgcccgtaagtataatgaatcagaatatgctctttattgtgttttggattttcaygttcttttcagttctccctaaaccttatttcgcttcctaacttaaaaaaagtatttttcgaagaaccctattcatttatttattcaacagctatatatttaacrtttaccgtattttctaggtacaragtaaggccaaatctattattagatttggaagtgaacaaaatagattaggtctctgctgtcagaattaacaatgaacaaataaacatttgcccatttagtcaatatttattgattgcctaccatgtactaggcattgttttsggaattgtggatacagtcataaaataacaaagcccataccctcatgtarcttacattctaatgaaagaataacaggataagtggagaargctaacttcataaaggttggtcagggagggcctttctaagaaattgacatttgaactgagatctacaggacaagaaggaaccaaaggaaaaggctatttgaggacaaacagcagttaccccggctagcaatgaacttactatgtttgatgcacattggtttgtagcttttgaggtcagaatattaaggatttattwttccttccatttttttcaataaattatgaagtacaggcatcacttgtaaaatttggtaggagaaggtaaacagcaaagagggaacaatttgtagagagacaaatttgaggaaagatatcactttgaaatagtaattccagagaacagggaatatacaaacaacagaagtgcagtagggttgctgggcagagttgagagtttacttgtcaatgtgttatcctgaattttaagtgaaactagtcaacatggttgtatggttttctcagttatgggcacagatgtgaagaagatgtagtatttaaccrgarttgttttcaccctccaggagaatatgatggaaaaagggaggaacaagagtgtttagggcctttgtaaagacgtcacaataatacaaggcttagagtctatcctgaggaaggagaaatgagtagggagtgaaaaattaagagggctgatgggcttaaagaaagttaaagatcagtggattggtgatgtgaataaaggtgaaagttgtgagtgtggccagacaagtgaatttcatgggctaatatggaatattaatttatattgaaaagagtgtggtttgtatagataattgaaataatgtgagggctaccagaagtgctaagaacactttcctttcttttattattctcacccttttttgtagttttatagaaatgatataatatagggagaatatagaaaagagcwttacttggaagaaaacataaaatgtcctttataaagtcacttgatctcactgacctattcttttaattaattgacaaatcaattaattatttcagcagtgtgccaggtattggacatacagtaatgatatcagatacataaatgctatctgatttataatcacaataacggtaccagtggtgatataggatagtgatattattgataatattgataatgatatcaataaatggtctcattggccatattctttaattaattaatcagtcaatcatttcagccctgtgcagttgctgcacatacagtaatgatgtcagataacagcagcgtagagtgctgctggagtaccgaggtggtgcatgcaacccagatggggtggagagtagtcacacttgtatgaagtggtctctaagctgaggtctgaaagattagtaggttttgcaatttagcaaagaagccacaggcagagggggtcaggaatagtgtatattaaagtcctcaagaaagaaatgccttgaggtataaatagctgaatcatagtatatgagagaagaggctggaacattaagcaaaggccatattttaaagaatttggtaggttatgttaaggaaattccatcctaaaagccatgttagaggacccattattgagttttgcatagagaagtgacataaaacgtgatcacttataaaatgcaagatctgcttaaatgaggaagttgaattttatcttctctaaggttcattctaaaattatttgatttgttgtgatacatgagtataaagaagaaaatcaaaattatataaatatgcctcttattttaatctaaaaagaattaacagcaattaataagagactagattggacatagaaataaagccctgcttacaaagcattattaaattcatattaatgtttgcaaatgagaattgaaattcaaatttcctgtgactctgaaatatgtttggttgctgttgaatattttctatcatatcagtgaaaatattcgctaatttcccatgggtttgtgtgtgccatttgatatcctcaatcaactgtagatgaaactgtacttcttatctccaggtwtttaaacctttgagatgtttccattaattggaaaaacaatcatctttgataactttcctgatccttctgatacatgggaaatcactgagacaattggcaaaggaacttatgggaaagtttttaaagtattgaataagaaaaatggccaaaaagcagcagtcaaaattcttgatccaattcacgtaagtcatattttttccttctaattagctttatttttatctgtatgaaacayttaaaaagactgtattttatcttgatttattcatcacaatagcagtctaaaacaggttacaatttgaagataaatgtaaaagagaagtctacttatttgcttttccaaatttctgtgcttagtatatgtaataaggcacaataagtacttgatgaataaatgcakaagcacgcaaaaatgcagctctcaaccgacgatattattaaagttgactgaatgttattttagacatgaaaaattgtaaagatacaaactcaggggtctagaagtaatcctgaaatggcatcttaaccatatcttcttttcgtcctgtgtttatttaggcttcaggaggtatttctcttaggccaaactaaagaagactttttaaaatgaaatttatttcagagaaagaaaattaattttcaggtttgcttaaatgtttccaaagcagacatggtgtggatttataatcagggcaaagttccttattgtgaagaattaaatttcatgttcagctctgctagtctgcttacaggaggccacaatgggggccccatttgcttttttttttttttttaagtagcagttgtgataagcgaaactgccaaaccttttctctgttgttaagagcatgagactactgagattctatcttctggtaatgagagctggcagtttcagaatatcttcaggttgctgggagacacctttctctcccatagcacatgggagagccagaatgagctcagtaatcagatgctccccaaacatctattgaaagcaactgctccaattaacagactcttgcacacatgatgggagcatggcatgatgaaaatgatgtaatgtgtatagagaggacatcagagtgctaggtccttgttacactcatctactaactgtgagatgctgcaaaaggtctctgagtctccatttgttcgtcttagggttgctgtttctttttttatttttattttttgatagtttatttctgctaaacccattataactacactcttccatattattttgagcagaggagaaaggtaggggaggtttattttaaagcaataaattaaataaatacactggaggaaaaaaaatgagactcagtatgcccaggcttaactgttgctgaatgtcttcacattctcttggaaacttctaagcatttaaactgaaggaacagaggtacaagttaagttctaccaaagtgactatacctctctttcctgtagcctttgcattagggattcaggtgtgtggcagcaagagaaagaaattcagcccaatcccattgtctggccccatagtgtatctctttctcttccttcttaatggagaacaaatggcttataatccatgtaacgactattctttcataatttactcacatatggtatacctacaagccttataagtcccccctatttagtataatttaatgaaatattgatttcatgactattaagcttaatttatccttttgctttcattcttgtcacagtacatatacatttttctaagaattatttatttactcttcatcatgtcacaagtcaaataaaaaagatttataaccaagagattataatcttaaataaatttaaatgcatccaaacatcttgcaaagatttgcttattttaaattaaaggagtcttactcttacatatttttaatcagtcattttcttttcaagagaggagttgaatgagtaagatgagaaggtagcaggctcggagtctatatctggattttacagtaaccagctctgacttcaacttctcagggcttaactttatgcctttaaaattagagctcagatttaaatttctacctctatgattccatgattctataataaaacaacataggcattaaatgtcactgtaaaagcagtattaataaggctttctcttatttattgctgtatgaattgtttcatatatatgcgattttctagaaatatgtctaagtggctgtctttcattctgattgataagatagcaacctgttcttcttttggtgaatggacctttagatcactaaaggttttgtgcaatcttttataacttaactctatttgagttttttggaaaagtgggaatttattgtttgtatgactgatttttggatagcttctaaatatcctattttccaaagaaacaaaatgaaccagatttccagtcctaaaatttattatttcaggtcaatggctttgcccttgtaacaaagttaataatacaaaaaagcaaaatcatctggagtagctctccatagatgtttacttataattgcaaataaaaataacattttatttrtccattttaaaatttgatgaaattaatataacttgakattcacttgattagcatgaaaatcacaatctctccccttaaattatgtaatgagaaattacaatacataatactaagcacagtaaaaactattatgaccttgacatmatgaaattctgtatttggtattctataatctgtttctttgacattactcatggttttctcacagttctattcttatgactttttgaaactaggatattgacgaagagattgaagcagaatataacatcttaaaagcactttctgaccaccctaatgtggtcagattctatgggatatactttaagaaggataaagtaaatggagacaagctgtggttggttcttgaggtaagtgtgtcagcatcatttgtatgggtggaaacttagagtgtggttctgaaatgacttgttatactatttatgtaacattgatatcataaaaacagttctgataagttcctgaccagccatgaatgttgtgcctagttttggccttgccwtcttaakaaacatcaaaaaattgaaggaaagccacaaagactagtaaatattaaaargaaatgactccacaataaaagaccaaataaactgagattatttttcccacagaaaaattaaaagggatttcattatatttatttattcatctgtattttgtttcattaacatgtgataagcctctgtgccaggtgctaggatataagaaaaaattaatgttaagttgaggcttcattagacaaaaatagtgagctatgattttctttttctgtctttattgaatgctaatgacttgagctacagaaccagatatttatatttacagggaagaaaacttacttaaaatggtgtcgatactgagtaagttgctaaaggaaagctgtagtgtctgccctttccaatcctgagagtagtttttcttacacttaagcaatcctctctaaggcaggagtactagcagctcctgcactaaggtgactgtcagtcccagaataattccatttttctgattttcattgaacattattcaagtgtggtaaacattatttctaataaaatctattagaattttttaaattgcttttatcaaattcagagacagtagatacctttatttgacagctataacagcatatatttattgtgttcatcattgttttattagcatttgagtattttatttctttttgaatgtttcattgcttttcctgaagtggcattgtcttagtctgtttgtgctgctataacaaaaatccacacactaggtaattcatacagaatagaaacttattcctcacagttttggaggctggaagtccaagatccaggaaccagcaggttcacttgtctggtgaggcctgttcacttccaagatggcaccttgttgctacatgctctggagagaagaaacgctgtgttctcacatggcagaaggcagaaggcaagagagcccaacactgtgtggagcgtctttttaataaggatcttaaaaccgcattcatgaggaagatgccttcatggcctaattacctcttaaaggtcccacctcttaacaatatcactttcaccattaagtttcaacacatgaattttggaggggacacagccaaagtgtaataggcacaataatcatatataaattatattaagactttatattcatatttttctattatggtttttttttttttgaaatggagtcttgctttgttgcccaggctggagtgcagtggcacaatctcagctcactgcaacagcctcctgagttcaagtgattctcgagcctcagcctcacaagtagctgggattacagtcacatgccaccatgcccagctaaattttttttttttttttttttgtatttttagtagagacagtgtttcactgtgttggccagtctggtctcaaactcctgatctcaagtgatccacctatctcgacctcctaaagtgcctggtctccattatggtttttaaatgattctacaaataatagatgatcattgtagaaaatatttgatcctattaaaaaattcttaatatttaacatatttgcttcatttttgtatgtttttttctttttttccttttaaaaaattttaagtacaggagtacatttgcaggtttgttatataggtaaacttgtgtcacagggtttgttgtacagattatttcatcaccaaggtgttaagcctagttcccattagttatttttcctgatcctcaccatcttcccaccctctaccatcaggtatctgttgtccctctctatgtgtccatgtgttctcataatttagctccacttataggtgagaacatgtgacatttgattttctcttcctgcattagtttgctaaggataatagcctctggctccaatcatgttcctgcaaaggacatgatctcagtcttttttatggctgcatagtatttcacaatgtatatgtaccacattttctttattcagtctgccattgatgtgcattgataaggtttggctgtgtccccacccaaacctcatcttgaattcccatgtgttgtggaagggacccagtgggaagtaactgaatcgtgggrgcaggtctttcctatggtattctcatgatagtgaataagtctgatgagatctgatggttttataaggggaaaatttccctgcataagctctctccttgcctgctgacatccatgtaagatgtgacttgctccccattgccttccaccatgattgtgaggcctccccagccgtgtggaaccataagtcctttaaacctttcttttgtaaattgtscagtctcgtgtatgtctttatcagcagtgtgaaaatggactaatacaggcatgtaggttgatttcatgtttttgctattgtgaatagtgttgcaatgaacatacatgtgtctgtgtctttgtggtagaacaatttctattcctttgggtatatacccagtaatgcaatagatagctgggtttcatggtagttctgtttttagttctttgaggaatcatcacactgttttccacaatggctaaactaatttacaatctcaccagcagcatataagcattctcttttctctgaaacctcaccaatatctgttattttttgactttttaaaaatagctattctgactggtgtgagacggtatctcattgtgttttgattttcatatctctaatgatcagtgatgttgagcttttttcatatgctattggctacatgtatatcttcttttgaaaagtatctgttcattttctttgcccacttttaatgaggttgtttgttttttccttctaaatataagttccttacagatgctggatattagacctttgtcagatgcatcgtttgtaaacattttctcctattctgtaggctgtctctttactctgttgatggtttcttttgctatacagaagctctttagtttaataagatttcattggtcaagttttgcttttgttggtattgcttttggagtcttcatcatgaaatctttgctggttcctatgtccagaatggatggtattgcctagattgtcttgcaaggtttttatagttttgggttttacagttaagtctttaatctatcttgagttgatatttgtatatagtgtaaggaagggattcagtttcaatcttctgcatatggttagccagttatcccagcaccatttattgaatagggaatcctttccccattggttgtttttgtcagctttgtcaaagttcagatagttttaagtgtgtagacttatttctgggctctctgttctgttccattggtccatgtatctgtttttgaaacagtaccatgctgttttgtttactgtagccctgtagtatagtttgaagttgggtagtgtaatgcctccagctttgtttttttgcttaggattgccttggctattcaggttcctttttggttccacatgaattttaaaatagtttttttctagttctgtgaagaatgtcattggtagtttgataagaatagcattgaatctataaattgctttggggaagtatggccatttaaatgacattgattcttcctatccatgagcatggaatgtttttccatttgtttgtcatatgatttctttgagcaatgttttgcagttttcattgtggagatctttcacctccctggttagctgtattcctaggtattttattcattttgtggcaattttaaatgggattgtttttatctggctttcacctccctggttagctgtattcctaggtattttattcattttgtggcaattttaagtgggattgttttttatctggctctcagtttgactgtttttggtgtataggaatgctagtgatttttgtacgtagattttgtatcttgagatcttgctgaagttgtttatcagcttaaggagttttggggccaagaccatggaattttctagatatagaatcatgtcgtctgcaaacagggattgtttgccttcctgtcttcctatttggatgccctttatttctttctcttgcctgattactctggctaggacttccaatactatgttgaataggagtgtatgttttttgtatgtttaaatttgttgacaacattacttatgaaattatcctatattcttacttaatgtaacttcagatagttttaatcattgttatgtttttcaaagtaaatacattcacttgagtaataaaaaacatagtttcaaagggttgatgagataaagcaataaaaacatagacccagtttagtggtgccaccttctcctgagcagtccacacttttgatttgttgtgattgctatacctagaagaatggctgagcttctacactgcctcatttagtaatccatgttcttaattttggcaatattgttcattacacttttggagcgcttcatctgcccagtcttgtttggagacctaccatgtgtctgacctctttgatatctctctgctgcccaccttgatggaaccactggttcctggatcccttggcctcctcttttcaagtttctttctctgtttggctcatcatgtagtaatttgtgcctctcccagattacccattttgctgatgtcaccaaatcttgaatccctccagttcagtgtcagcagggaacaaaatttccagtctcttaacctgggtgtgtgtgtgtgtgtgtgtgtgtctgtgtgtgtactgctcaggcaggcttctgaatgttgatattttgcatatgtgataagagggtttcgagtcttttgattaaagacttccaaatgaccccttgctttttgccctgctcccctcaactgcttctccacctctactattccctagcactatctgggttaatctgttcaggtgaccgcaaaagaaccacacaaaggatcttagtttgtggcttcctctgcactgctaaatcagttactgcttgcttatctgctttccatattgcaaaatttattgaatttttttgctcagtgytctccttttttctgtcctctttttctttgtggttataattgtttattcctttactagtgttttaatggagattcatgagtaagaggaaataaatttatatatttcatttgccaactttatgctctggagcctttcaaaatgtataatagtattttcaaaaatctttcatcatctgatgctgtatattattttacaaaattaaatagccatgtatgttctttaaaaatagacaatttatctatgatttcaatattacagttgaccctaacttttaattgttagggatgacaatctcccatgcactgaaaaatcgaagtgtaaattttgactcccctaaaacttaactactaatagtctactgttgaccagaagccttactgataacataaacagtcaattaatgcatatttttatgtcatatgtattatatactgtattcttacaataaaataagctatagaaaagaaaatgttattaagaaaatcatgaggaagagcaaatatttttactgttcattaagtggaagtggatcatcataaaggtctttgtcctcatcatcttcacattgaatagtctgaggaggaggaagaaaaggagaggatgatcttgctgtctcaggagtggcacaggttgaagaaaattagaggatggtcttgctgtctcagggttggcacaggtggaagaaaattaacatgtaagtggacccacagagttcaaacccttgttgtttaagggtcaactgcattttttatttctctagtttgagataggtttgtatttttagcaaaatcacatataaaagcaaagctaaacttttactcatctaagcttagttaccaaataatagaatataaattatgaacctaaaccattttgccttacattaatggataattttagagtttaattcttgtttgtgtttgcatatttgagaagtactgctgtacataatccttgatgtaatcttgaatataatttttgtttatatccttcaaaacattttcgataatgaatttttaatttttcttccatgtatagaatcattggcagatgtgcatttaagtggagattcaggtattctgtctaatattggcctaaatggccaacaaaataaggtgtaaatcttttcccagggcttaaaaatattgaatgagatcattcattgttattatgcctattaaatccctattctaatatcttggcatttctcacctggaattaggagacagttggaaactcctgatattagttaaatgttttttgagagagcagattgattaaaatgagttggattgattaaaatgttttgggaatatcttataagtaaagcaacatccagatataatgaatcagtagagtcgctacaatttatttgaattttgtccttataatttattatcagatggagatattggaaatatctctaaatgactttggaaaaaaagaataaatttagtttaataaaatggtatttccaaaatctgatctacttgaatttacaaagtggagrgaaaaaaaaggctaaggaaagcaagaagttggcaaactgtatataagataattgatttgcatatgtaaattagactaatcacatatacacataagtggctagatgtacaattacctgatttataaacatgaatggtgcaggtgctrctttagaggcactttcagaaaattggcttgtggcatcaatgctttgtagtacaacatgactgctaattatacctttcattgtaataaagtccatttaaattattttgcatgagggtaccaaaagaggggcagtggctgtaatgttacccagagaatcatgttaacagtgctaggcttttaatgtgaatctacatacagaaggtgagtactggaggggatgtatcagagcaatgagttactgtcctcattctaagcctggtgtgtgtggatggccatactagcctagagaaactcctgtgagatgcttttcacaacgaaaaatcactttacttatatttcaatccagagttgaaatcctaagaataatgatgtgccagatcttgctgggcagtctgttttctctagttacaattttaaaattatttcttttgctttctgatatgatttttctcttttatttattttaccctcatttgttattttataagtttttgagcatgaatgatatacaaggactctgtttaggagttattttcatcttaattctctgcatgtttattttgagaatctaaatggtacctaggtttagtaaaagggcactagttgctggccctctgaaattccagttatacacttgaatgaagttttatgctgtggaaactaatttagttttttatagaacatctacggggagttttgttgtcattcaatattttaggttttcctaatgatgtagacataaagggagaaccaatgttttctgtttgtttctacctatgcctcattttgaaataccttatgtatattcctttctgcctgttgctatcacatctcttgactgacttgtttagtgagatgtaaatacttcttttgactttgcactgccttttacccctgatatctactgttggggatcagtatcaagcgtggaggggagctgggaagatgaggactcgggtaggattcttcaaatgcttcctacctgaaccgggagaccgtaaaacagaatcaaaattgagttaaatcagtctcatataaggcatttgctattgatggacacaaaggggagaactgagatttaattgtaattttccccttcttggttggatgaacaaccacattttaagtaggtaaggaaatctgggcttctctctcaggagctgtttgcttagtgtgccttcagccataatgaatccaaaattcagagttaggacatctttctgttaaaagaccctttccctcataatccaatcttagctataattgctcctttcacagtggtgctacagactrcattctattattcatttgaattggtcctgatttgttcattcataatagtgacattgctttttctcattgctccccaattatagcaatttttctctttgaaattatatccttttcaggagaytaaagactgccaattacaggtggtatttcaaagcacgaaaattcagtaaatagtcataaagcctctcaaatgcacattttcggtcatcaaagtggtttttatagacataaatactactttcatgtgtcatgcattattggttgttctgtttttatacttacatctagttagtaatatcaggcctgccttgaggaaaggaaacatggaatgatagaaagaagataagttagaatgaatgtgagctttctgtttgttcagctattaaccctttaatgctactgccctggaggataacatgtacacagaagggaatataaagcctttgcggacttgtatatttgtgaggggtcaggagaaacagggcaggagtgagraactgggctgctgagttacttagatggcacagaattgttccttcttccctttggcagtycacaattgcagtggagtagcagactcacagtgtgattcctttcatgttcttaaggctggaaccaccattcccacctctcatgtaaaaggctattatttggtgtacttgcagtagaacagacagccaattacctagagttgtttcattttttgtttgtttaaagggcaggatagaaacatggcctaaatgtacttctttatactcttctaacttaggaaatttatacataatatatataactcttatatatctttctttcctaattgtacttcagtgccggaaaaagcatcttctttgaataggcatgcacatttatagtgttacttcagaggtaagaaaatatgaggtgaccagtgatgtcttgctatttaataaattaatagatttttattgtacacattaaaatatttcttctggtaagttattttctctgttatcatagatttattgttgattacattactagtgtgctatagtgttccccctagatttttaaagcattttagggtgaagtaagtgttctatattttgatttagtggttacatgattgtatatgattactaaaatacatccaactgtatacctaaaagagccaattatattatacaacaataatacctttaaaatacttctagtttacacattggaaaaggaatgtgaaaattttacacactacaaaagcacacattagaaaatgtctattaggtggtagtcccagtttttattaatattttattagtattttattggaatccagaatttggtacattaatatatttcataggaattaagatgaacatatcacactttgcatatacaaacaaacaagcaaaaataaaactaataaaaactcaccttagcttagctttgtcccctgatttttaactttttgttgtttctatttatatcttattgtactatgtcttgaaaagttgttgcagttattatttttgattggttcatcatttggtctttctacataggataagagtagtttatacaccacagtcacagtgttataatattctgtgtttctctgtgtactactattaccagtaagttttgtaccatcagatgattatttattccttattaattttgttttctttctgactgaagaactccctttagcatttcttgtaggatgggtttggtattgatgaaatccttcaacttttgtttgtctggcaaagtctctatttcttcttcatgtktgaagggtatttcactggatatactattccagggtaaaagttgttttctttttccttcagcactttaaatatgtcatgccactctctcctggcccataaggtttccactgaaaagttgctgccagaagtattgaacctcattgtatgctatttatttcttttctcttgctgcttttaggatcctttatgtatccctgacctttggaagtttgattattaaatgccttgaggtagtcttctttgggttaaatctgcttggtgttctacaaccttcttgcacgtggatattgatatctttctctaggtttaggaaattctctgttactattcctttgaataaacattctacacctgtctctctctacctcctctttaaggccaataactcttagatttgccctttggaggatattttcttttgcactgggtcttttacttcatggcggcagattcccttatggcccagagtgtgtttagaaatgtcatctgggagctagggcctggaatgggggcctcatgattctgattggtaccctgtcctgctgtggctgagctggtatccaagattcaagacaaagtccttgccactcttccttctcctctcctcagggggaagggaggggtttcttttggagccttgagctgtgcagcctggggctaagggacgtgatgccagcactcccttggctgccccagttggtgtctcagttcgttgcgtgatccccgagtccactgtctctgggccctagtgcagcactaggacttgcttatgatttgtagtcctcatggcctagattgcttttcaagtttacttgaatatatagagtgcaaacctgcaaacctctgtagcgaggtttgcaggcactcaagttcagactgctggaattggtagttcccctctgcctaggctgagtttaaatgctccctctgtgggtgggcgtcagttgagcttgccctacttttcctttctgctctaacaggacagtactgagttcaatgcctcacaattgctgtgttcgccctcctgcagcacccagagaaactctgggcaccacccattggctaccggggtagggaaggggtggtataggtgattcagaactgtttttttttttytctctctctctctctctcttcagtgcctccttcagcaatatgaagttaaaaccagatactatgggtgctcaccagattttcggttcttaagaaggtgtttttttctgtgtacatagttattaacttggtgtccttgcgagggggtgggactgggataatgggtggaactttctattctgccatcttgcccccgctccctggtttctaaaccctgaagccacgatatactttgaagaggtatcttccatagcatgtgaaaagatgacctctgtcattttattacgtgtgtgcgtaagtttacagaactgaagtttattcatctaataatttatttattctataaatagtaatctgttactctgcaccagccattttggtaggttctcaatattgaatagagaacaagacactctgccatcatggaacttgctgtatagtggtggaggaagacaatttaaagctaaatttaaaagtggttatttgtgtttattagtgctatgaagaatataaaaggggacattgataggataggaaagagaaaaccttttgtgaaaagagtagtcaaagaagttctatgtgaggaggcagcattttaatctgctacctgaaaacaaacaaaaaaaaactgaacagttttagtacctttattctttgaaatagcccccaaactacttttatgaaaggaatctcaatatcttgaaccccatgcagcaaaaactgcaagaatggtgtcttggaaactgtggttttctaaacaagcacaaaggtgattcttatgaaaggaaagtccaagaaactctatcagaggttctcaaattatagtatacgtaaaaacattctggggcttctgcttctggtcatgacagaccaggtattgacatgctgttgtaccataaacaacgagaaagctagacaaaacatatttttaaaaacacaacactttttaaatattggaaaagagacttaggactgtgacattgataaaaggaaataaatgaggcgaacactacaattacctcatcattattcatagaggcagtttccagagcacaggcagaaggaagctgttcccaaggagatcaaagcaactgttgctgcactgaagaaattggaaaggcagagtgactggactgtgcagagaagaggaagttatgcagaaaaaagctctgaaaatctacataaagattatctacacaatctaaataagtacataaaaatatttaactgaaaacccacatagatatatgtagagtgtgacttcaggcagtttggcaaagaataattaccagagaaagaatcaatgtagggctgtaatccacacaactactggagtttgtgcaggattgagagatgctcgagttactaccagccaaaatggggaaacttcactgaacgcctgagacatttaatagagaccctccagaaaggttatacattggaggaaggactaaactagccctagaataagagctacctgaaaagttcaagttgatccacaagtaattaactgcctgccagagcaaaattcaacatttattattagaagacagcaaaatctacaattcaataatgtaacactaagaatatccagctccaatattagatcactagatatgtgaagattcaggaatatgcagcccattatcagaagaaaaatcagtcaatagagtcagacccagaagtaacagagatgttgaaattagctggttcgtactttaaaatagttataaatatgttcaacaatttaaagaaaaacatgaacataatgttgaaagaaatggaatatagaaaaaagaactgaatagaacttctaaaacttaaaaatataatatatatgatgacaaattcataagaatcaggtttaacagcacaataggcatatgggagaaaagatcagtaaacttgaaggcaggaaaatttaagctgttcaaactgaagcatagttatcaaaataaggctggagagaaaagtctctgtgacctatgagacattacctagtagtctcacctatgtgtcattgcagcctgagaatggcgggtgtagggggtggaggatatcatttaaataatggctgaaatttttctaaatttgctgagcactaagaagctgaagaaggtcaaaaatcactcaagtatgagaaagaaagccacactaaggtatgtcataatccaaatgctgaaaactaatgagaaggattataaaagcagcaagagaaaaaagacacattacatttaggggtcatagataagaatggccactggtttgtcatcaaatgcaatggaatgacatctttgaaggactgaaagraaagtcccttcaattttgaattctgtattcagtgaaaatgttattcataaataaagacaaaattaaaacagacatttatgtcaaatgaaaaaatgaagaatttactggcagagacctgcactataaaaaatgtcaaagaacattttttaggctgaaggaaaatgattccaggtgaaaagtcatacctacagaaaggaataaaaatcaccatcagtggtaaatatagggcagatatgaaacatttgattttatacttgttgtatctttgaaagaaaaaacgctttttagaactacaattataactctatattgtgaagttataaccagtgtaaatagcaaagggacagaggaggaaaattggaagtacaagcagtttacccttatccaaggttttgcttttcacaatttcagtcacctgtggtcaaccactgtttgaaaatattaaatgggaaattccagaaataaacaattcacattttcagttgtgtgcctttctgattagcatgatgaaatatcatgtggtcctgctccatcccacccagratgtgaattatcttcttgtrcagcatatctatgttgtatatgctacctgcctattagtgacttagtatccatctgggttatcagattgtcatagtattgcagtgctcatgttcaagtaacccttattttacttaataatggccacaggccaggcatggtggctcacgcctgtaatcccagcactttgggaggccaaggtgggcggatgacaaggtcaggagatcaagaccatcctggctaatacggtgaaaccccatctctactaaaaatacaaaaaattagccgggtgaggtggcgtgcacctgtagtcccagctactcgggaggcaggagaatggcttgaacccgggaggcggaacttgcagtgagccgagattgcaccagtacactccagccagcctgggcaacagagcaagactccatctctaaaaaaggccccagaatgcaggagtagtgttgctggaatgttgttataattgttccattttactagtagttatcatctcttactgtacctagtttataagttaaacttgatcataggatatatgtatagcaaaaagcatagtatatatacggtgcagtactatctgtggttttgggtatccactgaaggtcttggaacatataatccgtggataatgggggactagtgtatacaattaaagtgtcttatatgtgaagtggtatgttattttaatgtagatagtgataagttaaagatgcatattgtaaaccctaaagcaactggtaaaaaataaaatgaagtatagctaataagctagtggagtacaaaatggaatactagaaatattcaacccaaagaaagtaggaaaataggaaaagagaacaaagaagagacgaatagaaacaaatacagcaatgtggtaaacttaaacccagttatatttataattacattaagtgtatatgatttagactatacaatttaaaggcagaaattatgagactggattgtaatacccaactacaaacacactttaaatagaaacatgcagatagatagattgaaagtaaagagatggagaagctgtacaatgaaaacattcattttattcatttcaatagttggaatggctattttaatataaggcaaggtaacttccagacaagcagtataatcagagacagatgacatttcataatgacaaaaagttcaattcatcaagaggagaaaacactttttagtttgtgtgtgcttaataacaaagctttaaaattatatgtgtcaaaaactaagagaaatgaaaaaagaaatagtcatatcctcaatattaaatggaaatttcaaaatcatttcctcagtaatttaaaaaacaagtagaaaattatttgaggatacataaaatttaaatattctggaccataagacaaatatcaacaagtttaaaagagtcaaaatcataaaagaatattatctgaccataatggaattaaattaaaatctataaaataaaaatataagaaaaactaacaaatacctgggaattagatcacacacctcaaaaacaaactttaggtcagagaggaaatcaaaagaaaagtgtgaaaatattttgaatggaataatggaaatgcaacatatcaaatgtgtagaatgcatttaagcagtgcctagaagggcatttgcacctccctgtaatgtatattagaaaaaaaagatttaatatcggttatatagatttttgccttaagaagttaataaaattgaagcaaattaaatccaatataacctaaatgaaagaagtaataaagataatagtagaaatcactttagtaaaaaataaacaaaaataatagaatgaaaggaagagttgtctcttaataaagtaaataaacttgatctctttagacagatccagagaaaagtaagaaaatacatattatttatattaagtatcaaatggggaaaattattattgaatttatagacattcaaatgatattaatgaaatattatgaacaactttatattgataagtttggtaatttagtgtcttgggtctttctggaaagacatgagttgtataactgatatgagaagaaatagaaaatrcaaatagtttatattaataaaagaaacttaataattaaaaccctttccacaaagaaaataccaagcccaatgacttcactggtgaattctgtcaaatatttatactaacttaattctggagagatatagaaatattattgctctagctctattcccttttcattttcattctgtattgttatacacattgtatcagtaaatagtagaaccgtgcattttttttatattttaaagaaaagcagaagaaagaagaacaagtatttaattatagtttgttatctgtcttatttaatgtttccagttcttttagtttgttcctgtgaatttgagttcctgcctggtgtgattatttcagtacagctttgctccaacccacctctcttatgcaattgttaaatatgtcacatttctatatattgtaggcccaacaatacaattatatgcctaatgttttatacaattgctttttaaataagttaagagaaaaaggaagaaatatgcatttacagtatatcttcatttttctctaataaaataattatcattactagtgctctttgttttcttgtgtagatccagatcactatgtgagatcacttactttcattctaaaaaatttcctttagtatttctaataagttggttctgctaacagtgagttctgtcaattttgtttacctggcaatgtcttcatttcccctttatttttgagagagttttgctgagtatgatagtcttagtaaggtattttttcctttagcaccttgaatatgtcatctctctgccttctggcctacatagttctaatgagaagtcagttgttaacattgttagttccctaatatgtgacaattcatttttcttctgttaatttcaagattttccttttattataggctttcaacctttttactattgtgtgactagcttggacctctttgcatttatctttttttgtttgtgtgtttgtttggagacagagtctcactctgtcacccaggctggagtgcagtggcacagtctcagctgattgtaacctccgcctcccgggttcaagcaattctcctgcctcagcctcccaagtagctgggactacatgcatttatcttatttgagttcattgagctacctgaatgcttctcattaaatttgaaaattatcagtcattacttcttcaaagatttttcttctgctgcttgttctctctcttgttttctcatactgtcattacatgtatgcttatatttctctgaaactgttcatttaccttcattccttcttctttttttcatattttataatcccaattcaaatctgttgagtccctgtagtgaaattttcatttccataactgtagtttttaaatctataattttcactttgttctttttttatgaatgatgagtgttctctttattgatattccatatttgatgagacattaccatcaaacctttctttgctactgtaaggatgatttcctctagttctttaaacatatttatatctttgctttggaatatttgtccactaagtccaatgactgggcccgctcacaagcccttctttttttcatgtgtatggatgatattttcctgtttctttgcatgtcttatttttttgttgttgttgaaaactgtacatttcagaaaatttgcttaaattattataagaagtcttcgtactaagttccytgggtggggaacttgttgtttgcctgtttgtttagtgacttggctggactattttagtaaaatctattttccccatctatgaagcctttgatgtcactcttcagcaagcacagcttagggcatatgtacaatcaccctggaatgacagtgattttaacagggcttttctatgactgtttcattccctggtctttttattaatctgtctgcctctgttggtgccacccccagttattaggctccactaattgtcagctgattcctctgttgtttccagcagtgtcctggggcatgaattgtttcacaatctgattcaattaagttgcagactccttacaggagtactttttgtggctagctttgaggttcattttgattccaggacagttcttcttagctgtttctttttaaaaattctatttgctaattctgtgaagaatgtcaatggtagtttaatgggaatagcattgaatatataaattattttgggcagtatggtcattttcatgacattgattctttccatccatgtggacggaatagttttccatttgtttaggtcctctcttatttccttgagcagtggtttatagttctccttgaagaggtccttcacatccttgttagctctattgctaggcattttattctctttgtagcaatcgtgaatgggaattcattcatgatttgccactctgcttgtctattgttggcgtataggaatgcttgtgatttttgcacattgattttgtatcctaaaactttgctgaagttatttatcagcttaaggagtttttgggccaagacgatggggttttctaaatatagaatcatgacatctgcaaacagacaatttgactttctctcttcctattcaaataccctttatttctttctcttgcctgattgccctggccagaacttccaatactatgttgaaaaggagtggtgagagagggcatcctcatcatgtgctggttttcatagggaatgcttccagtttttgctcattcagtattttattggatatgggttgtcataaatggctcttattattttgatatgtgttccatcaatatctagtttatagagagtttttaacatgaggggatgttgaatttacagtaaccaaaacagcatggtatgggtaccaaaacagacatatagatcaatggaacagaacagacacctaagaaataacaccacacatgtacaaccatctgatatttgacaaaccagacaaaaacaagcaatggagaaaggattccctatttaataaatggtgctgggacaactggctagccatatgcagaaaactgaaactggaccccttccttacaccttatacagaaattaatgcaagatggattaaagacttaaatgtaaaaccaaaaaccgtaaaaaccctcgaagaaaacctaggcaataccattcaggacatagtcatgggcacagatttcatgatgaaaacaccaaaagcaattgcaacaaaagcccaaatcgacaaatgggatctaattcaactaaagagcttctgtacagcaaaagaaactatcatcagagcgaacaggcagcctacagaatgggaaaaaatttttgcaatctacgcatccaacaaaggactaatatccagaatctacaagaaacttaagcaaatttacatatgtaacaaacctgcacattctgcacatgtatcccggaacttaaataattttttaaaaggtataaattcaaaaaataattctatttgctaagctgtccagtctgtggttagcttgttgctctcatggagttaccagcctcagtgtaattatcaaaatctcactcttttcaagagtactcttaggctttaattttcccacactgtctcccaaatacagtcagaaccactgcggagagctttggagttctttgttcttatgacctgcctctccctctgggcmaactctctgagccactgttcaggagctggcagcagagacaggggcccacatctcttagagtgacaccttgtttcacattgaactggctggggatgtttgagggagaggatggctcaaatgccacagactcctactgttctaactgagattgtgttatgatcttgaatgtttcttcgctgactgtatgcccttatgacaatttccaaaaacttaaaatggctctttatttttccaatttttagtagttatggttgcttcactggagaatgaattgatgagttcatcacaccaccattctggaaacaagagtcctagaaaatatttaagaaagaaataatcagtcttattgcctcattttatgaggccagcattatactgtcaactgaagaattggaagattcatacatttggaaaagaaagctttatttcttataaagtgttgcagtctgcaagctagccatctgtaggctgggaagtgtggcctctggtagaagccaaaagcaggcactttgagggagggaaggataagacaggaatttatgctgaatgagttggctaagtatacatattcatgaaggggaggcatgtgcacgcacagtaggttatcttgtatgtaatatgcattctgtgtttgctttgggatggagatgtagcatttaaatgtactacaattaggtcctatacatgaaaaggtgaagcagaggacaggaaggccctcagtgcatgcagcctcagaagactggccagaaccactccaggatcaggcagtctcttatcagaaaggaatgctagttagttgctgtgttgaaaccacaaaagtgaggggtagcattaagcagttggttgaattaaataatggagcaagtatctcaaaagggctgctttctgtttaatctttaggaaagaaagcgtaacggcagttatcaaagaagagggtgtaacaacacgtgtccaacttatcccatcatggctgggactgtttttaaggtttctctagggtctacttggccaagagagggtctattgagttgtctgagatgcttaggatttaacttttatttctcaacaatgttgaaagaagacaaagacatcataagaaaattgagtctgacattccacatgaacccagatgtaaagtacttcacagagtattaacaaataaaatctagcaatatataaaaatattaatacatcatgactgaatggagtttatttcaggagtgagtgcaagttcgttaaaacattaaaatgcatttgttaaaacattaaaaattctctgcaccacaattgcattaacagaatcaaagtggaaaaaaatcatgaaagacatgccgaaattcaatacccatatgtgataaacacagtcagcacactaggaatagtgggaattttatctaataaagtgtacccacccaatttaaaggtagtaagctagaactttggacattgtacaaaaccatataaatgaaatatgttcaaaatctttagtctttggggaaatttaaattaaaaccacaatgaaatgcaattagacatttgctaaaatggctaaaattaaaacactgatagtactgagtattggtgaggtggcagagccaattgtactcttatacactgcttatggcagtgtaaaacagttcagttactttggaaacatacagcagtgtcttataatgtgacatatacgcctaccacatgatccagaagtttcacttgtaggcatttgctaaagattagtgtttccaaaagactcaagcatgaatattgatagcacttttataatgagcaaagtgaaaacgggaatgaatattrgaaaatcacagtttctgcttttgtagcctcacacagaatatagtcagactaagctaatggccttaaaacattattagaataaacaaaaaacaattgaaaaacaacaaagccagtaatgccaactatagaaattagcaatcatttttcagaaatttgagtaaaaatctcatgtcccctcctaaagacagaatacattcagagaacttaacaaaggctgtctttggaagttagctgcaatgatctgtttatataatattatacyttttgatttagttttgttttgtaatgtttgactacagctagggtagagaattcattttcagtgctgctctgttatttaattagtgtagctctagcttaggaaaattatacttcaattttgtttgattaaagaacactaaggtctattttagcattgtgttgcaaaactatacataattatttttcagtctactattataaaatcccccttttagtctatcttggtgatttaaaaattgcataggctaaatacgacataattcattcacctggatgcaattatttttaaagggaaacaatatcatttttattttttattatctgttgcctaattatacggtatttacttttcatttaagatattttmattcttcatatttatttttaaaaactcatatttcagtttgaatattatcttgttacttttctttatgtaagaaggacattttatgctggttgaagaaaagtatattttgcaaaagaccatatttgaaatttcactaattctaaatgaagaattagagagttcatggtatgttcatatctggaggttctttaggaagattttcagacacaaagtcatttgtggtgtattgatatttagttatcaacagtctgcttaataatttccatgtttgtctattcacttcctcctccaatttcttttccattttaatcaaactcttgaagtttcattcagaaaactttttctgttctgaaaactaaaccactgatcctactttggtaacagagaaataaattccttgtatgaaacaggtacaggaggggttgggcagcattcaaggggaggggattataaagaacttcagtttctcctggtcaggttcatgtgagcctcacctagtggtttccctaacagcagatacagccatagtcaagcagataaaccaatatacattcaaagcaaaatgactgagaaaatatttgattttaaaaattttgtcatttgtgattttctgtccctaatctcttaaaaattaaaataagtggggtgtattttttctcagtgtaacttaaataaaatgaatgaatgaataaaacttgtgtttcatattatataaaatgagaattttgtgactttgaagagcaagagtttaggtttacattgactaacttactaagccctaaatactagatgttaacaaaccttaggtatgtgttctttacaaaatagatgcacaaaagagaaaggcatttctcctttctctttgtccaccatctcacttccacttccagatagaaatatccaaaagtatcacatacaagagtctcagtattttggggagacaggagtggggaggttctgtttctgatatcaatgttgctatctctttgcaattttatatagtttttttgttatttactcccaaatctctggcttctaatgtgaatttttttttaataacatgtatagcaaacgatgtagtagaagacataaaggatataaggctttttatattttcaaatatactgtgtgatttataagtaaaatttgaatatcttgttttaataatttattctattcctttcatatgttaaacttagagaatgattttgagtttgtttttattgaagtgtcttttgtcttgaaaaattaagtggctatgtttatttggaataggaatgatgtattaatctgttttcacactgtcagtaaagacatacccaagactgggcaatttatgaaagaaaaaggtttaattgtacttacacatggctggggaagcctcacaaacatggcagaaggcaaggaagagcaagtcacatctcacgtggatggcagtaggcaaagagaggagcgcttgtgcagggaaacacccctttctataaccatcaaatatcatgagacttcttcattatcaggagaacagcacaggaaagacctgccctcatgattcaattacctcccaccaggtctcttccacaacacatggaaattgaagatgagatttgagtggggaaatagccaaaccatatcaaatgaagtcatataccacctaaaattgtactttattatttctataaaatacttagctaatataaataagaatataagaatattacagaatatagaattatagatcctatgtaggaaattactatcttagttgaattgctcagataactaataacattttaagggaatttatcaggtgacattcaagccacaaaacaaatttcatggggagaatttgtttatatgctttagatttctatatttatattttcagaaagatttgcatattttatccctttgatatggtactattgttgctagtggtaattgtgggtcatatgtttggtatgtgcagactattattattgcctctcgtctgctacttcattgtctggaaatgtttgattgtaatttttttccacattgtttgcttagatctgtaaaatagaggattatgaaatcattttggagttcttagagaattggtattcatgtctttcacctcacattctagtgtgactttaactggtctttctttctgaagagagcaactcactgcattttagtatacaatcaattgtgagggtatatctcctgcactacaagccaactcagtggcttctacagaattagagtacagtgtttgcagttattagagtgaatagcattgtttcttttttaactattaaaaatttcctgctttggtttttgtatacatacttgtttttaaaaatctagtaagcttaagtagttgtagtaagaaaatgatttaatcmccatcttaccagggtcacaaaatattatcttagtttggagaaaagcttttcttctattaccaaaaaaaaaaaaagaaaacagtgaccatacagaaaaaagttgataaatttgaatcacccaacccaccctcccaagtgtacttctgtgttccagaagacatcataaccaaaggaaacataccaaaacaatctgtagaaaactattgtcaacatatatgacagcagatttaatattctctttaaaaccttttattttttccattctaactcaatgttaccagtctctgtgaaattctatagtactttgcacataattcttttaccacataactataattcaagacctacatacagtctaggtaattgtgtgttttccctctaatgaggggctttttcaaccttggcactgttgacattgtggcttggataattgttgtgggggcctttcctgtgcactgttgtatgtttagcagcattcctggcctctagatgccaatagcagtttcacagccttgacagtaaaacatattttcaaacattgtgaagtgtccgctggttataaaatctcccccaggcaaaacaaacaaacaaaaaacaaggaaaggccgggcgcaatggctcacgcctgtaatcccagcactttgggaggccaaggcgggtggatcatgaggtcaggagattgagaccatcctggataacacggtgaaaccccttctgtactaaaaaatacaaaaaattagccaggcgtggtggcaggcgcctgtagtcccagctactcgggaggctgaggcaggagaatgtggtgaacctgggaggtggagcttgcagtgagccgagatcgcaccactkcactccagcctgggcaacggagcgagactccgtctcaaaaaaaaaaaaaaagcaaaaaaccccacataatgcttataaaatctcttccaggcaaaacaaacaaacaacaataagaacaacaaaaaaccctcactattttgattgtattttaagcctcttgagaaaaagcggtcctagtcatctttgatgcacttgagcacctactcagtgttttgcatatagtaacaattcaataaatacttgttgattttaaaggaataaattatgattcttctaaattccactttcttaatcaaaagtattacattatgaacacatttatatataaatgtgtcaatacctcacttgtctaaaaatgtattggatataaaattcagtcatgagtagaatgatttcattctggagaagacattctaggggcacttcatttatattgaacttggattaattttgtgtgcttcatattatttcaggtcctttttgtatattcttggtgttagcaactgtgtttttaaaacaaattggtagactttattttttgagcagtttaattttgcagaaaaattaagcagaaagtaaagagctatataagcttcatcttgtactagtgtggtacatttgttacaactaagccaaggatgatacattattattaaccaaaatccatagtttacattagggttccctactgttatacattttatggattttgacaactgtatgatgatctgtatcaatcattacagtatcgcatagagtagattcactgccctaaaaattgtctgtgttgtacctattcatccctccctctcccctgaatccctagcaattactgatcttttcattatctccacttttgccttttccagagtgttatataattggaatcacacagtatgtagccttttcagattgccttctttcattcagcaatatgcatttaacgtttccccattcttggtgtttgcaactagattttaaacacaattcagggttgtatctcctgtttcttggacacttaccactagtagaaaagtgtactgttataatttgacatccatataccaaccataccatacatcacactatatacaaaaattaagtcaaaacggatcacagacctacctgtatgtaaaactgaaaactataacgttcctaaggaaattacaggagaaaaaaattgtgactttgaattaggaaaaaaaaaatttagacacaaaaaggcacattttatgaatttgttttaaatgatcaatttagagcttctgctcttcaaaagacacttaaaataaaagggcaagccacagggttggaggaaatacttccaaaacatctattatgataaaggacttatatccagaatatataaagagctctcaaaactcaacaataagcaaataagcagtgaaaaaatgaacaaaaaattggatgtttcaccagagaaattatatggatggcaaataagtacatgaaaagatggtcaatgttattagtcatcaggaaaatctactctaaaatcacaatgagatactagtactatttagaatggctttaacaggattaaaatggtggatagaaggcaagattaacttgcagctcctactcaagacagacagagcagcatgtgaagactcacatcatgaagttttactccaagaactacctaccacaggaatataccaggaaatctgagacattttgaaggaactggatcacctcttcaggttccctgagatgccaaaaaactgtgagtctgcttgctttctcaatggggaggctcgtagtctggggcaagctctcagccctggttaccagctgcctggaaatagactgggtgctgttgrtggggcacggtgggagtgagactggcctttaggactgcaggctgtgtgggagctgggtgaggcttgtgcatgccagcttacccccactttgctggtgacctgtgtgactcagcagaggcagacataatctccctgggaatataactccactggactgggaactacaccgtcatgccccacagcagccacagcgagccccacccaaggagaggctgagctcagacacacctatccctgccgccacctggtggtctttctctacccactctggtagccaaagaggaaggtcttggaagacaaaaactcttggaagctctatggccctgctcaccacctgagaaacctgaatacctatccaggtgtccctagggcaagtttgcatgctctctataggactgcagctgatatgctattgaaagcaccacctcctggctggaggccaaccaacacaaaaccagtgcactaaacaaaaacacaaccaaagaccttcactaagcccactttactcccctgctacctccaccagtgcaggtatccacagctgcaagacctgaagatggatcacattacagaactctttgcagacgctcctcagtactaacccagagcctggtagctctgctgggtggctggaaacagaagagcaaaaccaataactacaatttgggtattaaaaaaccccattcctagtgaaatggagagaacaccatatcaagggagcaccctgtgggacaaaaaaatctgaacagcagcccctaaatccctgatctyccctctgacatagtctacccaaatgagaaggaaccagaaaaacaattctagtaatacgacaaaacaagattctttaacaccgccaaaagatcataccagcacacgagcaatgaacccaaaccaagatgaaatctctgaattgccagaaaaagaattcagaaggtcaaattttaagctaatcaaggaggcaccagagataggtggagtccaacttaaagaaattaaaaacatgatacaggatatgaaaggaaaattcttcagtgaaatattaaatagatagcataaataaaaaacaatcacaacttctggaaatcaaggacacaattagagaaatgcaaaattcacttgaaagtctcagcaacagaattgcacaagcagaagaaagaacttcagagcttgaaaacaaggctttttaattaatcaaagacaaagaaaaatgatttttgttttttttttttgagacaaattcccactctgtcacccaggctggagtgcagtggtgcgatctcggctcactgcaagctccgcctcccrggttcatgccattctcctgtctcagcctccctagtagctgggactacaggcgcccgccaccacgcccagctaattttttttgtatttttaatagagacggggtttcaccgtgttatccaggatggtctcgatctcctgaccttgtgatccacccgcctcggcctcccaaagtgctgggattacaggtgtgagccactgcacccagccagaaaaatgaattttgaaaagtgaataaagcctccaagaaatttgggactatgttaaatatccaaacctaagaataattggtgctcctgaggaagaagagaaatctaaaagtttggaaaacatatttgagggaataattgaggaaaacttccccagccttgctagagatctagcaaatacatccaaatacaagaagctcagagaacacctgggaaaatcatcacaaaagatcattgcctaggcatatagtcatcaggttatctaaagtcaagacaaaggaaagaatcttaagagctgtgaggcaaaagcatcaggtaacctataaaagaaaacctatcagattaacagcagatttctcagcagaaaccctacaaactcgaagggattgaggtccaatttttaacttccttaaacaaaacagttatcagcccagaattttgtatccagagaaactaagcttcataaatgaaggaaagaaggtcttttccagacaaacaaatactgagagagttcaccactaccaagccagcactacaagaactggtaaaaggagctctaaatcttgaaacaaatcctccaaatacaacaaaataaaatctccttaaaacataaatctcacagaacctatataacaataacacaatgaaaaacaatcaaggtattcaggcaacaaatagcatgatcaatagaatagtacctcacatctcaatactagcattgaatataaatggcctaaatactccacttaaatgatacagagtgacagaatggataagaatttaccaaccaagtttctgttgtcttcagaagactcacctaacacataagaactcgcaaaaacttaaggtaaaggggccaggtttttcgcaggctacataaataacacacctggtcaaaccaatcccctgggccctatgcaaaccagaaaccacctcctccagcctcccgatacaataaactacctttctgccacacatggtgtttctttttgttccaagcccccctcccttgtctctgtacagggaagctgttctcttcttctttcttgcccattaaacttttcgctctttgaaaccactccacgtgtgtctgtgtcctgtcagcacaaaaccaaaaaccctggtgttcctacagtcatcaaagccatatcaagaccacagtggaataaaattggaaatgaactccaaaaggaaccctcaaaatcatgcaaatacatggaaattaaataacctgctcctaaatgatcattggtcaacaatgaaatcaagatggaaatgaaaaaattatttgaactgaacaataatagtgacacaacctatcaaaaactctgggatacagcaaaagcagttctaagagaaaagttcatagcattaaatccctactacatcaaaaagtctgaggccgggcttgctggctcattcctgtaatcccggcactttgggaggctgaggcaggcagattgcctgagctcaggagtttgcagccagcctgggcaacacagtgaaaccacgtttctactaaaattcaaaaaattagccaggcatggcggtgtgtgcctgtcgtcccagctacttgggaggctgaggcaggagaattacttgaaccgcggaggcagaggttgcagtgagctgagatcatgccactgcactccagcgtgggtgacaaagcaagactctgtctcaaaaaaaaaaaaaaaaaaaaattctgaaagagcacaaatatatacaatctaaagtcacacctcacagaactggagaagcaaaaacaatccaaacccaaactcagcagaagaaaagaaataatgaagatcagaatagaactaaatggaattgaaacaaacaaacaaacaaacaaaaacaacagataaatgaaataaaaagctggttagacaaagattaaccaagaaaaggagacagaagatccaaataagcttaattgaaaacgaaatgggagatatttcaactgataccagagaaatacaaaagattattcaaggatactatgaacacctttgagcacataaaccagaaaatctagaggagacagataaattcctggaaatatgtaaccctcctagataaaaccaggaagatatagaatctctgaacagaccaataacaagcagcaagtttgaaatggtaataaaaaaattgcccaccaaaaaaagtccaggatcagacagattcacagctgaattctatcagacattcaaagaagaattggtaccaatcctattgatactattccaaaagatagagaaagagggaattctccctaaagcattctgtgaagccagtatcaccctaataccaaaaccagggtaggacataacaaaaaaaggaaactgcagaccagaagaaaactgcatatccctgatgcacatagatgcaaaaatcctcaacaaaatactagcaaactgaatccaacagcatatcaaaacagtaattcaccatgatcaagtgggttttataccagggatccagggatagattaacatatgtaagtcataaatgtgacacactacataaacagaattaaaaataataattacatgatcatctcaatagatgcagaaaaagcatttgacaaaatccagcatccctttatgattaaagccctcaggaaaattggcatagaaaggaaataccttaaggtaataaaaaccatytacaacaaacccacagccaacattatactgaacagggaaaagttgaaagcattccccctgagaactgaaacaagacagggatgcccactttcaccacttctattcaacatagtactcgaattccttgccagagcaatcagtcaagagaaagaaataaagaacatccaaatcagtaaagaagaagtcaaactgtcactctttgctgatgatatgatcttatacttagaaaaccctaaagactcatccgaaaagctcctagaactggtaaatgagttcagcaaagtttcaggaaacaaaattgatgtacacaaatcagtggctctgctatatgccaacagcagctaagyggagaatcaaatcaagaactcaaactctttcacaacagctgcaaaaataaataaataaactatttaggaatatatccaaccaaggatgtgaaagacctcttacaaggaaaactacaaaaccgtgctgaaagaaatcacagatgacacaaaaaaatggaaacacaaccgatgctcatggatatgtagaatcaatattgtgaaaatgaccatactgccaaaagcaatctacaaattcaatgcaatttccatcaaaataccacaatcattcttcacagaactagaaaaaaaatcatgaaattcatatggaaccaaaaaagagcccaaatagccaaagcaagactaagcaaaaagaataaatctggaggcatcacattacccaacttcaaaccacactataggccatagtcaccaaaacagcatggtactgatacgaaaacaggcacatagaccaacggaacagaagagagaacctagaaataaagccaaatacttacagccaattgaccttcaacaaagcaaacaaaaacataaagtggggaaaggatactctattcaacaaatggtgctgggataattggcaagccacatatggaagaatgaaactggattctcatctcttaccttccacaaaaatcaactcaagatggatcaaagacttaaatgtaaaacctgaatccataaagattctagaaaataatatgggaaaaacccttttagacattggcgtaggcaaagacttcatgaccaagaacccaaaagcaaatgcaacaaaaacaaagataaatagatggaacttaattaaactaaaaagcttctgcgcagcaaaagaaataatcagtagagttarcagacaatccacagagtgagagaacatcttcaaaatctatatatctgacgaagaactaatatccaggatctacaaagaactcaaacaaatcagcaagaaaaaaaatcccatcaaaaagtgggctaaagacatgagtaaacaattctcaaaagaagatatacaaatgggcaacaagcatatgaaaaaattctcaacatcactaattatcagagaaatgcaaatcaaaaccacaatgtgaaaccacctcactccttcaagaatggccataatcaaaaaatcaaaaaataatagatgttcgcatggaagcattgaaaagggaatatttttacactcccatcaacaccactatggaaccactatggaaaacagtgtggggattccttaaagaactaaaagtaaatctaccatttgatccagcaatcccactactaggtatctacacagagaaaaagaaatcactatatgaaaaagatatttgtacacacatgttcatagcagcacaatttgcaattgcaaaaacatggaaccagcccaaatgcccatcaattaacaggtggataaagaaaatgtgatatatatatatgatcgaatactactcagccataaaagggaatgaaataatggcattcacagccacctggatggaattggagaccattattctacattattctaagtgaagtaactcaggaatggaaaaccaaacatcatatattctcactcatatgtgagagctaagctatgaggacacaaaggcgtaagaatgatacactggacattggggactcgggggaaagtgtgggtgggtggtgagggataaaagacagcacactgggcacagtgtacacagctcgggtgatgggtgcaccaaaatctcagaaatcaccactaaagaacttattcttgtgaccaaacactacctgttccctaaaaacctattgaaatttwaaaaaaatttaaataaaaataaaataaaaaaatagaatggctttaatraaacacctcacaatgtcaagtgctgatgaagatatggaacaactagaactctcatacactgctagaggggctgcagatggtatagccatagccaccgtgggaaacagtctggctgatgcagagacagttaaatatataacccataggattcagcagtttcctctctttgtacttacccaagagaaatgaaaacttatattyacatcaaaatctgtacgtgaatgttcatagcagttctacttataattgccaaaaacaattaaaatgcctttcagttttataaatgaataaacagtggttcatccattcagtagaatactcagcattaaaaaaaaggaattaaaaaacccattaaaacagcatttagaaaaagaatgtgcaaagaagccaaatatttactcttgtgttaacataatagtcaattgcagaaagtacagccaaatagaggccacactggagaaataggaagataaatttagtctccctacagtgcttttagaagtttaaaacacagccctaaaactctttttttttttttttttttttactttttttttagagacagcgtctcgctctgtcgcctaggctggggtgcagtagctcactgcagcctcgaactcatgggctcatgcaatcctgcctcagcctaccaagtagctgaacctcagctatgtgccactatgcctggctaatttttataaaaaaatttttttagaggcaggggtcttactgtgttacccaggctggtctctaactcctagccttaagtgatcctttcaccttggcctgctaaagggctggattacagatgtgagccactgcacccagccaaacttagttttttggcttttttttttttttaaagcagcttgcaatttaaaagatacaatttcttttcaatcaattgtgagtacttttgtgagccagcagcactaggccacagtggagccagtctgaccttttattcggcttccagggcagcaacactcttgtttatgcagctaaaagggtattacccttcctgatacagaagaaaaatgcaagtcttggaatgctaggctgcacatactcctgtataacctgaaagaagttttctctgaatgaagaaaaacaccaaatataaatgtgcctcagttttttcatgtttaacatgaagatgatactacctacttcagacagtggtgaggtttagagataatcatgtaaactgattagaaatgtgcctggcacaaagtaagtatgcaattcatcttaactattattattaatccaaaatgtactataagtgttcaggcatccagtaaaatctaatcaccacattagaaaaattgcatgagaaaattcattcagtttttcaatttgctttcaccttctgacttgggttagaagagagtcagggaaatgatggtttctttagttcccaagcaggtgggaaaggaggaggccccgtatgtcagggtgatgggcagggaaaccacagaaaggagccgtgggatgtgtgacaaggctgatggcaaaggctgaagtattaaggattggaggatcaaggatttgtggggtcagtgcttcactgggacgttctcttgttccagggccatttatccagttatcttccatttttaattaatatttgctgctaatatcagtgtttctctgttctgcaaacatacagctcttttgaaagttttctgtgatatttaatattacgtaactttggagaacccagatgtggaaaactcccctaccatgttccttcctcttgtttttgtatgtatattctccctgttttgggtgtggggaggggaaggaggatgccaaagtatgtacgggtacatgatattctgggtaattttctaagatattatttgtaatacttactgtaataataatgtatcctgaaattttttcaaatttttaaattaatgtacatacaaaatggtatataactgttttgaggtgacataatctattgcactattgattaaactatcataaatcaataatgcttttaagccctagatcctaaaatttgagaataatttgtagaatcataattcttttttttaaggtaaaagagttgtatttctttttttaatatatatattttttattatacttttaagttctagggtacatgtgcacaacatgcaggtttgttacatatgtatacatgtgccatgttggtgtgttgcacccattaactcgtcatttacattaggtatatctcctaaggctacccctcccccctccccccaccccacaacaggccctggtgtgtgatgttccccttcctgtgtccaagtgttctcattgttcaattcttacctgtgagtgagaagatgcgatgtttggttttttgtccttgccatagtttgctgagaatgatggtttccatcttcatccatgtccctacaaaggacatgaactcatcatttttttatggctgcatagtattccatgctgtatatgtgccacattttcttaatccagtctatcattgttggacatttgggttggttccaagtctttgctattgtgagtagtgccgcaataaacatatgtgtgcatgtgtctttatagcagcatgatttacaatcctttgtgtatatacccagtaatgggatggctgggtcaaatggtatttctagttctagatccctgaggaatcaccacactatcttccacaatggttgaactagtttacagtcccaccaacagtgtaaaagtgttcctatttctccacatcctctccagcacctgttgtttcctgactttttaatgatcgccattctaactggcatgagatgatatctcattgtggttttggtttgcatttctctaatggccagtgatgatgagcattttttcatgtgtctgttggctgcataaacgtcttcttttgagaaatgtctgttcatatccttcgcccacttgttgatggggttgtttgtttttttcttgtaaatttgtttgagttctttgtagattctggatattagccctttgtcagatgagtagattgcaaaaattttctcccattctgtaggatgcctgttcactctgatggtagtttcttttgctgtgcagaagctctttagtttaattagatcccatttgtcaattttggcttttgttgccattgcttttggtgttttagacatgaagtccttgcccatgcctatgtcctgaatggtaatgcctaggttttctcctagggtttttatagttttaggtctaacatttaagtctttaatccatcttgaattaagttttgtataaggtgtaaggaagggatccagtttcagctttctacatatgactagccagttttcccagcaccatttgttaaatagggaatcctttccccattgcttgtttttgtcgggtttgtcaaagatcagatagttgtagatgtgtggtattatttctgagggctctgttctgttccattggtctatatctctgttttggtaccagtaccatgctgttttggttgctgtacccttgtagtatagtttgaagtcaggtagcgtgttgcctccagctttgttcttttggcttaggattgacttggcaatgtgggctcttttttggttccatatgaactttaaaatagttttttccaattctgtgaagaaaggcattggtagcttgatggggatggcactgaatctgtaaattaccttgggcagtatggccattttcacaatattgattcttcctacccatgagcatggaatggtcttccatttgtttgcgtcctcttttgtttcactgagcagtggtttgtagttctccttgaagaggtccttcacatcccttgtaagttggattcctagatattttattctctttgaagcaattgtgaatgggagttcactcatgatttggctctctgtctgtgattggtgtataagaatgcttgtgatttttgcacactgattttgtatcctgagcctttgctgaagttgcttatcaacttaaggagattttgggctgagacaatggggttttctaaatatacaatcatgtcatctgcaaacagggacaatttgacttcttctttcctaattgaataccctttatttctttctcttgcctgattgccctggccagaacttccaacactatgttgaataggagtggtgagagagggcatccctgtcttgtgccggttttcaaagggaatgcttccagtttttgcccattcagtatgatattggctgtgggtttgtcataaatagctcattattttgagatatgtcccatcaatacctaatttattgagagtttttagcatgaagggctgttgaattttgttgaaggccttttctgcatctattgagataatcatgtggtttttatctttggttctgtttatatgctggattacgtttattggtttgcatatgttgaaccagccttgcatcccagggatgaagcccacttgatcatagtggataagctttttgatgtgctgctggattcggtttgccagtattttattgaggatatttgcattgatgttcatcagggatattggtctaaaattctctttttttgttgcatctctgccaggctttggtatcaggatgatgctggcctcatacaataagttagggaggattccctctttttctattgattggaataatttcagaaggaatggtaccagttcctccttgtacctctggtagaattcggctgtgaatccatttggtcctggatttttttttggttggtaagctgttaattattgcctcaatttcagagcctgttattggtctattcagagattcaacttcttcctggtttagacttgggagggtgtatgtgtccaggaatttatccatttaatctagattttctaatttatttgcgtagaggtgtttatagtattctctgatggtagtttgtatttctgtgggattgatggtgatatccccttcatgattttttattgcatctgtttgattcttctctcttttcttctttaatagtcttgctagtggtctattgatgattttgttgattttttcaaaaaaccagctcctggattcattgactttttgaagggttttttgtgtctctatctccttcagttctgstctgatcttagttatttcttgccttctgctagcttttgaatgtgtttgctcttgcttctctagttctgttaattgtgatgttagggtgtcaattttagatctttcctgctttctcttgtgggcatttagtgctataaatttccctctacacactgctttaaatgtgtcccagagattctggtatgttgtgtcttcattctcattgctttcaaagaacttctttatttctgccttcatttcattatgtacccagttgtcattcaggagcatattgttcagtttccatgtagttgagcagttttgaatgagtttcttaatcctgagttctagtatggttgcactgtggtctgagagacagtttgttattatttctgttcttttacatttgctgaggagtgctttacttccaactatgtggtcagttttggcataggtgcggtgtggttctgagaagaacrtatattctgttgatttggggtagagagttctgtagatgtctattaggtcctcttggtgcagagctgaattcaattcctggatatccttgttaactttctgtctcgttgatctgtctaatgttgacagtggggtgttaaagtctcccattattattgtgtgggagtctaagtctctttgtaggtctctaaggacttgctttatgaatctgggtgctcctgtattgggtgcgtatatatttaggatagttagctcttcttgttgaattgatccctttaccattatgtaatggccttctttgtctcttttgatctttgttggtttaaagtctgttttatcagagactaggattgcaacccctgcatttttttgttttccatttgcttggtagatcttcctctatccctttattttgagcctacgtgcgtctctgcacatgagatgggtctcctgaatacagcacactgatgggtcttgactctttatccaatttgccagtctgtgtcttttaattggagcatttagtccatttacatttaaggttaatattgttatgtgtgaatttgatcctgtcatgatgttagctggttgtttgctcattagttgatgcagtttcttcctagcatcgatggtctttacaacttggcatgtttttgcagtggctggtactggttgttcctttccatgtttagtgcttccttcaggagctcttttagggaaggcctggtggtgacaaaatctctcggcatttgcttgtccgtaaaggattttatttctccttcacttatgaagcttaatttggctggatatgaaattctgggttgaaaattcttttctttaagaatgttgaatattggcccccactcttttctggcttgtagagtttctgccaggagatccactgttagtctgatgggcttccctttgtgggtaacccgatctttctctctggctgcccttaatattttttccttcatttcaaccttggtgaatctgacaattatgtgtcttggagttgctcttctcgaggagtatctttgtggcgttctctgtatttcctgaatttgaatgttgtcctgccttgcttggttggggaagttctcctggataatatcctaaagagtgttttccaacttggttccattgtccctgtcactttcaggtacaccaatcagacgtagatttggtcttttcacatagtcccatgtttcttggaagctttgttcatttctttttattcttttttctctaaacttttcgcttcatttcattcatttgatcttcaatcgctgataccctttcttccagttgatygaatcagttgctgaagcttgtgcattcatcatgtagttctcgtgccgtggttttcagctccatcaggtcctttaaggacttctctgcattggttattctagttagccatttgtctaatcttttttcaaggtttttaacttctttgcgatgggttcgaacttcctcctttagcttggagaagtttgatcctctgtagccttcttctctcaaatcatcagtcattctccatccagctttgttccattgctggtgaggagctgcgttcctttggaggaggagaggtgctgtgatttttagaattttcagtttttctgttctggtttttccccatctttgtggttttatctacctttggtctttaatgatggtgacatacagatggggttttggtgtggatgtcctttctgtttgttagttttccttttaacagtcaggaccctcagctgcaggtctgttggagtttgctggaggtccactccagaccctgtttgcctgggtatcagcagcggaggctgcagaacagcgaatattgctgaacagcaaatgttgctgtctgatcgttcctctggaggttttgtctcagaggggtacccggccctgtgaggtgtcagtctgcccctactggggagtgcctcccagaaaggcaactcgggggtcagggacccacttgaggaggcagtctgtccgttctcagatcttaaactccatgctgggaggaccactactctcttcaaagctgtcagacagggacatttaagtctgcagaagattctgctaccttttgtttggctatgccctgcccccacaggtggagtctacagaggcaggcaggcctccttgagctgtggtggtctccacgcagttccagcttcctggccgctttgttcacctactcaagcctcagcaatggcgggtgcccctccccataattcttatccttgcatttgaaaatcaagctcatgcttctccaaattatcttctaaaaattaattcatgtgaaaattgtgttctaggaattaattttacrcaagtctaagtttatatattcattttatttatgaaagcmtaaagataatggcattaatcatttgaaagagaacattggaacacttttaaaaatgtcttggaagaacttttctagaaagaacataaaatgtcacatgtttttaatagccatcttaaaatattcttgtttagctctgcagtggaggatcagtgactgaccttgtgaaaggatttctgaagaggggtgaaagaatgagtgagcctctaattgcctatattttacatgaagcactaatggtaaggcaatttaaattgtatgtgcattaattatgaagcagttccagttaaaaaatgtagatcctatttttagaaaaatgtcactagtgatactacattagtatttattgatggaagaatatatgcaaaatctgacatgttcagcatagctaattctttttttccactacaaatttactttcattggaccaacaggatcctgaattctgacctcttaagtgtatttctgagactgtgatagtgatgaaggtagaaaactaataatagggttttttggccattatcttagataggtatatgaaatattttcttccattgaaactcacacatttgtaatacgatatttgctaagaattaaggagcatgctttgattctgtgaatttttatataattcaaagtggaaatgatgttctttgatgtgactaactcaatgtgaaacatttgagtgtctgaatgttaattttattatgtgtttcctattgattttgtacaggtacatcatctgaaaatttttattgtttgatgcttttgttaagagtcattatatatttcttatcttctagggacttcaacatttgcataacaacaaaactatccacagagatgtgaaaggcaataacattctattgaccackgaaggtggagtgaaactagtagattttggtaagttttgtttaaaatgcatgagttttaactccwtaatgaactagtatgatatgatttgatctttttcgaatggccttcctttctaggtattggaaatagaggaaaaatcagtagtatcttattgaggtaagaagtgcagagataatttggcaaatgagagattcccagaagaaaggrtaacttctttcaagtcagctagtttgtgctcatataacaccagtgtagtaacatgcgtagttgatcctctaaaacagacagcatctcaaatgattactgtaagcctataatgacaatctcatggttcctactagtgattgctttgcaaatggacatatatccaaatccaggattttgagatgtgaggggaaattttcattatcatctgggagtatttcctccctcctaaggagaaacaggaaaagatggtctctttcttcctcaggacccttgcatgtcatacagtgatgccggaaactgctacagttacctgtgactaagatgctctgtcctgagcagaaagccagctctgagaaaggcagagctgagagaggggaagaatgggggtgtttgataacataattgaggcactaagtcaatcaactttggagcctaccttatctctggaccttttgttatgtgaaataataaatttccatatttactaaactttcttgtgagaatggatgacagtaatcctgaagatgtctcagtatccttcagtcgttattctccttcccttttgcactgtagrtgggtaaggtatccctccttgtgtttctgtaacctgtgtatacttccwtgtttgcatttatcgtatagaattataattatacatttggtctttatagataaagatacttagaaatataggtggacagacagagtctttgagaagtgggactgtgtcttagtctatttcgtagacctaatgctttgagtatagaagtccactgagtgttagttgaatgaatgagtcttccttcattttgcattttggaaactaaagctcagcaagttaatgggttaatttttaaaatttctttaatatctaagtattttggcttagcccaggaatgaatttcagagcatctagagaggaatggatgaatagtgtatcctcaaacatgcatgtgcctatgctttgtttttctcacctgtgcatttgaaaacttctgagcagcagtgaatttgtgaattcctgattaataactggggtgcagctagtctatgtttctggttgaattcagagccttgagcaatctgtctgggttagtgtactaataagggcttctgcttgaaattacaacaaatcattcttcactgcttcataggaggggccattattctctccagaaaataattttgtctaccctgtaagacagactcaaatggagaacttgctatttaacttgggatctcacaattcccttcctctaaaaaatagatacagtaagtatagcatagattgaaaattgttaaaacaagtatcaataaacaactttttagctattaaagaaaaatttggtaaaccagaagctttgagaaatgtaaattcctatgatttcctccaaaataaactagattgaaaacatatacttagataacaaataaggcaaccttttatatatttttgttttgttttgttttgttttttgagatggagtctcactctgtcgcccaggctggagtgcagtggcacgatctcggctcactgcaagctctgcctcctgggttcacaccattctcctgcctgagcctacctagtagctgggactacaggcgcccaccaccatgcctggctaattttttgtattttttaatagagacggggtttcaccatattagccaggatggtctcgatctcctgacctcatgatccacccgtctcggcctcccaaagggctgggattacaggcgtgagccaccgtgcctggcctttatatgatatctttttaaaacatcataaattggagtagttaacaaaatgagagctttggtcttatattatttgatttatagatttttggcaataattagaaaagagggccagttgcttatgaaatgcattcctagtatctgacaccaaaatattattaattacatataagatagtacttataatatttctattctccacagtaagaggacatggattcagtttgcctatggtgattagtaggttgttgtatgaattaaaacctgaggatggtaggggtgtacatttatactgaaaattcttgagggcagaaagaacaagatgtggtaaaccacaacctgcagaatcaaactgaaaatcaatgtcctcattttatttttaaatcaaattttcagagaaagctacagctgggagtaaagggttatagaatcaattttatttgaatctgtcacttcataattatactatcagctcattattgggtactgaagatcttagatagctgtcaggcacctcatactcagaatgtccaaaatggagctgcaccacctcatctgtctagaaatctgctacatataaagagtttcttgtcttagaaagtcgcccacatctactcattgctcaaaacgaaaatcttaagctcatcctcgagtcttcccttgttttcacctcccacttatacaacttagacacaaaacttgtctctctgttagatatcgccaaattccatctttactgctcctgccctagttctagccctcatctcttgcctgggctcctgcagttatactttactgaactccctgcatcctaatctccttcctttccttccaatcctttctccacactgcagccagggggatcctttcaaaaaacacatctgatcctgcgactaccttgttcagtatctccatcccttggggaaggcttttccttatgatcctccgtgctggaacagagtaagcaactaatgagtaataacttctttatatctcttggtgctaatcaggtaccctctcttcctattacctattagccaggtccacatctttcactaccttaaatgtgccataatcttwcccagtcagagctcttacacttgtaacttggaaaatacttcgaaatttattgacgtgctttttctttttttcctgcctgataacatgatcttcaccccagtgtgcctgaggcatcactctgtttggcagtgggaaaataatgaacatttattctagaagaaatgcaaattgcaaaaaaaatgattgaggtaacattcagtttttagcattcaaaaataggaatttatagcaaggctatctcctgaggaaagcctatctcctgaggaaaatctgtctaaattgcttaccttctctttagcatatggagagaagttttcagggatacaccacagggtttttttttataagacggggtcattgtggaaagatcaaacagggtgaagcagggcagtgagatgagcttttttttttttgaaacagagtttccctctgtcacccaggctggagtgtaggagatgagcttttaaaaagataatgagggcaggaaggagctcttaccttctgtattagcccrttctcacactgctataaagaactacctgagactgggtaacttataaagaaaagagatttgattgactcacagttccacaggctgtgcatgaggcatggctggggaggcttcaggaaacttacaatcatggcaggagggcaaaggcaaagctggcacatcttactatggtggctggagagagagagtgatgggggaagggctacacacttttaaacaagcacatctcgtgagaactcactatcacgagaacagcaaggggaaatctgcccccatgaaccaatcacctcccaccaggtccctcccccaaattacaatttgatatgacatttgggtggggacacagaascaaatgatgtcaccctcacacttcctaccactctcactcgccattcctgaggaagccactcagaatctgcggcattcctgtctgcggtgagccacatcattgctaacctggaggggcagaatgatcagatagtggaaagactcaagttagcttttccaaacccttagctttagttttccagaaacctgaaagtaattgataatctggctggaaagtttctagaaggggtttttcagaagataaggggggtgggtgtacagtgaggcactgggcagatcccctgggccagctctgctgtgtctaaatgggagtcagccagaactcagagtgttctcagctctaactggagcaaacagacttaatctgcaggaggagccacaggaagtgctctctgcatgagaggaacagaccacaagctccctggaggcagactacggcctgggagcccagtagggcacctagcggctaggcagacaaaagcatatggccccttaaactagaragccaccatgcccaaggaccctctcttttctcctgacacaaggtcttaaaagaaggaggaggggcaggcatggtggttcatgcctataatcccagcactttgaaaggatgaggcaggaggattacttgagcccaggagttagaggccagactgggcaatatagcaagaccctgtctctacaaaaacttattttaaaaaattagtcaagcttggtcacatgtacctgtaaccccagctattcaggaggctgaggtgggaggattgcctgggcccaggagttcgaggctgcagtgagctgtgattgcaccactgcattctagcctgggtggcagagtgagaccctttctgaggagggatgccatctgagaaatggagaaaacacttttatccaagagagactgaaccctatctaaaaggacttatggatttattgaatttaactgagctttatttttcttccagccagtgggcatgagcttggggaaaagccataatagttatagtaaaaacgaagaaattgcaatttctctgtgtatctaagagtagattctgaattttgaccagttacacacatgatactttccctgcatagaaaccttccctctcctctgcactgttatatataaagtttcagtaccacaaaagaaatagcactcgaatataattcaaatataaaattttctttttaattctcagcaaggcaagttacttctatagaaggatgcacccctagagatggagcaatggtgagcgcacacctgcacaagggaggggaaggggttcttatcactgatgcacgtggcccctgctgctgtgtcgttcccctattggctagggttagaccgcacaggctaaactaattctgattggctaaattaaagagagtgatggggtaagtggtttggcaggaaaaatggttatgaccgagcaggtaatcggaataagtcagggtggaccaggtaatcggaatgagtcagggtggaccaggtaatcggaatgagtcagggtggaccaggtaatcggaatgagtcagggtggagcaggtgattgaaatgagtcagggtggaggaggtaattgaaaaaggttgctttatgaggaagttaagtttaaaagtagaaggcaaagaattgaacatactgacatattgattctttgaaaagaaatttagaattcatatctaacagcacccagctaacttctgcttgcccaagttttccccaacgccctgtacttcatttagccaaccagttgtcagacttcactgtaatcatattttatttgagtactttctctgctaagctgtagatttctctggtctatcactttgtcactttgtccctagaaccaggtacagtgctaacattttgaaagtacttaatgaatgaatgaaggagggggaagacttgccatataattatgtgacaatgagaaagtcacacagaatckgcaagggcatcaacctgcacatctacaagtgtgaaaaagtctctgcctcctaagattggttgctgtgaagaataaatgggatgccagaggcaaactacttagtataattgctgatacttcataattcagaaaatctaaactgttaccattattatgagataatattcctacttagcctatagctcagtgctatacacatagtaggtgcttaataaatagttgctaaataatgaaaatctgagtttccaaaagaggtgcctctttatgtttccaaaaaagaaaacagtaaccctctgctagaataaattcagtattactttaaatatgaagctacctaattacactaaaagtaagattcagtttgctaatgctcattatgaatacggcctttaagaaaaacttttagttttttattaagtggggtatacttttacaaaaaatcaccagatacctcagagagcaaaatgacaagtgaggttataaatattattaatgaaatgtattagccattactggtatatgatcagtcaatcaataatatgacttcccaggagatagatcccttcaggcaagtgaactaatgtctgaaaaaaaacaatctttatcttgaatagaaaatgaaagagactaaatttaaaggacagcccttagttcttatttctgcggatttctctctggggaacttcatttctaataggatacttaacatttcaatacaaaagtacagaatgtactttttgtgatttatttagacctcattcttatgacagaatattttatggttttaaatctcttattacccacatgccccattttagaccaaatccccaatgcataatgtaggtcaaagagaagctgtgatttgtttattaataacccactttttagcaccaagtgaggcagtacacccgaacttaaaaattatggagtgcccttcaatccttcctttctttatgaataatttagaacaaaagccattgggtgggacaagcaagcatgggagtccaggtgcagctcagtaggcagtttggagtctgagaggggtaaggaaggtatctgctggcagggagtgttgggtccccaagtgggatgagaagcacatccatgtagggtgatggggatgatcctgtatggggacgaacttcctgtagatgagaaaggtatctgcatagggatcagggtggagagaagagactggttacctaaaggaggcctgatacagtcaggagatatactgaggacaacgggcggcaggtttcttactgttacagaaaagaattatagtgatgttgggttggaattggaggtatcaatgtgaactcaccattttatatatatttaatatctgtttatattaatatatataaacatataaaaataaatataatgtgaatgcatgtgagtgtgtgtgtacatattacctagctaattccactaacagggtattaagagagcacatctagcacctagcttttggtttttaaatgtaattctcaactaaaaggaatcaaggattcttggagaaaggctgattttagggctccatgagatgaccctggaacttactgtgccctccaaataaggaaatactcaaataatgatggagacatgtcagaagcacacagaaaccaacttgaagcaattcttactctctagatctgggacagtttgagcaccaaaatactaatattgctggtaatgatagtaattcactgaatgcaataaaaactccattaatccatactgtcataaatacatacataattaaatgaatggggagaagcaaaagcttttccttacagaagaatgctgatgagtaaagatagaagaaatcgtgtaattttaaaattcatcatttggtaaccatctatgtaataattaattcatccaaaaatttcaatggctgctaaaactagtgagttaagttttgattagmaatagggtagcttaattgtttcgaaatatctctccacaaaatactaattaattacaaaagaaagagggaaagattacaggggagaagactggcagacacaaccattaatcaagtgctcaaagcaaacataactagtaatgagatgaatgcaaaccacacagcacctgagaggatgcaatgagaagacctcagcatcacttctgtgatgttcctgccaaaaataaaatcgtgagggaatatacaacaaacycaaattcaggaacagtctatagaacaactggcctgaaatcttaaaaaaaaatgttaagttcatgaaattcaagaaaagattgaggaactcctccagattgaaggagattagaaacttgacaactaaaarcaccacataatcccggattagatcattttgttttaaaggacatatttaggacagttgatgaaatttgaatgggctctgtagagtagatgatagaagtgtatcagcattaaaattcctgattttgaaggttgtgtaaggggaatatccttgtttgtggcaattacaaacaaatatataggagtgaaggggcattatgtagcccaccttactctcagatggttcaggaawaaaagtactttgtagttttcttgccaacttttctctaaggttgaaattatgtgtatatgtgtatatatatgtayatatgtaatacatattagttgaatgttatgaatcttgaaaatttgagagctagtgctttatagagtgaaataatacactgaaaaagaaactagggggaaaccattttaaaagctggcagagttttcaaatgctcataactatataaaacattaatatattactcatccagaatacatttttgtactttgaggaggcgacttttaccttatttgaaaggcaaggtctttataattattatgtaaagttgaaccatgaataagtggactctttattttagagctttatgattcaagcagaacctgtgggctcaggagttccaaaactgactatttttcaaagtcgaattaagctatttaacattatagaaactgctgtaggtttcagtcaacgatcttttagttgtaaggactagatgccccaactagctactgggtacataacgaaatgaaggcagaaataaagatgttctttgaaaccaacgagaacaaagacacaacataccagaatctctgggacacattcaaagcagtgtgtagagggaaatttatagcactaaatgcccacaagagaaagcagaaagatccaaaattgacaccctaacatcacaattaaaagaactagaaaagcaagagccaacacattcaaaagctagcagaaggcaagaaataactaaaatcagagcagaactgaagaaaatagagacacaaaaaacccttcaaaaaactaatgaatccaggagctggttttttgaaaggatcaacaaaattgatagactgctagcaagactaataaagaagaaaagacagaagaatcaaatagatgcaataaaaaatgataaaggggatatcaccaccaatcccacagaaatacaaactaccatcagagaatagtacaaacacctctacgcaaataaactagaaaatctagaagaaatggataaattcctggacacatacaccctcccgagactaaaccaggaagaagttgaatctctgaatagaccaataacaggctctgaaattgtggcaataatcaatagcttaccaaccaaaaagagtccaggaccagatggattcacagccgaattctaccagaggtacaaggaggaactggtaccattccttctgaaactattccaatgaatagaaaaagagggaatcctccctaactcattttatgaggccagcatcatcctgataccaaagccaggcagagacacaaccaaaaaagagaattttagaccaatatccttgatgaacattgatgcaaaaatcctcaataaaatactggcaaaccgaatccagcagcacatcaaaaagcttatccaccatgatcaagtgggcttcatccctgggatgcaaggctggttcaatatacgcaaatcaataaacgtaatccagcatatcaacagaaccgaagacaaaaaccacatgattatctcaacagatgcagaaaaggcctttgacaaaattcaacagcccttcatgctaaaaactctcaataaattagggattgattggacgtgtctcaaaataataagagctatctatgacaaacccacagccaatatcatactgaatgggcaaaaactggaagcattccctttgaaaaccggcacaagacagggatgccctctctcaccactcctattcaacatagtgttggaagttctggccagggcaatcagggaggagaaggaaataaagggtattcagttaggaaaagaggaagtcaaattgtccctgtttgcagatgacatgattgtatatctagaaaaccccatcgtctcagccgaaaatctgcttaagctgataagcaacttcagcaaagtctcaggatacaaaatcaatgtgccaaaatcacaagcattcttatacaccaatcacagacaaacagagagccaaatcatgagtgaactcccattcacagttgcttcaaagagaataaaatacctaggaatccaacttacaagggatgtgaaggacctcttcaaggagaactacaaaccactgctcaaggaaataaaagaggatacaaacaaatggaagaacattccatgctcatgggtaggaagaatcaatatcgtgaaaatggccatactacccaaggtaatttatagattcattgccatccccatcaagctaccaatgactttcttcacagaattggaaaaaactactttacagttcatatggcaccaaaaaagagcctgcatcgctaagtcaatcctaagccaaaagaacaaagctaaaggcatcacactacctgacttcaaactatactacaaggctacagtaacgaaaacagcgtggtactggtaccaaaacacagatatagatcaatggaacagaacagagccctcagaaataacgccgcatatctacaactatctgatctttgacaaacctgagaaaaacaagcaatggggaaaggattccctatttaataaatggtgttgggaaaactggctagtcatatgtagaaagctgaaactggatcccttccttacaccttatacaaaaattaattcaagatggattaaagacttaaccattagacctaaaaccataaaaaccctagaagaaaacctaggcattaccattcaggacataggcatgggcaaggacttcatatctaaaacaccaaaagcaatggcaacaaaagccaaaattgacaaatgggatctaattaaactaaagagcttctgcacagcaaaagaaactaccatcagagtgaacaggcaacctacaaaatgggagaaaattttcgcaacctactcgtctgacaaagggctaatatccagaatctacaatgaacaaatttacaagaaaaaaacaaacaaccccctcaaaaagtgggcgaaggatatgaacagacacttctcaacagaagacatttatgcagccaaaaaacacatgaaaaaatgctcaccatcactggctatcagagaaatgcaaatcaaaaccacaatcagataccatctcacaccagttagaatggcaattgttaaaaagtcaggaaacaacaggtgctggagaggatgtggagaaataggaacactttcacactgttggtgggactgtagactagttcaaccattgtggaagtcagtgtggcgattcctcagggatctagaactagaaataccatttgacccagccatcccattactgggtatatacccaaaggactctaaatcatgctgctataaagacacatgcacacgtatgtttattgcagcactattcacaatagcaaagacttggaaccaacccaaatgtccaacaatgatagactggattaagaaaatgtgacacatatacaccatggaatactatgcagccataaaaaggatgagttcatgtcctttttagggacgtggatgaaattggaaatcatcattctcagtaaactattgcaagaacaaaaaaccaaacaccacatattctcactcataggtgggaattgaacagtgagaacacatggacacaggaaggggaacatcacactctggggactgttgtggggttgggggagggaggagggatagctttaggagatatacctaatgctaaatgatgagttaatgggtgcagcacaccagcaccagcatggcacatgtatacatatgtaactaacctgcayattgtgcacatgtaccctaaaacttaaagtataataataataaaataaatttttwaaaaaaggccaaatacaaaaagcagtctcacaaatgagagagcaggcccaaggggactggaactgggacaggtaaktgaaaggcaagagctgagactgcttgctgcctcctactctctcattggagaaacagtctcttctccctactcctcaggtgygggtgtgcagagcaacctctggagtttttatgttgctatcaagttcactcaaaaacagaagccttaacctcccttgtctgacctcaacacagctgtagaaattttawtaagagctaccaagtgtgcttctctatgatgtgataacttcaggtaaaccaagaggactttacttatatttttaagaatgacttctttgcttctcagtccttctcattgtaaaacaagtrttttggactagaactaaaatawcttagtctgcagctctaaaattttaatctctgaagaactttaagttaatagaaattgtggtgggcaggagagaggacaatggagcaggtaaatggggcaaaaaggaaatggaaaaataagacaaggtatcagtgatgatagtgtaccatgaatgagaagtatgctgtatactctctacagctaaggtccagtactggacatatgtacacatgtacatagtcatccaggattgaatgatgcagacagagctaggtgcatagttcatatgtccaaagccaagaagaatgcagcaaacagtgtgatgttgagatctttaaagaaagccatataattatctttattatcagatatgaactaagttttaaagaaaggaaaagatctagatccaggaagactggagaggatggacttccaagagaaatcacatgaatattgattggaaaggtggttggagtgagccagttaccttgagttgctgtagagactcattgaatcttaaagctagaaagaagcttaaatatcatttggtataaagtacaggaacctcaaaagattttttaaccttgttatatgcaaaatgtctgaatatgaatttcttgatgtgaaagtatatagcatccatgagatagactaagtagttgtttttttttttttttttttttgttttgtttttttatggagtcttgctctgttgcccaggctggagcgcagaggcgcaatttcggctcactgcaacctccgcctcctggattcaagcgattcttctgcctcagcctcccaaatagttgggactacaggcacacaccaccacactcggctgatttttgtatttttagtagagacgaggtttcaccatattggccaggctggtctcgaactcctgacctcgcgatccacctgcctcagcctcccaaagtgctgggattacaggcatgagccaccgcaccccgccaagattcactaagtagtttttaatccaaaagtaataaagatcacttatttattccaatcccctaaattaaacaatgagaaaacaagagcctacagaagcaaaatgacttgctgaagggcacactttaatattccatttgctagagatttacaatggttttgaaatatactaactgaagagttttgcatatatttgttaaatactatttaattaaataagattgtcaaatatagcattctgtttactttgtggattgtttttgtttttgagacagcatctcactctgtcacccaagttggagagcagtggtgcaatctttcggctcactgcgacctctgcctccctggctcacaggtctatttacatattaaagatgattattcctggcccagggtagtggctcacacttgtaatgccagcactttgggaggcagatgtgtgtgaatcgcttgagccaacgagttcaagaccagcctgggcaacatgatgaaaccctgtctctactaaaaatacaaaataaaagtcagccgggtgtggtagtgtgcgcctgtagtgccaactacttgggagactgagatggaagaatcacctgaacccaggaaattgaggatgcagtgagctgtgattgcaccactgcattctagcctgggcgatggaagtgagaccatgtctaaaaaagtttaaaaaaaaagaaaattatgatttatatacttagtttacattatttaaaaatcatttcaacaaactagaaaacatagaggaaatggacacattcctgtaagcatacaaccctcctagattgaatcaggaagtaatggaaaccttaaaccaataacaaacagcaagattgaactagtaatttaaaaactgtcaacaaaaaaagtccaggaccagacctattcactgaattctatcagacattcaaagaagaatggatgccaatcccactgaaactattccaaaagactgagaaagaaggattcctccctaaatcattctatgaagctagtatcaccctgataccaaaagctggaaaggacacaactacagaccaatttccctgatgaacattgatgcaaaaatcctcaaccaaatactagctaactgaatccaacagcacgtcaagaagataattcatcataagcaagtggttttcatcccagggatgcagggatagtttaacatatacaagtcaataactgtaatgaatcacataaatagaattaaaacccaaaaccatatgatcatctcaatagatgcagaaaaagcatttaacagaatccatcatccctttatgataaaaactctcaacaaactaggcatggaaggcacctatctcaaaataataaaaaccgtctatgacaaacacacagccaccatcatactgaatggggaaaagttgaaagctttccccctgaacaggaacaagacaagtaggcccactttcaccacccctattcaacatagttctggaagtacagagcaattaagcaagagaagaaataaaggacatccaaattggaaaagrggaagtcaaacctggctgtttgcaaatgatatgattgtatacctagaaaatcctaaagactcctccaaaaaactcttagatttgataaactaattcagtcaagtcttaggttacaaaatcaatatacacaaatcagtagccctgctataccccaaaacgaccaagctgagaatcaaatcgaggactcaatccttttacaatagctgcaaacaaaataaaaatactcaggaatatacttaactgaacaggtgaaagatctctacaaggagaactacaaaacactgccaaaagaaatcataggtgacacaaacaaatggaaatgtatcccatcctcatggattggaagaatcaatattgtgagaatgaccatactgcctgaagcaatctacacattcaatgccattcccatcaaaataccaatattatttttcacagaattagaaaaaaatgattctaaaattaatatggaacccaaaagagcccaaatagccaaagcaatcctaagcaaaaaacaaaacaatacaaaaaaactgaacaaaaacaaaaaacaaatcaggaggcatcacattactggacttcaaattatactacaaggctgtaattaccaaaacagcatggtacaggtataaaagtaggcacatagaccaatggaacagaatagagaacccagaaataaagccaaatacgtacagccaactgatctttgacaaagcatacaaaaacataaattaggaaatagataccctatttaataaatgatgctggcaaaactggcaagccacatgtagaagaatgaaactggaactctatctctcaccttatacaaaaagcaactcacgatggatcaaagacttaaatataacacctgaacctattaaaaattctaggagacaacattggagaaacttttctagacatcagcctaggcaaagaattcatgactaagaccccaaaagcaaatgcaacaaaaacaaagataaataaatgggacctaattaactaaaaatcttctgcacagcagaataaataatcaacggaataaacagacaaaccaaagaatgggagacaatatttggaatctatgcatccaacaaaggattaatatcctgaatctacaaggaactcaaattaccaataaaaaaaaagtccattaaaaagtgggcaaaggacatgaatagacatttctcaaaagaaaatatatgaagaccaacaaacatgaaaaactgttcaacatcattaatcatcagggaaatgcaaattaaaaccacaatgagatatactaccataatcctgcaagaatggccattactaaaaagtgtgaatacaatagatgttggcagggatatggggaaaagggaatacttacacgctgctggtgaaaatgtaaattagtacaacctytatggaaaatagtatggagactccttaaagagctattaataaaagtagatctaccatttgatccagcaattccactrctggatatctacccaaaggaaaagaagtcattatatgaaaaagayacttgtacttgtttgtttatagcagcactattcacaatttcaaagatgtgggaccaacctaagtgcccatcaactaatgaatgtataaagaaaatgttgcatgtatacaccatggartactactcagccattaaaaggrataaaataatgtcttttgtaacaacttggatggagctggaggccattatgctaagtgaaatatcacaggagtagagaaccaaaaaccatatattatcacttrtaagtgggagctaagctgtgagtatgtattacatacatgtgtgatgtaatggactttagagactcagaagagagtgagcgggagtggggctagggataaaaaaactacctcttaggtacagcatacgccactagggtaatgggtgcactaaagtctcagaatctaccactrtataattcattcatgtaacaaataaacacatgtacatcaaaagttattgaaataaaaaaataaataaaaactattttaagcgaagagttgtctaaccaatgtggaagtcttaggccttttaaaaatgtcaactgtagaactaggttttaaacttcatataactttcagaaatgggagagcaaaacttttgcttgttactgcatgccaatataaaagtcttatttaactttaaaaaaatccaccaatttaaatattaatctgatttcaaaatattaatctgatttcaaaaataccttcacagaaatatccagaatatagtcttaccaaatactgtttgacttatgcaataggaaatggggtggctgtacagtcatggaacagtctaggaagcattgttggatgacctaaaatagccatggccctcccaagttkacacataaaattaactatcacagtgtcttaacctcatcaacaaaataataatgttagatggtataatacaatttatgacccctttatgttgacaaaattctatatttttatagtttcagttctcattcmtacagtattttgttattaacaatgacaaaaactatgcttttctctctgctctattgagatgtcaagggttatagcaaattgagttcccagaagttgtctggtctatttgagccacaatagaaaacacatatttgatgtttctgctgtctttctaagatcctaagagttttcttgactacaagaataaagcctgcatgtttctatccctagaaatagcacttatgcgatagggaatggagttgctgtacagccatggaatagcccaggaagccttgttggacagaactaaaatagcctgaaaattccctagcaaagcaaacgactgaagaagcattaacataaacctaaacctctatamtgttcctgtggctttgacttttaatagattattgctctttctattagcctgttttctgttcagccttggtcctttttgacctctttttcctttctgtatcttctcattataccaacattctgcctggaattttccacccatcagcagcttctctcttgagatgattatgtaactgtttatcttggtgacttattcctttagttactctctagacaagatgattttcctaatcttctttacttcctagggctcctgaacccatattttggatccctgttgcctttaaaagtgatttatgtcaatcattttaatagaattttgcatttttctatcttagctatttttcttgtgggaatttacactaagtaaaaatatcatttgtcctcagaagagtgacttttctttccagcttaagtttactaacctgaaaatgagcaagttagaattcatgaccattaagttatcttctagctgtgaagctagttttgtgttagtttaatgatcttgatgtttaacaggcattgcatagcactcaaaaaacatgaaatttagtaaattccttcctctgtcacttgttcatagttgggcatgtgtcctgtttttaatgttacactcctcactcttctgtctaagtatatttccaatactgaaacacccatttggttgcatatggccgttgaatttcatggtaaaagtcaaatgccatcttggagaaataaaatatatttccattttaaatctcctttagtacctttcctctacttggcttttaagataagcaaccaaagcctaaaattaatgtgactttggggaggcacttttcaaagcagggaaatcaggtagtaaaagcccatgatttgggtttaacccatcaagtccagagcaaggtgaagggtaggagctctgtacagtcagataaccaggaccccttgtgtgaggagcaggagtgtgaaaatggagaaaagaaactgtactcctaattctcttgaaggtcagttatgagtgtatctaacaaggtgcaattaatggaatgacatgactgaaatatttgattatacctctttactgtagctcttcagtctgtaatctctctaaaggaagagaactcgttctgttaatgatgttggtttaaatagatatagttaatttgaaacttccagtcagataaggtgtgatttgcccagggttggtagatggaaaataattttatgaagattcacaagtcacctactatgtgcataacaccatataggacattctcaaactcactggaatttgttagtgggcagggacaggaagagggcagggaggaagcacgccattcaaataacaattacatgacaaaatatgtaaaatcgtttacaatgtagaagatagaaagaaatagggatcagtataattggagcagattaaaagccagcatgggggaattaagacttgaaatggggctttaggaaggagcaggatttggagttgagaaagagaaagtaggagcaccattctggtttttggctctgcagaaatcctgatttaggatcctttaatgtgacactaggtccactggcaggtttgaggaaatggaattttaatattagtttgcaaaaaagattatagcaattgaaagctctttatatgagtaattaatgcaaaaaagtacatcttgtctcttcctctaggtgtgtctgcacagctcaccagtayccggcaccgtcggaacacatccgtaggaacaccgttttggatggctcctgaggtcagatagagttttgaggcagacaaacgtaatagctgatcctgtttgactttcctttttatgtgtactctatctctgtaagcattttggaatataacagaagaaactctcagttgtgttattttcatgtgagaattttgcatgtgtgaggaggcacctgggaggtggtcaataaatgggctgtgaatgaacacgagtcaatgaaagagggaatgagtaaaccagatgatgtaaagagaaactacttccaggtttgatttttcattaaatttaggtgtttagcatgtatctgtactaatgatatttacattatcttttaaaattatagtagaaatataatattatcggaacccctagcctttgtgggatcagattcaggtccattaacccatatggcaggttcctgtgttgagtcactctgcctgggggctatgctcagctttaataaattctttacatcattacctttgggaggttgcagataaactgctmaaatagttgagggaaaaagttttcaagagtcatcttctccccccatcactattaatgattttaatcttttaaattatgtttatcacttatgaaggacccttatttttgaagactctctctacaactgttggggaaagcgctgctatttatctccagttttctagggagtgaagggaggagaagtaattaatatactatattaatattttcaaatcttataattaaatttgaggattaaaagctggtatgctgtttttatttgaatacttgtttaattattacttgcaaaacaagttaaaatgtaaacttaatacaaaatatggacagagaatgaagtattttaagaaacttaaaaaaatccacaatggattaaaaaaatttttttaccatggagcatatcttagagtaaaaatataaagtatagtcatagaagcaaaaacaaaaattgaataggagaatctcaaaggagagtttctttagagtttgttctgatakattactagtgtttttaaaacttaccaaaaaattacaaaaatgagaagttaataagaacctagttataataccaaatattgcattttgtttgcatatattaatataataataaataatattacatataatatcattatataattaatatcctagctttatgggttttgtatgtttatttattataacaagccattattcaatatttaaatttccatttagtaaaaacacttattaatatgcagttactagacagtaatttttctgatgtcagttttattattaataaacctatagtagcacagtagggcttgaaagttctttctggcttagcaaactaatggatataataaacatgaaaaaaggttcactacagtttttttcaagctgtcatggaaatacatgtttgagattttgttcatattatattcatctctctgtaataagtattttctaaccttgaagaacatattttaaataatcagctttctagttaatcaagatattccatatctaccactctatggtattaatagcagatttctaagaattagaaagcaataaggtgaacaaatataaatatattcaccataatggcatagaagtatttcagtgtttttagagcccaggaggcaaggttgttcaaatcaattatcacttgaaaagtgaaattcttgattggcatgtttaaattaaattctatatcaaaagtagcatttgctggttacataaagacatcctctgccaggatgaaggtaacaagggaattagcgactgtagtaggtgactgtacaacttatcatacaaaccaggacaccctggagagcgaaagggggtgatatttattatgattctaggactacaagcattaaacaagaatgtctaaggcaaactgggacatagattcacctgagcctatatgggtagatatcctctgaccacacatgtaaattcatgaaataatgtattatcctgaaaaataattttccttaggaaaaaaatgatggggcaaaagacattatttttacactctagcaaacaaagttatattagacaacagaatgagaaattcgtatgaatgcatttttgaatttttaacagctttataaaggtataactatagaattaggtcatttaacacatacaatattctgatttttaatgtatattcacagggctgtgcaatcatcatcacaatcatcacaaacgtttttgctccccctcaaagaaacctagtactcattaacattcactcctcatctttgcctaaactcycctactctaagcaaccattaatctattttctgtctctgtggactggccttttctggttattctatttatttatttatttatttatttatttatttattttttcctgagacggagtctcgctctgtcccccaggctggagtgcagtggcgcaatctcrgctcactgcaagctccgcttcctgggttcacgccattctcctgcctcagcctcccgagtagctgggactacaggcgcctgccaacacgcctggctaattttttatatttttagtagagactggaactacaggcaactgccaccacgcctggctaattttttatatttttagtagagatggagtttcaccatgttagccaggatggtctcgatctactgaccttgtgatccgcctgtcttggcctcccaaagtgctgggattacaggcgtgagccactgtacctggcctgggtattttaaataaattgagtcatacaatatatggccctgtgtctggcttcttttacctagtgtaatgttttcagggttcatccatgtagaagcatgtattaatgcatcacttatttttagagttgaataatattccattgtatgtatagaccacattatgtttatccatttgtcagttgatgaacatttgggtgtttatcactttttgttattatgagcaatattcctatgaatatttgccacatgaatttttaatgtaaaacttaggactttactgtttccctcagtacttcaggctgtgctctctgatttcagcagttcactctcatgtgatattaaaaatactttcatagaaaaggttaacaagcactgtgtatgatgatgtcccatcaaactaactcttaagttgagaaactattctgtctttatatatagacatatatatatgcacatatatgcacatgcataatttattattgtccttcaggtacttagaaatgaattggttaatggtcttcttatttgcccataaactcgccatccacgccagagccagaatattaccaatagcatgcattggcctctatcycttcctctatcccaactccttgcctcctctcaagagtgtctgttgcccgatatgttgtgtttatcattgccttctttttactttttaatcacactgatatgcttataactaaactgtttcctgtcattgccattagtgtcaggtattaataaagatttatttatgaagtagtcacctttcctggatgacatgggtgtaaatcttaccaactgaattctagtgtgcccacacatggattttttaaatgtgttaagcctgatgttaagtgaagtcagaaggtgagatatcattcctaaaagggccttagatttttcactttatatatcattttacagtactgtatttaaatgacacaattctacatctgccatcattctaaaaatatcttttattttttcttgtgggttggcatgtacaaaacataaaattttaaaaatgcaaaaaatggttcttaaaatgtaaagttgaatttcctttttgtgtttattgatgttaataattaccattcacaatcaatctgcatttgtacttacacatttagaactaaattgggaagtaatcaatgcaataatttctctatctaatacaatcttataaaattacaaaaacaaattcctcttttttccttgactctcaattacatctttcgattactgacatgttttaaaactggttgcagttttacaatttagggtggccccagataggctgttggtaaaaccacatcaaggtttatttttatttagttttcttttattagtggcttaaaccttttgcattcctccaaacttgtcttattcctcccttaggtagccttgccttctagttgccagtagagaccaaggccatctaactagacagccctcaagcatatttacctttatttcctccacttttaattcttcaaaaacatagccttcatctttgcccattccctcaatagacatttattgagtgactaccactgcccaatctttagctgtgcatttgatcccatccctttccatttgggacacgatttctttcctctttttgttccatattttcaaaaatatttttcataggcttcttcyyttatattttaaacctcctaaggtattatctgttcccagaacaaaaatactactaccaataataatttgatcttttattctcctcctaagttactgccttcgtctttacttatagctatcaaacttcaccagtttaaatacttaatgctttgttctaagtattttattacatgcttgttaaagtcacaaatttyrcctttygatggtgtggttttctactaggtgattgcatgtgaacagcaattgrataccacttatgaygccagatgtgacacttggtccctgggtatcacggcyattgagctgggtgatggagatcctccactagctgaccttcatcccatgagagcactcttcaaaataccaaggtcagatgactaacattggrtccagtatctgcagcccgatttacttcctccagccaccaagtgttcatcatgctcttcatggagacgttcagatatattccmacaagttgggagcagaagatcctggaatattattctgcttcttctgagacattgtatttgttcagtagttgcatttccctggtctaagtaaaagagctttctcttgataatcagtgtgtctttctctcttttgctaggatttgatttcagaaaatagcagttcctcccaccctttatccattccccaatgagtcagtgaggcatcagagtccatagcctgtgcaagtgttttgctttgctttacctaccaatctagtaattttttactacttgctaagatttccctttgttcagaactttaaaataatattattaagaaaattatatataaaatttatccagaaaataatggttttaaacatgttagtattttgaatatgttaatataaaacaataaatttagaagaataacctcttttggtgccatgaaagcacttgactatttatgtggccccccactccttcatgtgtgtttcaacagattttcccctactatcctataaactaatttctttaaacactattttctatgagtggtggttagtcccttgatgtttcagataactaatgtgaaaagactgcctatatttattaaaggtgttatttttaaatatctttttaaggattttgccttaattataatgcagtgcacagccagagcctgtggtgacagggttccaaaacattagaatatttggcatctaactaaattattataagactaaaacatttgaattcatttttaattttgcctttgaatttcttgtcctatctagatgttccaaattataataccttggctatatatcatcctttacatactgcttattttgttaagtggagaaacaacattatggaaaagaatggaaaacctctatactaaatccaagacatttcattaattttgaagaaagcaggaaaaaaatctgtagtttctaattcctattgtcattcagtatgtaaggtgaagttctgtactgccttagctgttttaactgtggattaaaccatcatatttagtctgatgttattactcttgatgataatgccacatgaaggaaggatgacactgttgatagatattgtacctaggtaacaggcaatgtgcaaagtaattctagaaactgcatcatcttagttatttcttaattatgtctaccagcagtggaattccaagaatactgactatggtaatatggagaaaaagggaatctgaaaagctacccagttctgagtgttctgaaataatccaaactttgttattcaaagcaagccaataaatctcataaaaggaaattttcaggaggacaagaaacaaaacaacatttctggagaaaagaattacttcttttaatgtgcaaattagcaatcttcaaattgtcctaaggattgtgaaatgagcttagtcctgatctggggtagatgagtagctgcacttttctttaatgagcctgtacaaactgtacattaatttcattataagctatttaaggagtaatgcagaactgaagacaaagtatttccatttcactaatgaaaacaaagagctgttagaattaacataaagcagcacttcagcaaattcaactatcatggttgatcaatgttgcttgattacagagttagatcagcctcattttcaaatgatgttcctttgtattcaacgaatgtgccaaaaaatatatttgttcagcttaaactgaaaggaattaataaaattgttaaagttgtattcacagctttatygctaatagtatttttcagttccttgacactttstaacatgtttcctgccrtgtgtccagtaacaacagaacaacaactcataagggcattctactgtgcgactccctggcacaccttcctccatattccaaacaggccacttctgtgttccctggatgttcctcagagacttcattgggactcataggaaaaaaatacctttccccagtatctattgtttctattctgttaagtattgatgtttccccctagagctaagtaaaagcaagaagactctttaaaagaaaaaataataacagttggaaaaatcaggtcatatgttaagtgcttacagagaaacaaagaccgtgtcattttgtataaagaaagatgagtaatgatttatctgtcttggaattrggaaaagatggaatccttgattacaactggcagaacctaggattgcattagtctatctggctstgcctctcattttacactgactgaccaatatacagaatccarcattgattcttatttttctaggaatccacccccaaaactaaggcagcctgagctatggtcagcagaattcaatgacttcataagcaagtgagtaaaaacagtcttttaaaaaaccaaagatattccctcctgctataactaaatctcctcctatttcttcttatctgttaaacagccccagagatttctattattttcttcaaaggaagcatctatagtgtcttttaaatgttgggtgaatttatcattgctcagataatggccttagggtcatgtttattcactgatcaatagctatgcttctgtggaccctttataatcaatggtcatgttcttctgttcgcctgtgttttgcctatgggtgtcatttcatatgagatgggtctcttagcataccattaggtttcrcttctttatccatctttatcctctgtgccttttaattggggcatttagcctgtttacattcaatgttagtattggcatgtgtggatttgatcctgtcatcatgttgttagctggttgttatacagacttgtttgtgtggctgcttatggtgtcactggtctgtgtacctaagtgtgtttttgtagtggccagtaatggtctttcctttccatatttagcactcccttcaggacctgttataaggcaggcctggttgtagtaaattcccttagcatttgcttgtctgaaaaggatcatatttctcctttgcttatggagttgtagatgcttccacacagatcctcaatggaacttagtgtctgacgtatttcttgcagtttcccctctgagaaacatttcctggtttctgccaagcagttagtattctgtcctggttgctattgatttggtttgtcttcctctagtaacattgccagttgtatttagcttacctgttttgacatctttctctataactagacagtaagcaactctagggcactgaatgtgccttacttgtcactgtaactccagtgtctagcagagtaactccagtgtctagcagagtgcctagtacacattaaagatttgataaagttttgcrtgaataaaataatttcatatgtgcctcttctgaatacatagatacaattactacagatgtcagaaattaatgcattctgttaaattaatggaaaactaagagcacttgttcttattttttagacactggcattcttattccttagcatattttagcattccggggaaatatatttttggttaagctcaatgaaataaattgcctaattatcataataccgattagaaatggcgctactcaagccaaggcatgagtttcatctttttatgctttttttcttttttttttaatatccccaaatgacagcccagttttctcataatcrtagactctgtgaattgcagggttaaaggggtcttggaaagttgtacagcccaagtttatatccagaggttaaatccttctcaaacatgtgcactcagtggctgtccaatctatacttaaatatctccaatcaaaatagtatttcctaatgcagcttattctactttgataagcctcactcttgaaaagttcttccttagactgatctgaaagctgtttctctcttgattccaccaaccaattctagttctcttaccccttgtgaccactgaaaactacttgaatccttcttttacatattcaaagtcagctgtcacagctggttaaactttctacatttgttcaaatgctcctcctgtgctgttgtttcaggtgctctcactagtcctatcctttctcatgaatatgctctggttgaacctatcaagaggtacaacaggcattagtacatctgctgtatgacctcaaaaaatacatattgacatggaatttaaacatccttagctgagtggccttctcaaatgggttagcagttttatcacatagaaagaaacagatcaattgagaagcctttaaaagcatttgtgaagggaaactgcattgtttgttttaattttagataagcattagaactataatgacttcattgtcatttatctgcagctactgacttgtaaaggagactttgcagtggagacattttaattatcactatgcaataatccttactgggagacgacagaagtggtatttagttgaaagttggtatcactgcagcttaatcactcacagwtgtgtgcactttcacaaacatttgtttcatcatattgcagttagctatttttgagagattaaaaattgcaattaatatattttaagcttgggctgagcatttatgaggagcatcactctcgtgtgttagattaatttttaggaatatgaataatagtttcaaaactctaacttatctaataattgcatgttcttttttgccagtgcaggtgcttgactaaagattatgaaaagcgtccaacagtgtcagaacttttacagcataaattcattactcaaattgagggcaaagatgtgatgctacaaaaacaactaacggaattcattggcatccatcaatgcatgggaggcacagaaaagsccaggtaatcaaataatatcttgattccaaaatccagagattattgaaagattttgaacagtttaacaatgtattagtttttaaggtgaataaaatttggaggtaatggggacttacatgaaaagtgaatgtcacctgttgaaatgcctctcaatattggtaaaattacaggcaacactttctttttttttgaaacagagtcttgctctgttgcccaggctggagtgcagaggcacgatctcggctcactgcaacctccacctcccrggttcaagcgattctcctgcctcagcctccctagtagctgggattacaggcccatgccaccatgcctggctaattttttgtatttttagtagagacagggtttcactgtgtagccaggatggtctcgatctcctgaccttgtgatccgcccacctcggcttcccaaagtgctggcattacaggcgtgacaggctgcactttttaaacaactttgtaagaacaaagaatgtaaacttcaaaagatcatttttgtattggtatatgttttcttgtattttctgcttttctataaagtaagatatcttagatttgggatttaaaaaaaccataaaacttgaaagaccttttgacactattatttgttcattttccctggttaaattatatttaaagatcattttaaatatcttcgtacatcctattgggattttaaatagtatataagtttattttaggaaatttaaaagtcacagagaaatatacaatggaaaaataatcaagtataacattttaatctgtaaccttttaatatcttcttcttgttggatatacttttttgttttttttgagacagggtctcactttgtctcctaggctggagtgcagtggtgccatctctgatcactgtagcctcaacctcctgggttcaagtgatcttccttcttcagacccccaagtagctgggactataggcatgtaccaccgtgcctggctgatttttgtatttttagtatagacgaggttctgccatgttgcccaagctggtcttgaactcctgaactcaagtgatccacctgcctcagcctcccaaaagactaggattgcaggcatgagccactgcgcccagccaaacattttaaaacatttttaaaacaaaattggaatagtattatatgtgtcccagagactgtcttctttcactgaatagtgaatatccatataattaaacattcttctaacacaacattttaatggctagatagcattcccttgcctgacaatttaatgattaatttaaataatcccatacattttggtagttactaattgtttttactctctcaagtaactgtgtaatgaacagttgtacattaatctcttactgttttcttaagataaatttctatagatagtactattaagtcaaaaaattattaaagttaaatttataatttcactttattcttgaraatcctatttgtttcatcccagaaacatatcactatttagggagttggaagaagtgaataagacattacttatttgaattcctgttgtgaatatacacatttaattcccatttgtttaatgcctactatgtgccagattttgtattaggacttcattatgttatctcatgtgattttacaacaagtctgaggaaaatattttatgataacccattttcatagctgaaaagaactgaagtttgcagaggttaattaacttgcacaaggctgcacaggaaataaatgacttagcaaggattcaaattctgatcttaaagcccaagctttaattcacaggagtaaatggactaatgattgtggatgatcttgggagataataatccttgcctgtttgagtttacagccttgctgcagagacagacctgatatacctttaatgaggaagaattaagtgacaaaagaaagaagcagatatgtagtttataatgaggagataatcatgggtcatccatgcccatctttttatctttgtgtaaatgtagtttcataatctgctgcaacctcattcttcccgaaacagacaaccaataatcaaaataaacagaaattgaagtgtattcacattgtgtaggatgttcaatgtcaagaactgtgaaggatatgagatattaccctacctgcaagctcacaatttggcttgccacagtttcatgaatgctggtagaagacacaagattcatggatgagagacaaaggactttactactcattgccgagctgacagcatgagtttatgttcacattggttctccttgccccctagagtcctaggggaaatgtggaataggtggatgttgtgtccacacttggcttgcctcataactgggaaatcctgaacttgggaaactccaatcttttaaataggggctgcttgcatgcttgcccaaattttgccttggaggaaacattagctttaccatcctggacaccagataagatttccatctgtcctagtatttttaatttccaaggctgtttgctatacaaacattattgaaaatatagtctggaacaaaagctaatataagacatgcagaaatttgagagacccataaataattgtctctcaatgttcaaacatcgtgagaatggttgcactacacagtatttagattctcatgcttgtgctgtaagtttcagtgattattgggcacagtgttatgctcaacactttctgattctgagayacaagatgtagtcttgtttatcctgttaaaaattcagaatatgctttcagtatgagaattcatgatgtactcagttatggaaatttttcagttgttcttttaaatattgatcctctctcattcttttcactttttatttctgagacataaatgttggaacctcgtattttacctcrcatgtcttgcaatttctctgtcatgtttgtcacccatttatcaatctctgctatattctgaatgaattcttcaaaattgtttcccaattcactaattttctcatagaactgggcctagtctagatatcttatataccaatatttttttcgtgctgatatctattatacatcaacatctatagttttcatttatataatttcttacttggtgagtggttttttgttaatcactcttttcatatctgactttttatgtctggctattcattttttcttttgggggaatgtaattccgctttttttctctttgatcttaaacatactttttaacagtaactctcagatttgcatttcaacacaggtgaattgtcctgattattgagttcatttgtttatttaatatttggtttccttagtctagggttcagaattttagtttgccttctcatcttgagtgrgaggttttttattttggtttttctttccttctgcattctatttggagggttttgcctttgccattatctggtttcaagattccccagggcccattgtgatttgaaggaaattgcagatcyagttgctgagccagtgggaagtagatcttatgtctctccatcctgccatctcaagcacctggctccatataaaaggaagaagcggcagttttttcaatctttttcccaggcaagggaccccacactcagccccattcttcccaccacacctcggtcaaggccttcattgtgaatgtgtgtttcagttcctttacyctccaggcctctttttcccgtttttggtgccagactttgaatcagcctatagtttctgccctcttacctggtgcttttgtttgccctgttaggtcgtctctaatgctcatcttgttttagaaaatatctttgtcttttttactttatttttttaatgtgtaagaaatattttattttttataaacgtatgtttggaagaggtgggagttgaacttgaatctttacccacaacactctcttgaccatggatcttagttcaaaggaggagggaagattatcctgccctcagcattcatattcacactagtcccaaagtgtgagacatactcaggcaaaagaaaacaggcttggttatgccactggcaacacattaaacaaaagctgtcttcttgaagatcacgaaaaataacttgatttgtcacagtttctgatgttggtaaaatggatcaaaaaatctgattgtattaaatcaacatagctaactcaaagctgacatttttctttttgtacatgatgtcatcctttagaactgaaggtatgtgcttggcagtataattttttaaaaattaaagattcagctttaaagaaaatggtcctaatataaattgaatacaaactgaatataaacttccttgttgaggaaaagtggagtgttgggagatactatggaatggatatgagaactttctattttaagtcaagacctgaatataaaacacatcacttttctaacttattcaactattctgaagaattaagaccatgttataatacrctcctcaaaaaacgggaaagcatttttcacacgagttaaaattgacaatgttagaaggcagactaaattgggagaaactctagttataaaatattttgaaagaaaatttttcttatgaatccagtatttttaaacagttgactatctgatttaatgggaatagataaaagtcatttgtaactgaaatgtgctaattcagaattcttgagtaaaacaatacaagcccacttaaaaagtaaagcagtttagcggacaacattrgatggctcagagaatggagaggatgggagagagccaggtttagtcatgaaagccggtggcttcaactgtccttcctcaagaatcaccagctaaaaggctgccactgaaaaccacccacctttctctaacattgcctgcagtgacactagtttcttgaatgctacaacccactcaaaatattcgtaaactgactttgagctttatgttgcttccttgaggttctaagttccatactggaccatctgatcgcccacgtgtaggtcacaggcccacactgtaggtgaaagtaggtggtgaaagacacttggtctcagctcacttccagtttctatgtgagaggcagagtcctacctgctaaccattttgaaatttcttccccacagcagaagggtatttttgagctgctgaagcaacaggtggatagccattatatggaatattttttattctatttcattttattttagagacagggtctcactgttgctcargctggcctcaaaattctgggctcaagtgatcctcctgcatcagcctcctgagtagctgagcttacttgcacaagccaccacatctacctcctgtatggaatatttaacacttcctacagttctttattttatatatcttgaacatttgcctaaaaaattatttaagctatkattgtcattcctcataaataaagaaaatatctaatccagcatctacttaaataacaaattccaaattaaaacttcctttttttgaaagtcatattattaacatgttaacatcttaaatttcttttgtgttttatatacaatgcaaaataactttaatattttacttgatgctctcaatatgccagtggcaattacctttgatatttatagattgttatattttgcatataatttcatagaaataaaaaggattyagtaactcctttttcttactaattttggtttcttagaccaaacatactggctgtatttgtggtgctgttgcaactagtccacttgtcccagcatctatggttttcaggccagaatataaggcatatttgagacatatgtggaaggattaacaaaagaaagacaaactaaaaattgaccatccaatcagtgttaaaagtaccggccaggtgccgtggctcacgcctgtaatcccagcactttgggaggccgaggcgggtggatcacgaggtcaggaattcgagaccagcctggccaacatagtgaaaccccgtctctactaaaaatacaaaaaattagccaggtgtggtggcaggcacctctaatcccagctactcaggaggctgaggcaggagaatcgcttgaaccagggaggcggaggttgcagtgagcccagatcatgccattgcactccagccygggcgacagtgtgagactccatctcaaaaaacaaaaaaacaaaaaaaaaaccaacaaaaaaaacacacagcccaagctgtcaattccttattaggcgtgggactttatgtaatgtaaattcgctcaaataggattttgattttacaaaacagaacaatgaaaagagaaaacaaaaaaataggaagtaataatagggttccttccatgtggcacaatgcatgactccattttatgttctattttctgggcaagataatttttctttaatggctgtgactatgtcatgttgagaattattcaccctttggaacatatacgcttttccttgacacatgagactttaaaaatgctatccccactgcttttctgataactatgttttcaattcctatctccacatgactgaaagatacttcaaactcaacatgtccaaaattaaacttatggtattccatctgtgttctttgttcccttattttattttattttatttatttttttgagacagggtcttgttctgtcacccaggctggagtgcagtggcacgatctcagctcactgcaacccccacctcctgggttccagcgattctcctgcttcagcctcccgagtagctgtgattgcaggagcccgccactgtgcccggctaatttttgtattttgtttttttagtagagatggggtttcaccatctttgccaggctggtctcaaactcctgacctcgtggtccacccgcttcggcctcccaaagtgctgggattacaggcatgagccactacacccagctgttccctttcttattaatggcaccaccacttatctcattatgccaaccagaaatccagggattatcttaacctattcctctctcctacttttcatttttagtccaaaccaggactaaatgtcttacgatcccactcaacaccaattgtgctataatctttgctaccctagaaatcgcggattgagatgacatccatgttgtctcaacatttgttgaggccattgtataaaggtctagataaaggttctacacagaggtctgacagctgaatcctttatagagcctgtgctctggggctaactttttagtaaacaggataagacaagaacataaataaccattatacaaagtttcaatcccatttccactagcaggggcaggagggcttatccaggaggtcgcctttgaatcagcaccatgagggataaactggactgaatcatgtgaagatagagttatcacaagatgaacgttatagcaggagaaacagcctgagcaaaatcataaaatcaaggagataagctgacagaaaggcaagcatttaatcaagctgtaaggggaaaacccagaaataggtttggagaggtatacagagaccagaccactgagagcactgaaagtcagactgagaggtttgacctgtgtccatgacagcccacagtggggagtaccccatcgccagctcttaagccacctgtgtcccttttgttggttctaaaaggtaaattatggatacaccaaggcagactacagcaataattttggattcattttgcttgttcccagtatgaccattttctcatatgtttctttttaactttaaaatatggtatttttttgaaggtagagggagttggtcccaactttgtttaatgatcatctatctctaaatgtgcttaattgggtcttgtccttttgccatcttccattacacaagagtgggtgcccagaccttattatggacacttgaatcccaacccctgccttggactgccaggatggcaacgccactgtctacagcagcccactcaagctagggacccagacaggagtatttttcttcacctagttcagtgtaagtcgattctaatggccccatagatgaagtaaagactgtatctcaaattaaaattagaaacaggagagcaccgttctgaaaacaagataacctagagtttgcttttatttagataggaatctatcatgaatcaagaaactggataatgatagctccatcattaaaatacatggccatttgctatgaccagatctagtcgctagtctagaaaaaaatagaaaaggagctacagttcacataaagataattatattaataatactaacaaaggctgatgttgaatcttcagtgttgaaaggatgatggatttgcttcaaaattatgtatttaataagctgtaataggcaagacgggctagtgtctggatatttatatatttaatatattgatatatatttaatattggtgtatatttaatatatgtggacatttatttgtttctatgtttttgtgttttttttacatgaagcgtgtgtgtgtgtgtgtgtgcgcacacatcatttgtgcttatattctaagtaagattttattttagaaaattcccatcttatcttggctaaaataaaaagtaaaggaawtgtccctgtcagtgctagaaggaaaggtctcgtaaaggaatatactggtagctgtgtccatccaagatggacaactcaggaagaaamagataaagctggggaatatagcaaggatccctctaggaccaggaaatttggaaaagaaayaataacttaccctttcctgtcttaaatatttccttatgtcagtcttcagtacttcctcttccagaaaagctcccagaataaaaactaaatggctttttaacgtggtctccaggaattttaaaaggaataggcaattgaataattattccctggagaaggccattgtaagtacctctgctcctaagtagcactaaataaaggaattcaagtaaagaagaagaagcagttgctgatactacaaaaaagttgtaaataattctgagaataagttacattgttgcttcaaaatgaaacagtgtaaagaaccatcatgcaatctgcccacttgtgctaaatacctagttcagttcctgtctttatcataccactttcccccctgccaagtaattatacaatcatagattatttttgctggaaaggaactttgaatgtggatccttattttagagatcaggaaactaaatcccagagaaattgaatcctgccttctgagacaatagccaacaaagctgtaactcaagtataatgatttttcagactagctcttttactaatttctcttttcctcactggtgtcagaagttggcggtcacaaaactgatggacagattttgtttgagccactttgtatggtttactcacaatgggcatttacacttaaattttattttatttctttggtatactgcagttagagtttgcattactaagtagaatattcaatggtcaaggaatctttgttcatgttttgcctaagactttttttttttgagatggagtctccggctgtcgcccaggctggagtgcagtggcgccatcttggctcactgcaagttctgcctcccgggttcacaccattctcctgcctcagcctcccaagtagctgggactacaggcgcccaccaccacgcctggctaattttttttgtatttttttttagtagagatggggtttcactgtgttagccagaatggtctcaatttccagacctcgtgatctgcccgcctcgacctcccaaagtgctaggattacaggcgtgagccactgcgcccagccccctaagactattttttaattaaattaaggatacagagtgtggaaaaactaagtttaagatgggtatctaacttatccttgaaatgtttgggaaatgataatttaggaactaggtttaatgacatattgatatgggtgttgaaatcatcaacatagtgatgttttcatttcttttggaaagagtctctcatgcctawgacgagttttggagtttgcctatgttattagtagccaagctctcagcaggggccaacaaaactgcattcagtgaaaaaaaggcctggaccattttctctagtaattaatactgtaagttgtactgcactctcagactttttttagcctgttattttgtgtgctctatgtgatctacttttcagtctttagtttcatttaggcttaaaatgacaagtcgccagtggctcccatcacaagttgccgatgacagtaagtgttcctaaaaggaccaacttgctcatctctccctgtggatccacccatactgtagcccctggggccacttgctggttgctgaacctgctatgcatcttgattcctctccattttggctcagggagtgttctctccttgaaatctcacccaccttcattctgttcttgggaatatacttaaaaccagtctccaactgttggcacctttgagaaacctttcccagaagttacaagtatgtgtttacacttcctttcctctgtggtcatacatcactttgttcttcagttagacacacctgggatagagtcccaatcctgccgtctattagtcttgccatgaactaattttgtgactctgtacaagttactgaacctctcttagacacagttacaacctgtttataaaatgaggacaccaataacacctatctggtaaaggtgagaggataaatgaaatgaaataaaaagcatgaagcacctgtacaatgttagcagtcaccagcattttgtggatagttacatgcatctgtattttacaaatcttaatcatctatgtctccagtgctgagtctagtactttgcatgtagtaagtgctcaataaatttatattattttgaattgaagagtttgggttgagatctgaaatagaatgccttgatatggctttatatgttcaacagacacaatagtgcgtttagctatttattacttactgtgagaaaaaaattggagaaccaattaacatggaagattttttgagataaaggttttgaaattttgttctaaattttttaatagatacttccaaatctattntaatatatggtgagagatagggatctagtttcattcctttgcatatgtatacccagttttcccaacaccatttattgaagagattgtcttttccccactgtatggtcttggcacctgtattagaccattctcacactgctctaaagaactacctgagactgggtaatttatgaagtaargaggtttaattgactcactgttcctcaggctgtccaggaagcatgactggggagacctcaggagacttaccatcatggtggaagggcgaaagggaagcaagcacatcttcacatggcgtcaggagtgagagagtcaagggggaaattctacacactttcaaacaaccagatctcatgacaacagcaaggaggaagtccacccccatgattcagtcacctcccacagggtccctccccccaacattaggaattataattcaacatgagatttgggtcggggcacagagccatatcagcacctttgtgaaaaaagagctcactgyggatttatggacttatcgctgggttctctattctgtcccattggtccatgtgtctgtttttatgctagtaccctgctgtttgggttactatgcctctgtagtataatttgaagtcaagtaatgtgattccaccagttttgttattttttgcttatgatggctttggctattctgggtcttttgtggttccatataaattttagcagtgtttttactatttctgtgaagaatgtcattgatattttgacagggattgcaattaaatctgtagattgctttgggtagtgtgggtattttaacaatattgattcttctaatccataaacatggaatatctttccattttttggtgtccccttcaatttcttgsatcagttatgtagttttcattgtagagatctgtcacttctttggttaattcctaggcattttattttatttgtagctattgtaaatggtgttactttcttgattcctttttcasattgtttgttgttggcatatagaaatgctactgatttttgtacrctgattttgcactctttactgatttatcagttctaatagttttcttgtggagttgtttaggttttttcaagtataccgtcatatcctctgcaaacaaggataatatgacttcctccttttcaatgtggactccctttatttctttctcttgtctgatggccctacctaggactttcactacttatgttgaataacagtaggcatctttttcatattcccaatcttagaggaaaggctttaaatttttccccattccgtatgatagtagttatggatctgacatatgttcgttttattttgttaaggtatgtttcttcaaaatccagtttttgagggtttttgtcatttaaattgatgcttaatttttcacatggtttttgtccttcattctgttgatataatgtatcacattgattgatttgcatatgttgaaccatctttacatccctgggataaatcccacttggtcataatgaatgagtttttgtttgtttgtttgtttgtttgtttgtttgttttgagacggagtttcgctcttgttgcccaggctggagtgcaatggcgtgatctcggctcaccacaacctccgcctcctgggttcaagcgattctcctgcctcagcctcctgaacagctgggattacaggcaggcaccaccaggcycggctaattttttttttttttttttttttttgtatttttagtagagacagggtttctccatgttggtcaggctagtatcraattcccaacctcaggtcatccgcctgtctcggcctcccaaagtgctgggattacaaaatgtgtagttgaatttggtttggtagtattttgttgagaatttttgcgtcaagatgcatttgtgatattgccctataggcttttctttctcctgtacttttcagaatagtttgaggaggattggcattagttctttaaatgtttggtaggagtcagcagtgaagccattgggtcccaggcttttctttgctgggagactttttatgayggctttgatctcattacttcatattggtctgttcaggttttggatctctttatggttcaatcttggtaggttgtatgtgtctgggaatttatttattctaaatttttcaatttattgatgtatatttgctcatattagctaccaaagatcctttgaatttctgtggtatcagttgtaatgtatcctttttcaattctgattttacttaattgggtcttctctcatttttcttagtctggctaaaggtttgtcaattttctttatctttaaaaaatcaactttttgtttcattgatcttttgtattgttttcttctttccaattcatttatttctgctctgatctttattatttcttttcttttactaatcttgagtttagattgctctttcttttctagctcttgcatacatcattaggttgtttatttgaagtttttttttaatttttgatgtaagcactgatagctataaatttccctcccattactgctgtcactgtattccataggttatggtatgttgtgcgaaaattataatttttatttcaagaattttttcaatttccttcttaatgtcttcattgacccattggttgtttagtatcatattggttaacccttttcctgtttttttttttaagtacagcttgctgctattgctcatttaattttacataaacatgttttttgagactgtagcaaatctgactgattttcaatgtgaaaataaaatatataaaaactcttcttggagttatttcaaaacagaactaacattagaatagtctgaatcatcagaattgtctattttggaaaaatcagatgcatcaaatgaatcttcagccaacaattgttcaagaacgatgttaacatcacttggagggatgctgtgttttctaggatttgacattttcagcaattgagaattactatattttgtaaatgaaagtaccactaccaaaaccagaatgctataaatagaatgttatcttttgtttccgaagttaatataccagagagatgcaaaaataataagaaatgcaaaatacttcatgacaaagttatcttagggtaaacactgcagccacaagcaccactagcaagtattcttggggtaaatgggaaaagcgttcatttctatgtgtttgtgtagtttccaaaattgctattgttactgatttctagttttgtttcattgtggtcagagaagatgcttgatattatttccatttaaaaaatattttaagacttgttttgtgacctaacatatcatatatctttgagaattacccatgtgctgaggagaaaaatgtgtattctatagccattggatgaatgttctataaatatgtattaggtctatttcatctataatgcagattaagtctgatgtttctttgctgattttctttctggaagatttattcaatgctgaaggtgaagtatttaagtctccagctgttattttattggggtttatctctctatttagctctaatatttgctttatatatctgggtgctccagtgtcaggtgcatatatatttacaattgttatatcctcctgctgaattcacctctttatcattacatagtgaccttttttgtctcttcttatagtttttgtcttgaaatctattttgtctggtataagtatagtgactcctgctttttttggttccggttggcatagaatacctctttccattcctttattttcagtctatgtgtgtctttttagatgaagtgtgtttcttgtaagcaacagatcatttggttttagtttgggtttttgttgttgttgytgttgttgttgtttttatccattcagccactgtatgtcttttgattggagagtttagtccacttactttcaatattattattgataagtaaggaagtactcctgccattttgttatttgttttctagttgttttgtggtcttctcttccttcttttcttccttcttctcttccttttagtgaaggtaattttctctggtggtatgatttaatttctttcttattttttgtataactgctatatgttttctgatttgaggccaccacaaggcttgcacatactatcttataacccattattgtaagctgataacaacttaacaatgtttgcataaacaaacaaacaaacaaaatgaaaactaattaaactctaccgctttgcttcattattctgctttttaactttttgttgtttctgtccatatcttcttgtactgtctatgtcttgaaacatgattgtagttattgtttttgattggttcatcttttagtcttccataatttaccatagttacagtattataatattctgtgtttttccttgtacttactattactagcaaattttgtaccttaaaatgatttcttattgctcattaaaatacttttctacctaattgaagtattcccattagcatttcttgtaggacaggtttattcttgataaaatccctaattttgtttgtgtgggaaagtctttatttctccttcatgtttaaagggtatttttgccagatatactattctagggtaaaatattttctccatcagcactttacatatgtcatgycactctctactggcctgtaaggtttccactaaaaattcagytgccaaatgtattggagctcccttttatgtaatttacttcttttgtctcactacttttaggatcctttctttatctttaacctttgggagtttgattattaaataccttgaggtggtgttcttcagattaaatctgcttggcattctataaccttcttcttcttggacattgatatctttttctagatttgagaaattatccctttcaataaactttctacccctctttctctacttcctctttttagccagtaagttttacatttttcccttttgggggtatttttagatcctgtagttgtgctttattgttttttattcttttttcctttgtctcttctgattgcattttcaaatagcctgtcctcaagctcactaattctttcttctgcttagtcaaatctactgttaaatctgatgcattcttctatatgtcaattgcatttttcaaccccagaatttctgtttgattatgtttaattatttcaatctcttagttaaatttatctgatagaattctgaatttcttctctgtgttatcttgaatttctttgagtttcctcaaaacaactattttgaattctttgtctaaaaaagtcacatacctctctttctccaggattggtccctggtgacttacttagtttatttggtgaggtcatgtttccctggatagttttgatgcttgtggacattcatctatatttgggcattgaagagttagctatttctggtagtgtttgcagtctggacttgtttgtgcctatctttcttgggaaggctttccaggcatttgaaaggactgggctgttgtgatctaagccatatatgtattaggggacatcctcagcccagtgattctgtgcttcttgcagactcatagaagtacttggataagatcttgaataatttcctggattgccaagcagagacttttgttctcttcctgtactttctgccaaacagagtctctctctctctctctctctctctctctctctctctgttctgagctagatctagggatgagatgacacaagcaccctggtggctactgggactgcactgagtcagacctgaaggcagcatagcactgtgtcttgccccatgcccactgtaaccactacctggctactgcctatgtttgctcaaggcattggagttctacaatcagcaggtggcacagccagccaggattatgtccttacttcagttcaggacagtgagttccctcaggccctgggtaggtccagagatgtcatcaaggatccagggactggagtcaagaaccttggaaacttacctggtgttctattgtagtgtgggtgagctggccctcaagccatgagacacagtctttcccactcttacctcccctttccacaggcagaggagcttcaccccatggtcaccaccaccacaggcccttagggagtactgccacgctaccagcaatgttcacttaaggcacaagtgctcttcattcagctcatggtgaatgctgcctggcctgtgacttagccttcagggcagcgggctcctttccagcccagggcaggttcataaatactgtcccagactcaagacctggaatggggaccccaagagcccacttaatgctgtatgcccctgtggcaaagctggtacctaagatgcaagacacagtcccctttacttttccctctgcttttctcaagaaggagtcttctgcccatagccatcacagctggtaatgtgctgattcttacttgaagccaacaagtctgagtctcacccaaggcccatggtgtactatctgggtatcactgctggtcattcagggcccaagagctctttagtcagcaggtgatgggtcgtgccaggtcttggttcttccctttaagtcagcagcatatcttctggcccaggttgagtctagacatgtcatttgggaactagggccttgaaaggggacctcatgactctgattgctgccctatcttactatggctgagctggtattcaagatgcaaaacaaagtcctctttactcttaactctcctcttctcaagtggaaagaaagattctgttttggagctgtgagctgtgcagcctgtcattggagaaggggtggagcaaacactcccttagcccactggctctgagcccagttcagcagtaggacttacttatgagttgcagtctttgtggcctaggctgcctttcaagtttatttagcaccctagagcactgtagcccatgctggcaaggcttgccaaatctcaaattctgaccacggggatgggcgattccccctggctagggctggtttaaatactccttctttgggtgagtgtcagctgagttcagcctagttttgctttctgcagtgataagatgggttggccttgcgggagtcattttgccaaggataacatggtctctgtatataactaatgctagggagaagagcactaatttgacccagtagcaaagccttaatgattggagggagtcagagctctgaatatacacattggctcttaacaaaagccatctcaagcctagcccaaccaatggggtacatatctgtgtcctaaggaagggtggggctacaagtaaaaactgaaagaactgaaagctgtttcactcaacctgtaaaaggagggtacaagcagctgtgcttttccatgtcaattagcacataacatatagaatataacacataacaaacagatccatctatttgactcctgggtgaatggagctgcagaagggcatggcatgcctggtgtgcaggctgtccagcacagcagcagtgtatccacccagagcctcagcagcagaggarcaaaatccctggcagagcaaatggagacactgcttctctggctgagcaatgctgagcctggccagcaaggactccatatgctcaggagcagcaagaacacccagagtgactaacagggtgccagccaccatctgcccagcaaagtggraaggagaccaatgtccagctaagtgaggactgagtaccagtggtgtctggctgaagcagacttgtccatgagcacttgtgagacatacttagggggactttgtaaagtgacagaagtcccacattagcatgtgataacaatcagcctgcaaaatttgattactagtgttatgacacttattgtacccctaacttgtatgggtggcattagatagatagatagatagatagatagatagatagatagatagataatgttcattatgtatgtatgaaaacatgcacacataacacagttcctggtccataacttccatagtccttgtatttcctgagtgactaaaacaataagcatatcttttgttgaagtatgtggctttttgtccttggttcatgtagcagctttggaacagcttcagagtgataaaggtgacagacagacttttgttatagtgttggggtgctttaggtctcagaagcagtcctcaggaaacagaatctcattttctgaccttccccggtcctcctttcatctgctccttttgctccccaagcaggccacagagaccaaaaataaaatctttacccacctttctgtcttggggctgcccgtaaagaaattatctgacctaccttctctgattgcagatcataagacccactctttatccaatctcgtttctacaaggttgtccatgcttcatttgtgcctatccagtgaagtctccataaaaggcccaagaggacagggtatggagaacttctggctagctgagctcttgcaggaaggtgaataagaactcattcatgtggagggtggcacatgatcatggaagctccttcccacatgccttgccctacacatctctttatctgtatcctttgtaatattctttataataaaccagtaagtgtaagcaagcgaggcactctagcaacttaatcaaacccaaggagacggtcatgggaaccctgatttatagcgttggtcagaagcacaggtaaaacaacctgtggcttgctattaatgttggaactggggaacagtctagtagaactgagccgtcaacctgtgtaatctgatactatctccaggtagatagtgacagaattgaaatgggttggaggacacctattggtctattggtgtctgttgcaaaactgattgcttgcttgatgcattgagaaaaaactacacacatctggccacagaagtcttctgtgttaattgtggtgtgagagcagaggaaaaactgtattttcaacacwggtggcccatgttgtacaactccaggaggctctattcatatcatattccacatcagtgccctcaccctggagcacataaacggaacattaatggtgcctccctggagttgtgcaaygtggacacgtggatcaggagcctgagaaaattctgaatacatttgctttacaacccaaaatagattaccatctgtgatattagctatgtacacaaatagagaacccagtagagttaaaagctatccctggttcattgtttgtaatctggatcctgatttagcctgaaaaattttgtaacccaaagtactttcatataagattgcattcacatataaatacattcagtaaatatatacaaggatgagatcgtaacatgattctctgaagttcacgtggaatcatttattagttgtttctttggtacctttagcatcattcaatgaaatattatttttcattagtagttagtattaaaatatgctcaatacagataggaacacttaaattttatcagctattcagatcactttacaaattctgaaggtttaggtaagattcccaaattcctgtaatgtaaatgtttccaatgatgttctagaaataattaattattttactgatagcattacctgtttttagcttcattaaatggactcaattgtttacttgtttcaaaaatatttgtacattttcttgtaattttataattattttgttcaaagagatttctgaaaactattacatttgatttcatgggacaaaataagatgaatccaacaaatatgtgtacttaaatacaaagaaataaaacacattttactaaaaataacaaaatttactgaaaaattctgagtatacatcttttggccagaaaaaaattattgtagagagagaaaaaaagacacatataacctaaagggttatcaagagctttaacctacattatgaatttcagtaaatattgcaatactaagtttttgtgttttttccttcaaattagcaatgcctaggatttgactgaatccatttttactattggtgtcataagaaaagacacatttccggccgggcacagtggctcacgcctgtaatcccagcactttgggaggccgaggcaggtggatcacgaggtcaggagatcaagaccatcctggctaacacggtgaaaccccatctctactaaaaatacaaaaaaaattagccgggcgtggtggcaggcgcctgtagtcccagctactctggaggctgaggcaggagaatggcatgaacccgggaggtggagcttgcagtgagccgagattgcaccactgcactccagcctgggtgacagagccagactccatctcaataaaaaaattaaaaaagaaagaaaagacacatttgcatagacttacatttactattgagttctgccccataggaggccggacactgagtacggatgataaaatttgtattcttttttttttgcagtgaaacaagatgcatgggttgaatggagtgcagagcaactgttttccctgggtgccttcacatttttaatactctaaatacatttttgtcattatatcaaaggccttagtaataaatctattgacagtaccttactggaaaattgtgctttagagtagatataactttagcaatgacagataagggggagaaatattttttaaggacagtagtgtagttttaggtcagaataatttagtctttgagtagaattcaaactgacatgcccctcattccttactgccaggaacacagggctttatctctggctgttcagttgccctaatcttgtttgctttcccatttacttctctaatctctgaaaaaaagtattatatttaacagaatttgtagttttggaagattctgatttactttgcagttaggtagtatacatttatataaatacagcttgttttttttttttaagcgaaaaatctgaagtcaaaattyccaatgttttagcaaaaagaaagaaagatagggaaataagtaaatacctaaccgtgacaatgccagtcttggaactagaaattgaaatggaatattattatttcatgtctattcccacaaggggaacttgtgctatagattatatacatacatatatacatakgtgtgtgtgtgtgtgtggtctgtgtatataaagcctgacakcacctgggcagcccagactaaagtatagatgttgttccctgtccatgaatgatagtgtaattctcttgtatttattcatataggtttgagggtggtcgtgcattctattgtggtcctgctaaatttgatatgccatttaaatatcaaagtagagttatcaagaaggcagttggatatagtagtctggacttcaggggagaaatccatgttggagataatgctttgagttgtttgcttaaagaagtattcaatgccacggcattggatgaggtcactgaatgtgagtgttaagaaagaaaagtgaaagaggcccaggacagagctctgggaaacaacaacatttagtcactagcagaggagccacaataggagattaagggagtgtagccctcaagggaggaagagcagagaatgtggtctgttgcaagccacgtaacctgagtgttttggagagaatagtcaactttgccaagtagtgctgaacattcaagaaaatagtgtaacattgaatttggccccacagagttatttaatgaccttgacaagagccacctctgtagagtggggtgaaggacatatcaagatgacatactcattgatataaacacagagaagggcagataaacactgtaacctttcctgtataatgcacctcagtctaatcatgagaaaacatccaaagagcctcagttgaagggtattaaccaggcagtcctagccaggagaggtggaggtgagagacaaggtgaggaaggagaaatagggaatatgaactcctcttttaggaagctcagctatgaagggatgagaaatagggcaatagctggaaaggataggggatcaaaggagataattttaaagatgggagatactagagcacaggttgtatgctgatggaaggaggaggttgatgatacatatgagaggggatcattatagcagtggatcctggaaacagcaagtgcacagcagaaaagttagcctttgctcaaagcagagacagtttcttttccattagaaccagaaaggaggcagagtgatgcaaagatgaaattctttctttctttctttctttctttttttttttttttttttttttgagacggagtcttgctctgttacccaggctggagtgcagtggcgcaatctcagctcactgcctttgccttctgggttcaagcaattctcctgcctcagcctcccgagtagctgggactacaggcacccaccaccgcgctcagctaatttttatatttttagtagaaatggggtttcaccatgttagctaggatggtctcgatctcatgacctcgtgatccacccacctcagcctcccaaagtactgggattacaggcatgagccaccgcacgcagctgaaattctttctacttgtttatagttgctcagtgaggtgtgagttatggtcatcagttgagagttctggtacagaggactgtaaaagaaatgtctttttagtcttttttttctaggttctccataatgaacatgcattacttttataattagataaaagattacaaaaatttatatcctttgacccaacagattttgttcttttgccaaggaagaggaaaaatatttctgtacaaatatatttacggcctcccaaagtgctgggattacaggtgtgagccaccgcacccagccattatttttatacttggaaaaaatcaatgtaataaaaacaatcatacactcaccagtgacccatcatgccatttaatgattcttggaaaaggtaaacaccatcaaccttcctagccattaaccagattattttcctgtaatggtgtttgtcccacagaaacttgcagcggctctggtaatacagctctatatgttaaagggactgtgccactccatctttgcaacaaaattctacttacagaaactgtgtttctttgctgtttttttacttgtgtctatgcttttacttgtctctaagctaagcgtggagtgaagaaagatgtcaggaattctgcagatggagaataaccatcaaatagtcttgccaacacagatatcagatttatttcaacatctaaaactcaggtcgctctatctaaaataatacagagcagagagaagtcacatttacagcgtaaacacgcaaaatttcccagtatgacattttttttctttagcctccagacatctgattccttttcaaaagcacacaaatcctctcacccagcccagagccacccaaaagggatttccatatggtagatgttgcttaaaatttgctaacagacttaatgaagttactcctcttaacaggtaggattgtgcctgttgtccaactcataaataaaggatcatacatcacttctttaggttgttccttagttgtaaatcaaaatttataccagagtgtaacatatcttttcttctgttgtttgaatatgtaatccgtgcatattaaaatagtgcacagctgtagtcagtgaaaaagccttcccaccaatgtccctccacagaggcagccagcatacccaatttcttgcatatatttctagagatattctatttatatataagcaaataagtggagcattcatgaaaaacttaataagacccttaaacatcacgtaatattctttatcactgtatcaaatacatgaaggatggtggtcagaaaagcttataatgccagaagccactaaaaattggagattagaaagaatttaatatttttctgaaatagaagtctaaatgattggggaaaagacaatgctttaaaaattgatttctatacacatcagttgcattaaaggagacatctaattgggtgagcatatagaaaaatactaatcgttgctactggcttgtaaatttttaatatactagacattttatggtttagttttttaaaatagtttcactctcccagtcataaagtatgcattgatctttaatacatatatatattatatactatctataatattattttatatattaatatatagtatatataaaacattatatattaaatataaatatatatttaaaattattttgtgacccacagatgattgatagcggcttgccatcccccacttcagactcctcttttctccagattttttgcctattacaaggtcagcagttaatggctcataggtcaaatcaggcttgccacctatttttgtgaatgaagttttattagaacacagctatgcttatccatttatgtgttgactgtagctgttttcatgccataatgacagggttgagtayttgtaacacaggttgtgtgggctgcaaagctgaaaatatttatctgatcctttacataaaatgtgccctggagtaagaaatcttcattatggtaatgaatgagcaagaagcattagagaaaagaaaactcaagarctgattttaaatgtgcaataacattataaggtatagagtatcacataggaatatgcaaactatgtataaaatctcttggatttcagttatttcatatgctttagtgtccacctagaaaaaagtagggacactgctcttatagagatttagaataaattaagggtgtgggtacacaagtacatacatagctaaacatgtacggattttcatctactttcatgtatcacttttccaatcccatccttctttccaacattgctacaaattttatgaatatatatttatctgtgcagcccagattaaagtacatctttaaagaagtaaatgtgaaagagaaaagtctccaggaatgaagagggcaattaagacttactgggggcttggtcactatgatatctgtcactccaggtattgagcgttgatccagtgctatggctcaccaggctggtgtgtgcttccttctccaccatcatttcaaaactacataccaggtcaaaggggtcaaactgcagataaataaaatctaatctcctagggcacaccagggagagcctgtactcccgtcggtactaccaatgctggtagacaacgttggttgttcatgttactggaatttaaagatggataaggaaatgaatacaaaaccattgcttgkatttatgtttaacaaaagattgctattctaccccagtggctccttaatcaccttaggtgatacagcttgatatttacaagagtattttaaagcaaagtaaaagcaaataaagctgtttcattacaacagtacaactaaatagtaaggataaaaatttaacatcaggcaacaatagttgtttttttttcaatttktagagcagaaatacaaataaagctatattaaccacccctaagggtatttgtgacctttgacaacactgaaagaaaatatttatagtctgaaactatgtctctccagtattacagagtaaatgaaaaatataatatggttaacaagttgtacttttcacaagaggacaaaattcttatagaaggattccgactttgctttttccaagtcttacagaaagaaaacattgaaaaaagtaacaagaatggaaagagtgggaaagtaacaagaatggaaagcacttctataaaacgaaggcaaaaggcaaatattaaaagtataaaattatcttgaaacatatttaatatatatatgtatgtgtgtatatacacatatacattgaaaagtacatatattctttgtcttagaatatttaatttgtttataaccagagtgtaaaaataaaaatacgttttctttggtttcacagtagatgaacatttagtaaaggcaaactattcactcaaatatattttgagcatccatcatttgtgagaatctgatctaggagtacagggtatgtcagtcagtgataaaacaaaacaaaacctgttttcatggaacttacatacttattggaagacccagacaatacatataaaaagtttattgagcagtgtagtatatcacatggtgatgcatgctaaagaaaaatagagcagctgggcacggtggctcacccctgtaatcccagcactttgggaggccatggagggcggatcgcgaggtcaggagttcgagaccagtctggccaacatagtgaaaccccgtctctactaaaaacacaaaaaattagccaagtgtggtggtgtgtgcctgtaattccaggtactcaagaggctgaggcaggagaatcacgtgaacctgggaggtgacgtttgcagtgagctgagatcgcgccattgcactccagccaaggcaacagtgtgagactccgtttcaaaaaaagaaaaagaaatgaaagaaaaatagaacaatataagagggactggaagtcctcagggttggagggtgggattacgatgttgaaaatggtggttatcccagacctcgcaatcaagagaagtactttaggcttgtggctctttgggcagagagaagagtcagcctttgaggcaggagtgagccaggtgttagaggctcggccaagagggatcgagaaagctagcgaggagtaattggggacacactgttaggagatacggtgggagaagcaatggggtgggtgtgggatcagattataagagaccttactttgagtgagtgacatgggagggtactgaccagatgggtgacawttttgagttatgtyttaaaaagatcattctcactatatgcaataaccaaggtcrgaaacaatggtggcttaaagatcagtgtagtagcaatggaagttttgctttagaaatagacatttatgattttattaaatactctaggatttagatggagagcacaatattgtttaatgaagaaatcccaccttttcacccatgtattcaatcagcagttcatggaaaactctccaaactgtttttacatayggtccaggttttcttagcttcctgccaatatttctgtattctgtacattttccatttgcctttctagattttggtaggctgagtaacgaccctctgagacacctaggtccaatccctgggatctgtgaatattactttgcctggcaaaaggaaccatgcagttgtgattaagtcaaggatctggagaaggggaaattatccgggattagtggccgggccctaaatataatcataagagtccttataagacagaggcaagaaggttagtgagggagaaaacaatatgagtatggaagcagctgttaaattgatgcagccatgaccgaagaatgcctacagcctccagaaactggaaaaggcaaagcaatgattctcccctagagtctccagaaggaaccagccctgctgatgacacggtgaatttccagatgaaactgatttgggatttctggcctgcagaactgtgagagaataaatactcattgttttatgccacaagatttgtgataaacttgttatagcagcaatgggaaactaatacataggtctacttcctgcttcttcactctgccctgtgccctggaaagctgaccctggtgtgctgcaccaatcaagcacctgcagattggaagtgacaatggccaggatctacctaaggcagcagcttctatccagtggtgctaaccctagagctacagctctctcttggcttttggaaaccacttcttccgcttgcagcttctggccaagggtagtgaaagttgctgtagagggatcttcactagctcttgtttgtttcctttatcagtgcccacaccttcrtaaagacaggctctttatccagtttctgctccagcatttaaggaggttagaagttgtcactccatcctaacaaccagtgaaaactgaacaaaatgaaaaatcaacaactcttaattggatccatcagagaataaggttacagggtaaaccactccccacaggtaggaaaatacagaaaatatcagcttattggagcagaaacatgcaagcagagacatccaagggagcaattagtggggtgggaaaatttgaactgtaatcgatgaattgctggaggctcagtctgacagttaaaaactgtaggagattccagtcacaggtggcctccrtacttttatgggttttacctccagattagtcaggttctcacagtaaatttcagagaaaaatcccttygtgtttacatcagggagagaggaaaaagtgccatttaaaaatatgscagagcattstgttccttttaacatggtttaccctcctcttgtccttcctaaggaataggaggggagtagagaaggaggagactgaggcacttgtgaagatcacagttgaaagtcactgtcattaaaaggttgaaacctaatcatataactatagaatgcttccactcccttatgcctgtagcatgttaccaacacatgaattaacacctatttattggagttacttttacccagtcttggctatcaaagaaaaattacaaggcatactaacaggcaaaaatcacagtttgaagaaacagagcaagcatcagaaccatacttagatatggcaggtatgttgaattaccacaccaggaattttttgtaagtccacagttaatatgataaaggctctagtggatgaagtagatgacctgcaaggacagatgggcaatgtaagtagagagatgggaattctgagaaggaatttgaaatgttagaaatcaaaagcactgtaacataaatgaagaacaaccttaatgggctcattagtagactggactcagtggagaaaacaatctctgagatatatcaatagaaatgtctgaaatggaaaggcaatgagaaaaaagattgaaaaactggaatagaagatctaagaattgtggaataactaaaaaaggtatgatatatacataatgggaataccaagagaagagaggaggaaacaaatattttaagcaacaatgactgagaattttccaaagttaacgtcaaatactaaaccacagaaccaagattctcagagaatgccagggaggataaatattttaaaaagataccaaacatatctatagcacatgtaaatggataatggcagggcatatgtcccagagacagtgatgatctgctataaacagaatgtagagagctttagtgttggaggctgaggaaactaggtcaggggatggcattattactgagaaatacagatgtcctaaatgtgttcaagttccaaatgcccagaagcaaagcgctatcttccctcacaaaatctgaaactcctctagtatttatctcattgacagataccatcatctatttaattgtacacaccagaaatctccatctttttcaactcttatatccactacatcaccaaattatatcattttaatctctttaaaatttctcaaaactccattttttccatatccatgaaggagatgatggtgtcattgactgaggtagagataattgaggtgaggcacagtaagaaggacaggaggaaaaaaaaaatagatgccatgaaagctacagaggagagaatttcaagacagtagatcaataaagttaaaggacacagaggaactgaatagaatgaaatctaaagagggcagttgaataggacgataagaaggtcattttactttcaagaggctgatagcagtgctgatgccagagtttagtgagttgaggagtgaatgtaaataaggaagggttctgtgaattaagattgtcctttgaaaagttgacaaggagattgttaaaatttgagaaaaatgcagcaaattgaggaaaggacaacttaggatggtagacttgatcaactgagaatatggacccggtggaaaggaagcttctgataggatgatagagcaagttacacagataaagaatcaatagacaaattagtagggttaaccctggaaaaaaaaggcgatgcttccaccctggaagtcacagagaagttgggagggatgtgaagaggagatacatgaaaatatactaccattttgagatagaagggaaggaacctgagtgagtttgtgttagtttccattgaagaaaagggaaaatagatattggaagcttgaaatgtagacatttttggacaactgctatgtaaaatgagctaggaagtcaccctctggatgggtaaaataattaatgagtagacttcaaggtccagtggagggaaaactaaaatctttcaggcgtgagttttgtgaccacaaataagcaacactggagctgaagagaagtcaatggctaattggatctattagtcagtgccctggaagcaaaaatagcacaatccaaagaagtgtgattgaagagagtttttgtttttactttttattaaaatcaactttatttttaagagcagtttaaagttcataacaaaattgagaggaaggcgtagggacttcccatgtgtccccttcccccaggtaggcacagccttctccactgtcaacatcccacaccacagtggtacttttttacaattagtgaacctacattgacacatccctatcatccagagtccacagtttacattaagattcactattggtgttgtacattcaatagcttttgacaaatgtataatgataagtatctacaattgtagcattgtacagaatagtttcattgacctaaaaacgctctgttctctgcctattcatctctctgtgtcctctaatttgctgtcaattagtgatcttttttaccatctccatagttttgccttttctagaatgtgataaagttggactcatatatgtagttttttcagattaagttctttcacttagcaatatgcatttgtatttcttccatgtttttttcatggcttgatagctcattgccttttagcactgaaaatacactattgtctgaatgtactagaatgtatttacctatttcytcctgaaggacatctttgttgcttccagttttggcaattatgaaaaaagctgctataaatatcgatgtacaggtttttgtgtggttttctactcatttgggtagaaagaagcacagtagctgaattgtatggcaagagcatgtttcattttrtaagaaactgtcaaactgtcttccaaactggctgtaccatttttcattcccaccagcaatgaatgattrctgtagctttataggaagtcttgaaattgcacagtgtcagtcctccagctttttctycttcartattggttgcctattctggatcttttgactttccatakaaactttagaatcagtttgccaatatccacaaaataatttgtttggattttgcttgggattgcattgaatctgtaaagcaggttgaaaagacctgacatcttgataatattgagtcttcctatccatgaacatagaatatctttccatttacttagttcttgttttattttatcagagttttgtaattttcttgtatgtattttgttagatttatacttaagtatttyattggggggtgcwaatgtaagtggtattgtgtttttaatttccattttcacttattcatttctggtatataggaaagcagtgacttttttatattaatcttgtgtctgaaaaccttgctgtaattgcttattcattccaggaggtttttatgctgactctttcagattttcaacataaacaattatgtcatctgagaacaaagatagttttatttctttcttctctatcagtataccttttaagtcattttttggtcttattgcattagctatgacttccactatgataatgaaaaggagtgtagagagagaacatccttgctttgtttctgatcttagcaggaaagcttctaatttctcatcattatgtattgtaactgtaggctattttacatgttgtttatgaagttaaggaagctcccttctgtggctcatttactgggagtttttatcatgaaaagaggttgaattttgtcagatgctttctctgcatctattgatatgatcatgtcattttymctttttagcctattgatgtgatgaawtatattaatttatttcacccatcagtcaccacccctacatacaaacactcttcctcaggttactggaatcctacttctacttaaagaccaagattaaatgctaaatctgctaagaactgtayccactgttccaaaatggaattaattttccctccttgctatttccactttatatattactttaattttggcatttgccgtatactttgtgttttttaaaaatatttgtgttcacatctcccactagtttgaaactcattgattgtacaacctggatttttttccacattcartaaccccacaacacttgggaaaatgcttgcacgtggcagggtctcaataaatatgagttggattgaactgcatacttagatttttattaaaacaacaatgacactttgggaggctgaggcggacggatcacttgaggtcaggagtttgagaccagcctggccaaagtggtgaaacctcatctctactaaaaatacaaaacttaggctgggcgtgatggctcacgcccgtaatcccagcactttgggaggccaaggcgggcggatcacctgaagtcaggagttccagaccaacctaaccaacgtagagaaactccatctctactaaaaatacaaaaaattagccgagtatggtggcgcatgcctgtaatcccagctacttgggaggctgaggcaggagaatcacttgaacccgggaggcagaggttgtggtgagcaaagatcatgccattgcactacagcctgggcaacaggagcgaaactccatctcaataaataaataaataaatacatacataaataaataaataaatttaaaaaatacaaaaattagcctggcatggtggcgggtgcctgtaatcccagttactcgggatgctgaggcaggagaatcgcttgaacctggaaggcagaggttgcagtgaaccgagatctccccactgcactccaacctgggtgacagagtgagactccatctcaaacaaacaaacaaacaaacaaaagacagtgatacaagaatattctaaagccaatgcccttccaaaattcacagctctcactttccataaatttccatatcaaaatatgttttccttacaattctaatatatggcacttggcatgtagctaaatctgacaaatcaatgtatgcatattttaaaacttatttaatactggaaacatgaaaattaaccagaaaaataagcagtcatgattgattagatattcactgatgtataaagatgatggaaacacttagatgttcttgcgaaaaggtagatggacttactcattttaagaaatgcccaatattatacaaagaaaaatgatttaaagctattttctatccaaacctcaaacattcagttggtttcaggcaaacatgggtattgaattaaggtaatgaagattcaagacaactttttatttttatttttattttattttatttttttttgagacggagtctcactctgtcacccaggctggagtgcaggggtgcaatctcagctcactgcaagctccgcctcctgggttcatgccattctcctgcctcagcctcctgagtagctgggactacaggcgcctgccaccacgcccagctaatttttttgtatttttagtagagacggggtttcaccgtgttagccaggatggtctcgatctcctgacctcatgatctacccgcctcaacctcccaaagtgctgggattacaggtgtgagccaccacgcccggccgacaccttgttttttgcagctttgtatcaagacataaaaggatgaataacacttgatttctacacacaactttctcaaggtatagcaggaacaatgaacatgtatagacttcattaaatatgagaacttctccactagtggtgtattctctctggaaagacctgcagtgtcttcacagagagggtaatttaagactaactttgaaggatacgtagaattttgctgagcatggaaggaaaataattccaggtagagaaatggaatgaacaaagtacagagtcttgaaaatgcttggtatattaagagcccttctgtacggagctgatggagaataatgttggaaaggttgtttaaggcaagattgtgaaggcccatgaaatccatgccaagaaagttttaagttgtaccatagaagatagggagccatctgaggttgttttaatcatcacaatgaccaaatcttttctaagtttttgacggctaataccaaaaacatcatagargatgaattcacaagagtggaagagtgagggcaccaaccagccaagtattgatccctctgctcctcaccatccactccctatcgttctccagtaacagtctgtagcagccaaatgggtccataaaaacagaaaattcagggcccttcaattaaatggataattggatttcttcctcttttgtcttaaaaagaatatatcaaaaatggttatacttacaagaatcacgttgaaaataggggagtaaataagatgatacttgttcaattcagcaaatgtggagaccaactatgtgcaaattccatgccagacgttgggggggatatacagtcacttagtcattcaactaaagtttatcgagaaactacactattctaaacaatctccttattcatgggatacaacaagaagctaaaggcatagttttgcagatcttgatgcttacattctagtaaggacttcaaatattaactaaattatctacacaagtgtataatttttttaagtggcataaaaaattatggaggaatcttgtaatcccagcattttgggaggctgaggtgggcagatcacgaggtcaggagattgagaccatcctggctaacatggtgaaaccccatctctactaaaagtacaaaaattagccatgcatggtagcgcgcctgtagtctcagctactcgggaggctgaggcaggagaattgcttgaacccaggaggcagaggttgcagtgagccgagatcacaccactgcactctggcctggcgacagagtgagatgccatctcaaaaaaaaaaaaaaaaaattatggaggaatctaattaagagttgcaaataggtataagacactatttctgtcattagatacttttttttaatatcagaaacatgatttgcaaatagtttctcccagtctgtggcttggttttattttcttaacaagaaagcagcaaattgaggactgtacaccttaggatgatagaagatgtgatcaactgagaatatggatctgtggaaaggaagcttctgatggcatgatacagcaagctacacaggaaagaaaatcgaaagacaggtggggcgggttaaccctggaaaagaaaggtggcacttccaccctggaaagtgaaaaagaagtgtgtatgggggtgagggaatatgaggagaagatagatgaaaatatactaacattttgagataaaagggaaggaacttgagtgagtttgtattagctyccattgaagaagagggaaaatagatattggaagcttgaaaggtagacatttttggacgactgctatctaaaatgagctaggaagtctcctgcggaggggtaaataattaatgagtaactycagggtccagtggagggaaaattctaatctttcatktgtgagttctgtgaccagaaatctgcaacactggagctgaagagaagtcaatggctggctggatctagtagtcagtgtcctggcaggaaaatgacacagtccaaagaagtgtgattggagagaattttttgttttcatattttattaaaataaacttgcacagtgcagatgtttataattttagtgaagcccaatttatcaattttttatttcatggatgatattgttggtgttgcatataaaaacttatttccaaacccaaaggtatctagattttttcctatgttatcttctggagttttatggttttacattttacatttagatatgtgatttattttgagttaatatttgtaaaagctgaaaggtcagtgtcttgagtcacttttttttgcatgtgaatgtccaattgttccagcaccatatgttgaaaagatattcctatcctaggaaatttacaatctagtaaagggtataaggccagcacacaaatgaatgactgaaatgacatttaactaagatatctatcytaaaggatgtgtagaattgtgctgaggagtgtaaaaggtgacatttaaggtggattgtgaaaagtgaataaagttttatcatacagattgggctgagraggaaacaacaagaacaaaatgacaggtgaagaaagcacagggatgtatagtttaagaaacagaaacaagtccagttaagctaaagtgtaaaagcgtattttctggcaaatacactggaaagacagattgtgtaatgttatggaaggccttgaatgagtttcctataattagtcattgaacaactatttattgagtgcytactgcatgccakgcactgttaacagctgctggggacacagcagtgaacaatacaggtactctgtcttactagtaccataaaatctagattggcattatattaattacaatctaataggagaagacagaggacaaggtagaatatgagaggtgatgaggaaaattgggggagaaggcaatggctaaaaatagagcaggaaaagggtgatgagagattctggagagaagccactaattgacaagggctcaccaggaaaagactctgattaatataatattgaaagaagcccatgggaagcaagaaagagctttacagataccaaagaaaatggcattccactcagagggaacagcaaataccaaagctgtgaggtagaagcatgcttaatgtgttcaagaaacagcaaggaagccaatgaggttggaaagaattgagtaggagggatattagaaacagatgatgttagagaaataataggggtattgagggaggcacagatgcacaaatcatatgggccttgtaggccatggtaaggcattggatattcctttgagtaataatggtaagatcaggaactttgagcagagtagtgacatgatctgacattttttttaaagatcactctggctgcagtgttgggaagagtgtcagaaggtaaagatggcagcaggcaaacctcttgggaggctgttgcagcagtgagaagaaatatagtrgggggatggtggggagaaatgtctagccctagatagaatttgatgatagagctgatggaatttgtatacagattgcatgagggstgtgagaaacagaaaagccaaggatgtctctaacatcctgaacaatcagaagaaaggagtcaccgttgactgagrtgaagaatcataggaaggagtaggtttggagacagagtatttaggagtgtggtttgggatgtgtctgtctctccaagtgaaatatcaaataascatttagatgcagaagtctggagtagtagttatcagtgaatgagtggtgtgtaaggctatgatataaggaagtgaatgtagagaagaagataacttcaagaactgaaacttgggagacccccaaaatgtaacagaaagataaggaaaaaacmgaaaaagatactcagacagagataccagtgagttaaggaagagaatcaagagagacttacaggaaaccaaggcaaaggtattcaagaacgcctttgttaaatgckcctggtagattaggtaaaatgaggacttaaaattgaccattggatttagcaatgtaaaggtcaatagagtccttaacaaaagctgcttccayagagtgtcaagatgaaagcctgaagaaactaagtatatgcygagcatggtggctcacgcctataatccaagcacactgggaggccaaagtgggcagatcacttgaggtcagaagttcgagaccagcctggcccacatggtgaaaccctgtcwctattaaaaatgcaaaaaaattagctgagcgtggtggccacgcctgtaatcccagccactcgggaagctgaggcaggagaatcacatgaacctgggaggcggaggttgcagtgagctgagatcacgccacagcattccagcctgggtgacagagcgagactccatctccaaaaaaaaaaaaaaaaaaaaaaaaaaagtatacataattcttttgaggatttttactataaagcaaagaaatagaacagcagatggaggaaactggaagtcaggggaggcagtttgttgttgtttgtggggtgggtgatataacagagaaaattcaatgatgtaggaatgagagaaaaagcagtgggagtgatgtccttccctaaatgagagaggacagaagctattatagtatacaaaaagagcagtgggccgggcgcggtggctcacgcctgtaatcccagcactttgggaggccgagacgggcggatcacgaggtcaggagatcgagaccatcctggctaacacggtgaaaccccgtctctactaaaaatacaaaaattagccgggcatggtggcgcgtgcctatagtcccagctacacgggaggctgaggctgaggcaggagaatggcgtgaacccgggaggcggagcttgcagtgagtcgagatcgcgccactgcactccagcctgggcgacagagcgaaactccgtctcaaaaaaaaaaaaaaaaaaaaaaagagcagtgggcttagataggggaacaggcagtttattaataggcttaaatttctaagcaataagaaaccattacagttttctgagtaagtgttaagattcttaataaccctcataatctatatattccttccccttttaccaaggggcaaatccagatacttaagagtatgtccaaaaataaataccagaaatacaatcatccccaaaataaaatggatgtccagaaaagtttaaataaaccattgtgtttatctcagcaacttctcctttgtgttaaatcaagatctttatgctgtttttgaaagttgttgaaatgttttactttgaaaataaactttttggtacatgaaatctatttttacacacatctaaccttttgaaaatttataatgtgatttattttgtattcctgttaaattttgctgaatagtaattaaaaatgaccataccttgatcaccaatgacctaacactatctccaacaaaattaggaatgtaatgarttcaaacccttcagcctcatcaccttgtaacagattcaatcacacagaaatttagaggaagctttaaaacaaattatataaagatagttcttgaaggaaattrtgtactcttgatcatccatgaagtaaattctgtaatttgcayttttccaatggaraggagtaaacaaacagtaaagatcaaatatattaggmtattttctggtatcttatcattgaatttaataaacagattcctagaggattttcagtatcatatgtatctaaaacttttttccactatgakcagtaatcarttcttaaatcagaaagcgtttttctccacagacrtgaacgtattcacacgaagaaagggaacttcaaccgacctctaatatccaatctgaaggatgtagatgatttagcaaccctagaarttttggatgaggtaagaatttyrgtttaattaaacttagacattycagatgttttgttaatttatagaagacaygggtattggtagaaggggaaggaatatatagattatgatggttattaagaatcttaacactcactctgcccatgtctcccatctgtaagtctcatgctttctttgtctcttagcttcctattatttcacttatcttcagttttaatctatataactcaaatttccagatctttccagcctagtgttcatttttgtctgatgctcaactgataggggtgaggtcctcgcagtgtaagttgttaggccacagatcttccttctttttcattatttgtgggagtctcaaagatatgatttattgtattcaaagagcagtcagcctattgtaaccaccatgtggtggcctcccgctttgtcctctcctgtttcagctcttagtggctgtacccagaaactctgggatacctcaacagcctgtctgttaccatggtcagtgttcttcctcatgggatcacaaaacccttgtttcacacagcttatctttcgggggtattgaattctgcttggaactccttattctaattatctcagaagtatttcaaacatttttgtgaaggtasagatccaagctattaaattctagtctcagcctmctttcccctyacccttctttrttccacgtagtcagatcattagagaaataaatgccctctttttagcagaaggtcaggacttctgtcctgcctgatgaacacctttttattttttttacactgctgatacatgcctgagcatttgactcagaaatgtaccaatcaagaggtaagttctgaatagaggtagtcatttggtaaatttagggttgcataaacaactcaagtacttcctcaaaataatctcaagaacatcaaacatcttgaaatcaaatcatgttggcaagtcagagattgcagcacctttctgaattcttacatataaaattttttaataatgtgaattcctaggcttgtggattgcaaagaagttttcactaatcatgttgttgaccaagatattaatatattaaatggtgggtttgtttctgttgtctatattttatttttagtttctttttggacctaagatcttttgctcctctcttgtgtcatgtactgtaaatggtggtttccgacattatcaaaatcaattcatttactcaaatgacttatcaactatgaaaattacattttaaaatttttcatagtacttcataaagccaaaagtctgaaaaaataaaaggactaggacattccataaagccactggatcaccttgatttggaattaaatcatattcactttatcttcccttcccttttctctttacttcgtttttaatctttacatcacttagtgctattacttcttttcttgaaagcattatatatttaaaattcctgtgacacataatatgtcctttggaaaatgcaggtaacaatgacatcctctgtggctctcaaaaccaaagaaaatggctgtcaagtgaatgagtagttgcagagctgatgttacatgttttttactatcagtgtgtctgtttttctaatccttcgtccagattccagatgttctgtttattaytgtttactttttaaattgtagttgaccacaaataatttttaagaaggagaaattattttattttattgcagaatacagtctcagagcaacttgagaagtgttattccagagatcagatctayrtctatgtgggagacatactcattgctcttaacccttttcagagtctgggtctttactccacaaaggtatgtygtatggggtgcattctgttacttcatacacataattatacattcagatacttaaattaatttaaatgaatgccagaaaattttatccagtattttgaataaacagttacataatttttgttaaaacatagaactaggaaaaatagaagayrgagtcaatctgggtgcagtttgtggtcttsctttctccaaatgcgtgtgccagagtgttaattacattcagttattggtaacggctctacattaaatattgtatcactaaacagatgcctttaaaagcatatacttaartctgcttaaaaaggtatgtacttaatgtatgtctgccgctgaactgagtatgggagcgtcaaaagtataattacattgtttatgtagataatacatacttaatggctttaaaaattgtcactgtgagttaaaaattccttttgatgtattattggcttcattaatatcacaaacatgttttatgaatatgaatatataattatcaattatttaaccactggtggcttacatatagaatactattctggaattaaacaaggttstttttcatttttaattggactcattctcttctggctatttgtgtactccagaaacttatttaatactgttcctaatagttgtttttgtgtgtgaaaagtacatatctctgtcatcttttgccatcctaaaatttacagaaataacagtaaatttatgagccttgacctatgtttcaggagatacgggttttrgtgcaatcytgctatcaattcactgtgtgatcttggacaaatcaaatgagagaatgtatgttaaatgaygtgaaaggaaaaaagtggtcatcatgtgtgagacattattatgtccaaggagcagttaacaaastgaaacccgatcgtcttatttttaatgtatgctttcatttaaatacataatggaattttgaaaccttacattctgctttggaagtggaatgcagaatcttttaaattactttatgtcatatcatatttctgggctgttttgtgtcaggctcttattttacatagttatacattyagatatatgtgcaatatgtgtgtaacatgtatgtaataatrttttggtggaatgaaatggtgtttttatttatactttgctttaaaaattggagctatatttgtaaataattcaggacttaaataaaaacaaaaagccctacaaaatgtattctttttaacctttagcattccaaactatatattggatcaaagagaactgccagtcctcctcacatttttgcaatggctgacttaggwtatcaatctatgataacatataattcagatcaggtaagaagagtctcccattcttagaaatttacctcktagttacttaaatgtcacttaattttgaggataaggtcttctcacagttttcttttctatgtatagtgcattgttatttctggagaaagtggtgctggaaagactgaaaatgctcatcttttagttcagcagctgacagtgcttggaaaggtataatttatttttttctctgtcccatcagaaatatttgttgaatttcataacttaatataactgattagattaatattctctagtatctcacatttaataatgtacagaaattttaaaatacagttgttatcctttgagagtttaaaataatgagcaatatgaaaagcatgtactctgttttgaggattttctaacttttatcacacttattaggcaaggcttataaaggtgattttcattgtttttagtcccagtgcatttattgaatgctttctttactttttctccttttgttgctagcaggttaaaagagagtcaacaaacaaaaatcaattgtgtttacataccatatgtatatactagtaatggtcaattgcaaattgaatcttaaaagtgccattaacaataaaatcaaaaaaacatgaactatgtatatctaaatattatatatgtgcaagatttgtttgctgaaaactgaaagagttaaaagaaataaaagacctaaataaacgaagagatataacatgatcatggattaagtgactccatattattaagacgtcagtcttctacaaattgatctatagatataatgcaattacaataaaaatccaaacaggatttttttttttggtgggaattgacaaggtgactcaaaaatatatattgaagggcaaaggaactagaataaccaaacaatcttgagaaagaacaaagttggaggattcatgcaaccttatttccagacttgctgtaaagctgcaatagtcaagacagtgtgtcattaaagaaaggacgacatacagattgactgaacaaaatagtgaggctacttatatatggtttattgatttttgacaaggttgtaaaattcattaattaagaaaggtggtcttttcaacaaatagtgttgaaataattggataggcccatacaaaaaaaagaacattaatctatactcacatgttatacaaatttttaactcaaaatggatcatagatctaaacataaaaccaaaagccataaaatttctacaagaaaacataggaaaagttctttgtgatgttgagttaggtaaagagttattagattcaacacaaaatgcataatttataaatggaaaaatttgattttgtcaaaattaagaatgtctgttctctgaggacactgttacaaaaatgaaaacacaacccacagactcagagaaaatatttgcaagacacacaactagtaaaggacttgtatatgaaaaaaactcatacaaatcaataagaaatgaaatgacaatttaaaaacaaacataatgtttgaacagtcacttcaccaaagatgatatgtatggtacgtaaacaaatgaaaagttgctcaacatcagtatcatttgggaatgcaagttaaaaccacaagaaaacackattacaaaactattaaaatggctaaaatggctagtgttttttaatctaacaataccaagtactgaaaaagatatgtgtattactccattctcacactgctataaagaactttccgagactgggtaatttataaaggaaagaggtttaattgactcacagttttgcatgactcggaggcctcaggaaacttacaatcatggcagaaggtgaagggcaagcaaggaccctcttcacatggcagcaggagagagaacagtgagagaaggaggaacttgcccaacacttatgaaaccatcagatcttgtgagaattcactcactctcatgagaacagcatgggggaaactgccccatgatccagtcacctcctgtcacctcctttgacatgaggggattacaggtccttccctagacacgtggggattacaaatcaagatgagattttggtggggacacagagccaaaccatatcaatatgtgttaccaaaacaccaggggtttggtctaggtcctgctacttgctgcgcaggaagccaatgactgagatgatgagtattgccaaagaactaggctttaatcgggtgctgcacccaggaaatgggagctgtctcaaatttatctctttgaccaattaaaactaggggtttacataacagggaagacatgtaagaatgtgtaagaacacagaaactagggagagacaaggaagcaataatgatgaatgtggggtctgcatcttattgtctggatgtggtgatctagtgagtttcagttctttgatactttttttgagaggcctgaaggtggttcatcaggagggaactcagataaaacaaattgtaaagttcaagctcyaagaccagaagggtcaattttctatgtttataaaaaaaaaaaatctgtgggactattgggtttcatatggagcaactggaatgctcawatatttctggtgagaatgcaaagtggtacagccactttggaaaacagtttggatgtttcttataagctccacttaccatacaacctagcagttttactgctatgtgcttattcacacgaaatgaaaacctatacagaaacctatagacaaagatttatagagactttatttacaaactccagaaagtggaataaacaaactatagtacattcatacagtgaaatattactcagcaataaaaaggaataaacattgagtccaggagttcaagaccagcctgggcaacatagcaagacctctatgaaaaaatttaaaagttagccaggcatgatggcacatgcctatagtcccagctacttgggaagctgaagtggaaggattgcttgagctaaggaggttgaggttgcagtaagctatgatggcaccaccgcactccagcctgggtgacagaacaagaccctgtctcaaaaaaggaaaaagaacaaacactgatacaagcaataatgaattccatttaattatttttggatgaggccgggagtggtggctcatgcctgtaatcccagcactttgggaggccaaggcgggtggatcaagaggtcaggagttcaagaccatcctggctaacactgaaactccgtcagtactaaaaatacaaaaaattagccaggcgtggtggcaggcgcctgtagtcccaggtgcttgggtggctgaggcaggagaatggcatgaacctgggagacgtgaatggcatgaacctgggaggcagagcttgcagtgagccgagattgcgccactgcactccagcctgggcaacagtgcaagattgcgccactgcactccagcctgggcaacagtgcaagactccgtgtcaaataataataataataatgataataaataaataaataaataattatttttagatgaagctcaaatgcattatgcaagtcaaagaagccagaatcaaaacactgcatactgtgtgattcagtttacatgccattcttgcaaatttaaaacaatacagacagaagcagatcagtgattatcaggaaatgggggtggagagaggggttcactgcaaagagtcatgagacaatttggggtggtgaaggaattatcctatatgtagactgcgatggggrttacatgatggcacatgtaaaaactctcagagctgtacagtataaagggtgactcttactgtatgtaaattataccttaattgttttcaaaaaaggaagctgaggatacacactttgattttccaggtaaagatcttaaagtaagataaaattgtattttaataacattaatggccaaaaaagaaaaaaaactgtttacaatttatgcctgtaaaaatttttattatgatctatatggttataattagtcatgttaaaatttttgccaattctgtgattataggaatcttgtgttgcaaaacaccaataggttcaaggttaaacctaatctctctataaaagagtgaggctgcatagttcaaaacaactacttaattgaatttaattcacttttttccttatgcatttggaatttattctgatttatactgccatgaatggatcaaattgtatctttttgtcatatagctattcagttatcccaataccacttattaaaaacccattctttccataaatttgagatgccacacttatactatactaaatatcctcatgcagtttggtctacttctgattttctgttctgctcctttggccttagtgtctgttcatgcaccagtgtcacactttttattgctgaagttttatatacttcatttttttcttttatatatatataaaatatataatatatattatatktaattatatatacaataatgttatatataatataacatgtaatatatcgtttgcaaatactttttcctaatccacaggctgccatttcattttggtgattgtttcctttgccatgcaggagcttttgactctgacatagtcttattttctttctttgctttttttgcatgagcatttgatgtgatatccaaaaaatcattgccaatgccaatgtccagaagcttttcctctatgttctcttctagaaattttatagtttgtagtctgatatttagatcttttatccattttgaggtgattttttgtgtatggtataagataaggatcaaatttcattattttgtgtgtgtaaatccagttttcccagcaccatttattgaaaaactatcctttctttatgatgtcctcttagtgcccctgtcaaaaatcagttgaccgtaaatgtttgggtttatttgagggctttcatttctattccactagttgatgtgtctgtttttatgccagtaccatactgcttttattactatcaactttgtcatgtagttttaaatcaggaagtaatgatggctctaaatttttcttcctcagaattattttggttagttgaggttttttattatttcatacaaatttttggattttttcttttttaatttttatttattttttttaatttttccatagttatcgggatacaggtggtatttggttacataactaagctctttagtagtgatttgtgagattttggtgcacccatcacccaagcagtatacactgcaccatatttgaagtcttttatcccttgccctgctccagttcttccccacaagtacccaaagtccactgtatcattcttatgcctttgcatcctcatagcttagctctcatgtatcagtgagaacatacgatgtttgtttttccactcctgagttacttcacttacagtaatagtctctcatatatatatatatatgatatatatatgtctctctcatatatatatgatatatatgtctctcatatatgatatatatgtctctcatatatatatgatatatatatgtctctctcatatatatgatatatatatgtctctctcatatatatatgatatatatgtctctcatatatatgatatatatatgtctctctcatatatatatgatatatatgtctctctcatatatatgatatatatatgtctctcatatatatgatatatatgtgtctctctcatatatatctatatgtatctcacagtttctttatccactcattgatttatgggcatttgggttggttccatgattttacgattgtaaattgtgctgctataaacaggcgtgtgcaagtatcttttatgaataatgacttattttcttctgggtggatacccagtagtggaatttctggatcaaatgggagttctactttcagttctttaagaaatcagcatactgttttccatagtggctgtactagtttacattcccaccagcagtgtagaagtgttctctgttcaccacatccacaccaacatctgctgttttttgattttttggttatggtcattcttgcaggagtaaggtggtatcacattgtggttttgatttgcattttcctgatcattagtgatgttgaccattttttcatatgtttgttggccatttttacatcttctttagagaattgtctattcatgtccttaacccactttttgatgagattgtttgtttttttcttactgatttgtttgagttcattgtagattttggttattagtcctttgtcagatgtatagattgtgaagattttttttcccactctgtgggttttctctttactctgctgacttttccttttgccatgcaaaagctctttggtttaattaggtccaagttatttatctttgctttggttgcattttcttttgggttcttggtcatgaaatccttgcctatgccaatgtctaaaagggtttttccaatgttaccttctagaatttttatagtttcaggtattaagtcctgaatccatcttgagttgatttttgtgtaaggtgagagatgaggatccagtttcattctcctacatgtggctagccaattatcccagcaccatttgttgaaaagggtgtcttttccagattttatgtttttatttgctttgttgaagatcagttggctgtaagtatttggatttatttccaggttctctattttgttccattggtctatgtgtctatttttatacgagtaccatgctgttttggtgactatggccttatactgtagtttgaaatcaagtagtgtgatgcctcaagattcgttccttttgcttagtcttgctttggctatgtgggctctgttttggttgcatatgaattttagaattgttttttcctaattctgtgaagaatgatggtggtattttaatggggatttcattgaagttrtagattgcttttggcagtattgtcattttcacaatactgattctacccatccaggagcatgggatgtgtttccattcatgtcatctatgatttatttcagcagtgttttgtagttttccttgtagaggtcttttagctccttggttaggtatattcctaaggttttttttttttttttttttttgcagctgttgtaaaaggggttgagttttttgtttgattctccacttggttgttgttggtatatagaagaattactgatttgtatatattaatctcgtatctggaaactttgctgaattcttttatcagttctagttttctggaggagtccttagggttttcaaggtaaattatcatatcatcagcaaatagtgacagttcgacttcctctctactgatttggatgccctatatttctttctctttctgattgctctggctaggacttccagtgttatgttgaagacgagtggtaagaatggggatccttgtcttgttcccattctcagagggaatgctttcaacttttcctcattcagtattacgttggctgtgggtttgtcatagatggcttttattacattaagatatgtcccttgtatgctaatttttctgagagttttaatcataaagtgatgctggattttgtcaaatgcttttcctgcatctattgagatgatcttgtgatttttgtttttaattctgattatgtggtgtatcacatttattgacttgtgtatgtgaaaccatccctgcatccctagtatgaaacccatttgatcatggtggattatctttttgatatgttgttggactcagttagctagtattttgttaaggattttagcatctttgttcatcaaggatataggtctgtagttttcttttttggttatatcctttcctggttttggtattagggtgatgctggttttatagaatgaattagggacagttccttctttctctatcttgtggaatagtgtcaaaaaggttagtamcaattcttctttaatgtctggtagaattctgctgtgaatccatctggtcctggactttttttttttttttggtaattttaaaattacaatttcaatcttgctgcttgttattggtctgttcaragtatttgattcttcctgatttaagctacaagggttgtatttttccaggaatttattcatctcttctaggttttctagtttatgtgtgtaaaggtgttcatagtagccttgagtgatcttttgtatttcagtggtgtcagttgtaatatctcctgtttcatttcttaatgaggttatttgaatttttttcttttcttttcttggttaatcttgctaatggtctatcaattttatttatcttttcaaagaaccagctttttgtttcatttatcttttgtggggttttttgtttgtttgtttcaatttcatttagttctgccctgatcttggttatttcctttcttctctttggtttgggtttggtttgttcttgtttctctagttccttgaggtgtgactttagaatgtcagtttgtgttctttcagtttttttgatgtaagcatttagggctatgaactttccttttagcaccgcctttgctgtatactagaggttttgataggttgtgtcattgttgttcagttcgaagaattttttaatttccctcttgattttgtttttgactcaatgctcattcaggagcaggttatttgatttccatgtatttgcatgattttgaaggtttcttttggagttgatttccagttttattccttctggtctgagagagtgcttggtataatataacttcaattttcttaaatttattgaagctcgttttatagcctatcatatggtctatcttggagaaagtyccatgcactgttgaatagaatgtatattctgcggttgttggatgaaatgttctgtatatatctgttaagtccatttgttccaaggtatagtttaaatccattgtttctttgttgactttctgccttgatgacctgtctagtgctgtcagtggagtattgaagtctcccactataattgtgttgctgtctatctcatttcttaggtctattagtaattgctttataaatctgggatctccagtgttaggtgcacatatgtttaggattgcratattttcctcttggacaaggccttttaccattatataatgtccctctttgtctcttttaaagtttgttttgtctgatataataatagctacccctgcttgcttttggtgtccatttgcatgaaatgcctttttccacccctttactttaagtttatgtgagtctttatgtgttagatgagtcccctgaatgcagcagatagttgattgttgagttcttatccattctgcagttccgtatcttttaagtggagcctttaggacatttacattcaatgttagtattgagatgtgatatayggttgcattcatcatgctgtttgttgcycgtgtacttttgattttgtttttttgtttctgcttttaatttatatttttgtttcataggtcctgtgtgatttatgctttaaagatgttctgttttgatgtggttccaggattcatttcaagatttagagctccttttagcagttcttatagtggtggcttggtaatggtgaattctctcagcatttgttcatctgaaaaagactgtatctttccttcatatatgatgcttagtttcgctggatacaaaattcttggctgataattgttttgtttgaggaggctgaagatagggtcccaattccttctagcttgtaaggtttctgctgagaaatctgctgttaatctgtatgctttcccttttaggttacctggtgcttctgtctcacagctcttaagattcttttcttcatcttaattttggataacctgatgagatgagagtgtgcctagatgaagaccttattgtgatgaatttcccgggtattctttgtgcttcttgtatttggatgtctaggtctctagcaaggacagggaaattttccttgattatccccacaaatatgttttccaagccttaagaattctcttcttcctcagggacagagattattcttagatttggttgtttaacataatcccacatttcttggaggctttgttcatattttcttattcttttttctttgtctttgttggattaggttaatttgaagaccttgtcttcgagctctgaatttctttcttctacttgttcaattattttgctgagactttccacagcatttcacatctctaaaagtgtatccaaagtttcctgaattttttattgctttttctttaagctrtctatttccttgaatatttctcccttcacttcttgtatcatttttcagatttccttgtattgagcttcacctttctctgttccctccctgattagcttaataactaacctcttgaattctttctcaggtaaatctgggttttttttttttttcagttcagatccattgctggtgaactagtgtaatttttttggggggrggyggggcgggggtgggtgttgaagagccttgttttgtcatattaccagggttggttttctggttcctttttatttgggtaggctctatcagagggaaagtctagggctgaaggctgttattcagattcttttgtcccacagggtgttcccttgatgtagtactctccctcttttcctatggatgtggcttcctgtgagctgaactgcagtgattgttttctctcttctgggtcaagccacccagcgagtctgcccagctctgggctgctgctgggggttgtccacacagagtcctgtgatgtaaaccatctatgggtctctcagccatggataccagcacgtgttctggtggaggtagtagggggagtgcagtggactccatgaagtttcttagctttggtggtttaatgctctatttttgtgctggttggcctcctgccaggaggtggcactttccagaaagtatcagctgtggtagtatggggtggaaccggcrgtgggtggggccctagaattcccaagattatatgcccttccccccccccccscccccgctaccagggtgggtagggaaggaccgtcaggcgggggcagggccaggtgtgtctgagttcagactctccttgggcgggtcttgctgtggctgctgtgtgggatgggggtgagattcccaggtcactggagttgtgtacctaggaggattattgctgcttctgctgagtcatgcaggttgtcagggaaatgggggaaagctggcagtcaaaggcctcacccagctcccatgcaaactgaagggcgggtctcactcccaccatgcccccgcaacaactccgagtccatttctaggtagagggtgaaaatgggcttgaaaacctgccgcaggctatcctcctcccagctgcaaaagaaaagtgcttggctcttccctgcctgtggggtctgcacaccagattggcaccctcccccgagttggggccagacttctcgccccattcaaattgttacaaagttcagctaaagatttccttcttcctgtgcagttttacctcctgctcctctgaccaccctaccattggatccctgtggtgccaggcaggagtggcctgctaggggacccaggaagctcccagggcttttctgctgcttcctctacccctatattgtgcttggctctccaaatggattcagttccgtgtaaagccagaaacttctcccacaaacagaccttcaccttctcagcttctccagtggggatgtgtgttcgggagaggagggtcttcctttcccacttctgcagttgggacactcacagtatttggagggtctcccgggtcctgcaggagcaatccgctttctttagaggatctatgggtcctcttgagattgctggtttgttcttgcagttgatctggagctaaaattcacaatgcaagcctctgcacgctgctctttctggagctgcaatctagtcctgtctcccatctgccatgatgattgacccttcctgggattgtttttttctgtttctgtgaagaatgccttgggattttgataaggattgcattgattctgtatatttgagtagtatggatattttaacaacattaattcttccgatccctgagataaattttcatttatttktgtcttcctcaacttctttcatcactgttttatagttttcagtgtacagatctgtcacctccttggttaaatttattcctaatgttttgtttttatgcttttgttaatgggattgctttcttgatttctttttcagttaggttgttatttatttataaaaatgttatttacttttatatgttgattttgtatcctaagattttattgagttattacttctaacagttatttttttgggatatttggggctttttacaggtaggatcatgttatctgcaaatgcagtagtctccacttaccccacaggggatatgatccaagatacacttgtggttgccagaaactgcagataatttcaaaccctatatatactattttttcctaaacatccctatgataaagtttaaattataaattaggcacaataagagattaacaataactaaaaataaartataacactatactgtaataaaggttatatgaatatggtctctttctctctctctctttttctctctctctctctctctctcagaataccttagtttcacttgtttcaggggatcccttgctgacttctttgtataggctcaatgctttctggtgcaaccactgacaccaatcagaaaacattttctgttcatgtcttccacccacaaatttaatgccttttaatcttaactgagtactgatcatgcactgtgactatgacttttggaatatgatatgtgacagtaaaactagcacaagtttctttttccttcttcacaatttcacagatagtagaccgcagcatacaattttttttcttcccttatgaagtcaagaactttcatcttttcacttcaagcaggcaaatatggtttctctttgttgtattcgaattgtcagcatgactactcttgtgctttggggccattaagtaaaataaagattatttgactgcaagaactgtgatactgtgacaaactgagagggctactaagtcgggtaacaggtgggtagcatatacaacatggatacattgggcaaaggaaggattcactttccaggtgggacagagtggsgtggcacagatttaatcacactactcagagtggcatgcaatttaaaacttagaaattatttatttctggaatttttcatttaatagttttagaccatggttgactgtaggtaactggctctatggtagagataattttacttcttcctttctgatttgggtgccttttatttctttatcttgtctggttgctcttattagtacttccagtactatgttgaatggaagtgaagagagtgcgcattttttgcattgtaacagatactattggaaaagcttttagtttctcctcattgattataatgttagctgtgaatttttcataaattgcctatattatgctgaggaactttctttctatacctaaactgttgagagtccacatcaagaaaagatgttgtggtatgttaaatggtcttctataactcatatatatgatgtagattattctgtggttgaaaaatattaaaaaatgtgtcttctcaasgtaaagaaacttattaccactttgcttaatattgcttttctattgcctaagaaaaatttatataattgtaggtagctcctgtattctttgggaatgaaaatggtgatgccaaagaatatttcattccttccaaaatgtcctttttcttcctgcagaatactgctacttaatggaaatcacagcaagaccagcaatttctagatagttcgtaagaatctgggacattctgtcaatagaaagataatagctatagaaaggcctcttatgagttataccttagtaaatgcttttctttttgtaatctcataggaaaaattgaatacagcttccacttttaaaattaaaaaaagaagaggtgttggactttgtcagatactttttctgcatcagttgagatgattatgtggttttaatctttgattctgttaatatgttgaatcatattgtttgatttgcatatgttaagctagacttgcatgccagggatagattttgcttggacatgatgtataatctttttaatatgttattggatttggtttgctaatattttattgaggatttttgcatcagtgttcatcagagaaattggcctgtggttttcttttcttgtgatgcctttatctgggttaggtagtaacgtaatgctggcttcataaatgtagttgaaggtattccctctagctctatttttttaattatttatttatttgtttttcttagagacagagtctcactctgtcacccaggctggagtacagtggcataatcacagctcactgcagtgtctgaactcctgggctcaagcgacccttctgcttcagccttccaagtagctgggactacaggcatgtgccactgcacctggctaattttataattcgttgtacagatgaggtctcactttgttgcccaggctggtctcaaactcctggcttcaagctgtcctcccatcttggcctctcaaaatgctggaattatagacattagccacactatgcctggcctagctctactttttagaagagtttaagaagtattggtattgattttcttcaaatgtttggtggaattcagctgtgaagccaccttatcctaggcttttctttgttgggaggttttgattacttcttcaatttctttatttgtttttggtctgttcaggctttctaattctttctgactcaattttggtaggttgtatttttctaagaatttatctacttccaggctacccaaattgcttgtagataattgttcataatagtccctatgatcctttttatttctgatacacctgttgtaatttctctactttcattttttattttacttatcttagtcatctctcttattttyttagactagttaagggtttgtcaatcttattttttcaaaaatgaaactcattttattgattctttttatagtttttcctttctctatttgatttatttttgctcagattttgattttttttcctttcttctgctaattttggctttagctttttctttattttttagttccttgaggcattatgttagactatttattttggagctttcttcttttttaatgtaggaatttattgctacaaacttctgtcttagaattgcctttgctgcattccataggcttggtatgttgtgttttccttgctgtttgtctcaaggtatttttttactttcccttttactttcttctttgaccaattggttgttcaggagtaccttgtttaatttccacatatttgatcatctgtgatgctcctgcttaggtgtgccagaggcttggaggctcagggtgcaaggtgccacctcacctgagatgtgtggtggcagcaactacttcagtgttcaggaggcctgyggccctctgagagcagagtgctgcctcagctctggtggaagggagctccctcagccaggctcagagcctgtgcagactgcaggggtctccagtcgcaatgactgcaagtgtccacagtagtgagagaggttgctggggtatcttgcttaccttttccttgcagggagctgtccttccttcctgcttgtgagctgatccccacttggggcatgaggtggtaaaggtaaggtgtttcttttccttctctatgtggcctttctgggtttccgtgctctacaggatttcttctggctgcttttttgctgttctccagtgtgctcctttagttattttggtttaaatgtacttgtttactcatttgcaggtagggggaggcttgaaggtgtattagcccattctcacactgctataaagaactacctgagactgggtaatttataaagaaaagaagtgtaattgactcacagctccacatggctgggaaggcctcaaaaaaacttacaatcgtgggcagaaggtgaagggcaagcaagcacarcaaagcaggagagagagaaagaggcagcaaagggggaaatgccactgttaaaccatcaggtctcatgagaactcagtcattatcacaagaacagtgagggggaaatccgcccccatgatttaatcacctctcaccaggccccctcccctgacacgtggggattacaatttgacatgagatttgggtggggacacagagccaaaccatatcagagggagagcactaggagcttctggccaaccatcttgatgtcactcctaattcaaaatgatgagtaggaagaattccatgttgctgttaaaaaataattgactggttttagtatcttctatcagatgtgttgacctagtggcttaatataacctctccttaccagatttgtgaccctytcgggagtggaagagccaggagagacctaaaaaaaaaaggtggtgctaccccaggtgtctgatctcagccttttcttcccccttgcccatcaaccaccctctccttacttctagaagtatcattctaaaagrttttaacaacagtgagataagatttaatgtggggcacgggggcagtgaggcacagcatattatcctggtgtagaggagctgaacacttgaatgaattttctcacgggtctttgctattctgtcctgatctgcaggctgatagagtttctcatcaatgataaattaattgtgtgtgaatgtggttctgtagatgtcagcaaacttcttaatctaatctctttgtcttgttttagattaatgttaattggggataggwatatatatattttcagattcctacccttatcacatcttatcttgtttttacttatgtccttgataaggatttaccagatgcaaaaacgaggtgtttggtagatagaacttacctttgaaatatgcagtcttccaaatcttacttaacaggtcactgctattcaatatatgccaatgaaratgttatctcacctttttcatgggtgcaaggccagcccaaagcattttaaagagccaagttcatcccccaaattactacactcttcttccacaccttattgcctcttttataagatacccaaagttcttacacagcctcaaaacttcattgtgaatgccccctccaacccactcaaattctaatgtagtctatgttccagaaatagccaccactgctctccctcaacatagaaactttgcagtaactctaacatagttgatctcggtaaagtattaaggtaggtattacactgaaaatctacttaagctaacttctgccaagttgtgaataactaatacctccctaaacctctgggggcagaggttggaatgcctttgtaaaagtgattggctattaacccaaataaatttctactcagtagaatttcaactraagtggtaaagaagaaaaatggaacatacttctttgaggagaggagcataagaggtggggaaggaatagaggtagagccatgtaagcctgctaaccttgacctggtttccactcctcccattcatacttctgagctgttctcagttttcacaattattcccttctctctgcttctgaattaatgagttatctttcctctcttagtttcagggttagcagcttctgtggaagccagtaaagtggttctggctttggggactatttggatgggggcccacgcaggtggaggaggaataacagaatgacaggtgtacttcaatgtgcgtaggctgcttataaattatgtttgtaartcaggcactgaacagaactgcgcttgaatagaaaagtatagaatatctccttgtccctttttaagaaaacaagtgagtgaatccacatatgggagggggaaaatagaccaggatgtaacatctgccaatatatcaggaacatgcttttgtatgtttatatctacataaattgcttaccaaagaagagacatttcattatataccaaattaattttttatgtttttaaaaatatcttaatattttctatttaggctaataacagaaccttgcaagagaagattttacaagtgaacaatttggtagaagcctttggcaatgcctgcactattataaatgacaattctagcagatttggaaaatacttagaaatgaaattcacctcttctggagcggtagtgggagcacagatttctgaatatctcctggaaaaatcccgagttatccaccaagctatgtaagtttatttcaaatctctcctattttggaggaagcagaagcaaacataatactttaatagtaaaatgtctttctcattcaataaaattttatttatcacttactatatgcaaagcacttactattgagaatgaagagatccatcagcactgtcttattctcaaatatatgttacatccaatagaggaattaatgtataacctaaaatttatgctgccagatagaaaacctaagcccatcatagaggtactaacagcgtaaattagagaccattctgacatagcagagaatatatttatctatacaaaattaatgtgaaatttaattagaagtaactgagtccttttctgttttaaatgctagcatatataaatagatctttgkattctattcttcctatgtttatatacaagggaccaaataaaagattcaggaaggagctttatcatattgaccttttattgctggctgatttaagccatcaatactcttcataatgctttgatattaagttgaatgaattccttttgcgggtttgtagcttaatgacaaagtttctctcctgtctcacaaaacatctttgttattctaaagaggaaactatcgttacacattggatttgtaccctggtggttacattattttgcttaaaagcatggcaagttagaatctttcatttttcttatgttggttttatgctaaacatactctacattattgtagtagtatgtcatgttaattcacagtaacataataagctcttgttttatattastacattattatttaatgtaagtgccttcaagcttggtgtcattcaattcatgagtaagtcatgaatagaagttgcctggagtccagctcctaatatggaaaattactctttggtcttcaattaaaaatatggwaggaggccgggcacagtggctcacacctgtaatcccagcactttgggaggccaaggcgggtggatcacgcggtcaggagattgagaccatcctggctaacatggtgaaaccccatctctactaaaaatacaaaaaaktagccgggcgtggtggtgggtgcttgtagccccagctactcgggaggctgagggaggagaatggcgtgaacccaggaggcggagctggcagtgaaccgagatcatgccacttcactccagctggggtgacagagcgagactccatctcaaaaaaaaaaaaatggaaggaatgattattaaacacatatggctttcaactgtggtaccacaccgttttaatccactttgggtaagatatttaaaccttaaagattcttacaggatcttggctctgtaattcattgtatgtatgatttgaaacagtttacttaacctctctgcacctctgtttttcatctttaaaatgaaatagcattagtacctrcctatcaattaagacaaggtacctacagtatatagcacaatgaatggcatatattaagaaccccataagtttaagccattagtagtaatagtagtgttaatagttgattagaaataacatatagcacagtacctgggatattgaagatgttcagtaaatggcagatactatttattgatgtctgtccagtgcccaaaactcagtggacatgtgtgtcagtgccgttgccacccataactagaaggaccgcgggatcttagcagatgtggaaacttagctagttctcaaaaccatttgttctgctttcataattgtgtaagcttctccttcaggcccttcaggaagaactacttaagagtaactaattggtagatggcaccaccatgttgcacaatgtcaagggatataattcacggtgtattctatggagttgagtgcaggaactcagttcatatagaagagcacatgaacagaacactctggagttacacaatgaggccctgagcttgtaaccatagaaataatatcattaatgcttactgaaatatcgtaggatgcattctaagaaatagcatagtcaggattatatttaaggcatgctgtgaattaagtagtttttttccccctaaggaactattctaattttacaagtttgcttattggggaaaagcattccaaattccaaattcacaatcaagtggaaatataactcagttataatttgagcacagctgtctttaatttataacactttttccatttttatatctgttttttctttcacctaatttaattgcatttttaagttccagaggagctttgagtgacctatgaatatgaaaatatcagacatgtgattgatggaagaattcttaataggtacatttacaaattataaatttaattgcactgttatcaatcagggtactgaacagaaagaacaagctcaagggttttaactgagaaaactgtttacagagatcacatgggcattgaagagccaagaatgaatggtgagaagcccatggactaacaggggtgaggagccatggctgccttcctgtctgcaggtggagggaggggcagcactagtgcctggtgccagctgcagctgtggatcaggggctgcctgtctggagctatggccctaatgggacacagccagtcagggagagagcaaggggataacatcccagcctctctctccttcattcgcctgtttcctgcctgtgcttcctattggctgaacccatatggaagccagagagcaagggagcccaagaattgcaggctgtagggattggcccttggggtcccagagcaagacaaagaagagtgtagaatgatttgaggagcagggaagaattagagcagacgagtatctttttttaatgaactcaccctttcttttaagacattttgttcttttcttcggtttttgcctctggcgatgtcatcccagctcaatctctgaccacatttatttttagattacctttctaatgatgatagtactatcttataacttgtgacttaaatccttttctaaacatagatagttttcaaggagaaaattttaaaagaggctacttaatttcaagaataagatgaacctattgaaggcaatgctagataattctcataaatacaaattatagctatttccattgcagtttcctcctgttactacagtttagttcagcaagcattgattgcatttctctgatgtccccagcacttaacaggactctataggakacataaataagtggctgacatggtcctctccattgtggagaaagggaaatgtatttatggagcaattactctatgtcaggcactgcactaagcaccttacagccattatctcttttaattcttccagtcatgtgacagggtgtcattttctcttttaaaagtgagaaactaagagaattttaataagttgcttaatgtcaaaaagctggcaatgactgagttggagtttgaagcctcatccttctgtctgactcccaagcccaccattcatgcatccatccagccatccgtctatttgacacatatttattgagtgcctactgtgtgctaggcacaggagacataaagccaagtaaggcaggattcctgtggtaacacagctcacagtatgatataaaacgtgctgatcactcattggtttctagtctctcatgaaagtaggaaatgagttcatctgctaagattgagcaggtaggtggcaagaggaggggactgaggagactgcatatccaggaggagagagtttacaaggagggagctgtgattaaaaaggaaaaactgaaagtgttgttttacgaataccctgtagtgccttaagaatgcaaagcttcggccgggtgcggtggctcacgcctgtaatcccagcactttgggaggccgaggcgggtggatcatgaggtcaggagattgagaccatcctggctacacggtgaaaccccatctctactaaaaatacaaaaaattagccaggtgtggtggcaggcgcctgtagtcccagctactcaggaggctgaggcaggagaatggcatgaacctgggaggcagagcttgcagtgagccaagatcgtgccactgcactccagcctgggcaacacagcaagactctgtctcaaaaaaaaaaaaatgcaaaccttcattattagctttctaagtctgattgttggccacttcgttgaagattcaaaggtttcacaggtgagttaagctatacccttgtgagtactttgacaccgtttgaggctgtcagaggccttggctgcacaggtaagcttcagggtgcaaagcaggtgaacacacatatgagacagccctgagggccttcctgcaagcagctgagtggaactcactctgaagaagtgttagaagatccacaagtaggaatgaggccacaataagagaaattatatttggtaacttgcaagaccccatgtctgtccccaggcggtcctgacctgggaacccctgaaaacattagcaagtgtgggatactgtagtgctctgtgttcttaagcacagcttgatatggttcgtgaccccgggtaagctttggaggtgtgttcttttcctgtttctttaactttctgattgtccgctgaagatcagtatattcccaatagtatctccagatcttttcaaattataattctcaataaatgtaaactgatgaagagaaatccattaatattgtttgtctaagttttaacacttaacggatacaatgtacaattaatgtacattgttaacaatcacaaatgttaacacttaactgatacaaatgtgatcatgattgttaacacttaattgatacaatgtacaattagtgtacattgtgaacaatgtagtacagtgttaacattcacaattgcactgtattagttaatgttaacaatcacattgttagcacttaactgatacaatgtacatgagtgaagtgcacagtcagtgtgcttcattagaagaaagcaaactgaattatatgctgtgccagtcgtagagaagtttttattattttgtggtgagaaaagacaagaactaaaggaaactttcagttttgttctaacttcactygtatgcaatgttggtgttacttgcattatcactggtgaccacaacaagtaacagaataggatgggttctgaaggaaaggacccagcctctggaccaccccttttcttgaaaccttcacttttctttgccccatgactagattctcctgattcctctcctacctccctgaatttttcttctgttttagatttatccatccagtctcacattgtatatttaccaaagatttgtccctgcagcttttctcgttttttctctacactctctcacttcaaaaattcttctgacattatggcctcaacagagagctctacgtgattgacacccaaagacatacctctccccctctcttaaaactgaaaaacatttacattttttttaaaattgccaactacctacatatcctgctaccatctcaaattcaagtgaatacacatctcaaatctgtttcttttcccatagcccttttcttttggaatggaactatccttctctagttatataagaccccccgactctctcttcactcaggggagagtttcagtgcagaatgcatgctaaccaatagcattgttacttttctctttagaaatgtcttccttccttttgaaatactaacaaggaagaccagagatctgcattattcaccttatcaaactctaccctttcatattaagtatttcaatttgttaactttcaagaaagaccaaacagggtaccttcaataattattagcgtgtctgtcacaagtatcaaacctttaatgttattttaaacctacatgactgatgtgttggagtccttattgagcttctgtaaaaaattattcttgtgatggcttttggcagaaccttggatcaaaactagagattataaaataaagccacagttgttctaaaactccactgcattattggaagagtaaatacatatggatatatctgagttactgttgattctgaggaaaacttctacatactgaaagaatgaataatttcttttttttttttttttttttttgagatggagtctcgctctgttgcccaggctggagtgcagtggcacgatttcggctcattgcaagctctgcctcccgggttcatgccattctcctgcctcagcctccccagcagctgggactacaggtgcctgccaccacgcctggctaattttttgtatttttagtagagacggggtttcaccgtgttagccaggatggtctcgatctcctgaccttgtgatccgcccacctcggcctcccgaagtgctgggattccaggcgtgagccaccgcacrcggcaagaatgaataatttctaaagagagcaatagtaaatttccatctacactgagattatactgcataatatacagggggagaagaccctggaatgtttttaaatcctttcttaccttttaagtaaaataatttgcgtgtaattatgcatatcatgaagtgggcttttttccgttccatgtacttcatatggaaaagaattcaaaggctcctctgttctactaaaaataagcttaataataataattccttttctgaaagtatttcattggccccctaagtttgcwgataaaggctgtggagggggtgaaggaaaggagcagggcaagaggggatgcaggctgctccggaagtttgggtgtgatgagttgaggacccagagcacagttcaggccactgccaaaagtggcaggaaggggagtatccacaacaatttagtgtctcctgccccaacccctatggtggcatccaaagctttgtggtgggatgasagttttataccaatggaaagagaagtaacaatagaaaaaagtgaagacagcaagtccttctggttgagacataattaatttaaccactgtaaaaggaatcctactctgccccaaccccagcctgtgagcctggtgataatggagtgaacagtgaagtgaagattgaggaccatcctaaaacaggaggagatcctagtgggaggacgagaaggggaatgccacagagagatgcaaaccccagggtgtcccagctgaccactaggctcatcaagagtggaagtaaagcagggaagtagagatggggaaactatagagcaggaagttcatcctctgctgtttcagcagagagcctgaaagtgtgatttttccctggagcccactacagcagaaggaagacatgagggaaggagaggggaccccaaggtccaagaaattatgttgtggaacatcctgaagtggaaacttaccttgttgtaatcatattcccttaatggcattattgcagcatctggaaaatgctagttatgctacttagaatcacagagtcatgggatttgagacttataagaaagagattcctcatacaagtgagaaaactgagtctcagaaagacaatattaaaaggtggttaaaggcgtgggctttggggtcaaatagacctgattcaaatccatattaatcatcaactctgtggctttgggggagattgacagctctaatcctcggtttccttctccataaaataggaaacacatgaccacctcaggggcttatggtgggttaatgagacaatgtagcacttgtaaccactggcatggctgtatacattattctttttctgtctgctccactggcatgtaaactccaagaagttagggatttttgacagttttgctcctgctatatccccagcgcctggaacagtgcctggaagtcactcacgaatgtatactgaatgattcctatgaagtgattaagataatttctggaatttaatgacagtggttgttgaaaataatgacaacaataatgaccacagaaagccaaaatgcagtattcagaaaagcccatatcagcactcacagtcgttgttcaaataattatattgtcaagtaacttaagcaagaaatgttcttactaactaccttactgtaaatatctttttttccagtggagaaaaaaattttcatattttttactacatttatgctggtttggctgaaaagaagaaactagcccattacaaactgcctgaaaataagcctcccaggtaatctaccaggttgagctttcatcaataatactttcacttttcccttaattttagacttttatccttccttttatattttttttaggtacctacaaaatgaccacctcagaacagtacaagacatcatgaataatagtttctataaatcccagtatgaattaattgagcaatgtttcaaagtcataggttttacaatggaggtaagtatgaaagacacttgaacttctttagaaagtatctttttatcatcactaatgttaagagcatttattgagtgattaatatataccagcataagtgctttacataaattgaaacagcattatgaaataactggaaatataatatttactttataagtgaagaaatagtggccttgagatataattgaatttcattttgttcttaaccttttattttacttatacttacatttcccatatacatatatgggaaatatatatataaatacatatataattttacataaatatataaattgcatgttctttttagtgcagtctttttaataacaactttattaagatataatttccatacaatataattcacctatttaaggtgtatatttcagtgacctttagtatattcatagagatgtgtattcatgaccataatcatttttagaatattttcatattataaatttttcaccccaaaaagaaatatggtagcaattagcatatttctgatgcaattctgacttcatccctactttctatcactataaatctgctttttctggacactttacatacaagggatcatataatatgtgatctgttgtgactggtttctctcacttagcatgtttgcaaggttcatccatttttgcagcatgtatcagtacttcatttttttttaaagtaagttctttaacgttttatttttttttaattatattttaacttctagggtacatgtgcacaatgtgcaggtttgttacatatgtatacatgtgccatgttggtgtgctgcacacattaactcgtcatttwcattaggtatatctcctaatgctatccctcccccctgcccccaccccatgacaggccccagtgtgtgatgttccccaccctgtgtccaagtcttctcattgttcagtttccacatatgagtgagaacatgcagtgtttcgttttctgtccttgtgatagtttgctgagaatgatggtttccagcttcatccttgtccctacaaagtacatgaactcatccttttttatggctgcatagtattccatgctgtatatgtaccacattttcttaatccagtctatcattggtggacatttgggttggttccaagtctttgctattgtgaatagtgccacaataaacayatgtgtgcatgtgtcttttttgcatgtgtgcatgcaaacatatgtgtgcatgtgcatgtgtgataatcctttgggtatatacccagttaatggaatggctgggtcaaatggtatttctagttctagatccttgaggaatcaccacactgttttccacaatggttgaactagtttacagtcccaccaacagtgtaaaagtgttcctatttctccacatcctctccagcacctgttgtttcctgactttttaatgatcrccattctaactggtgtgagatggtatctcattgtggttttgatttgcatttctctgatggccagtgatgatgagcattttttcttgtgactgctggctgcataaatgtcttgagaagtgtctgttcatatccttcgcccactttttgatggggttgtttgattttttcttgtaaatttgtttaagctatttgtagattctggatataagccctttgtcagatgggtagattgtaaaaattttctcccattctgtaggttgcctattcactctgatggtgtttcttttgctgtgcagaagctctttagtttaattagatcccatttgtcaattttggsttttgttgccattgcttttggtgttttagacatgaagtccttgcccatgcctatgtcctgaatggtattgcctaggttttcttcaagagtttttatgggtttaggtctaatatttaagtctttaatccatgttgaattaatttttgtataaggtgtaaggaagggatccagtttcaactttctacatatggctagccaattttcccagcaccatttattaaacagagaatcctttcccagtttcttgtttttgtcaggtttgtcaaagatcagatggttgtagatgtgtggtattatttctgagggttcttttctgttccattggtctacatctctgttttggtaccagtaccatgctgttttggttactgtagccttgtagtatagtttgaagtcaggtagcatgatgcctccagctttgttcttttggcttagaattgtcttggcaatgtgggctcttttttggttccatatgaactttaaagtagttttttccaattctgtgaagaaagtcattggtagcttgatggagatggcaatgaatctacaaattaccttgagcaatatggccattttcatgatattgattcttcctatccatgagtatggaatattcttccatttgtttgtgtcctcttatttcgttgagcagtggtttgtagttctccttgaagaggtccttcatgtcccttgtaagttggattcctagatattttattctctttgaagcatttgtgaatgggagttcactcatgatttggctctctgtttgtctgttattggtatataggaatggttgtgattttggcacattgattttgtatcctgagactttgctgaagttgcttatcagcttaagcagattttgggctgagatgatggggttttctaaatatacagtcatgtcatctgcaaacagagacagtttgacttcctcttttcctaattgaataccctttatttccttctcctgcctgattgccctggccagaacttccaacactatgttgaataggagtggtgagagagggcatccctgtcttgtgccagttttcaaagggaatgcttccagtttctgccaattcagtatgatattggctgtgggtttgtcataaataactcttattattttgagatatgaaccatcaatacctagtttattgagagtttttagcctgaaggrctgttgaattttgttgaaggccttttctgcatctattgagataatcatgtggtttttgtctttagttctgtttatatgctggattacatatattgatttgcatatgttgaaccagccttgcatcccagggatgaagcccacttgatcatggtggataagctttttgatgtgctgctggattyggtttgccagtattttattgaggatttttgcatcgatgtttatcagggatattgatctaaaattctccttttttgttgtgtctctcccaggctttggtgtcaggctgacgctggcctcataaaatgacttagggaggattccctctttttctattgataggaataatttcagaaggaatggtaccagctcctctttgtacctctggtagaattcggctgtgaatccatctggtcctggactttttttgattcgtaggctattaattattgcctcartttcaaagcccgttggtctattgagggattcaacttcttcctggtttagtcttgggagggtgtatgtgtccaggaatttatccatttcttctagattttctagtttatttgcctagaggtgtttatattaatctgatggtagtttgtatttctgtgggattgatggtggtgtcccctttatcatttttgttgcatctgtttgattcttctctcttttcttctttattagtgttgctagcggtctatcaattttgttaatcttttcaaaaaccagctcctggattcattgattttttgaagagctttttgtgtctctatctacttcagttctgctcttgtcttagttatttcttgccttctgctagcttttgaatgtgtttgctcttgcttctctagttcttttaattgtgatgttagggtgtcaattttagatctttcctgctttctkttgtgggcatttagtgctataaatttccctctacacactgctttaagtgtgtcccagagattctggtatgttgtgtcttcattctcattgctttcatttatttctgccttcatttcgttatgtacccagtagtcattcaggagcaggttgttcagtttccatgtagttgagtggttttgggtgagtttcttaatcctgagttctagtttgattgcactgtggtctgagagacagtttgttatcatttctgttgttttacatttcctgaggagtgctttacttccaactatgtggtcaattttggaataagtgtgatatggtgctgagaagaatgtatattctgttgatttggggtggagagttctgtagatgtctgttaggtctgcttgttgcagagctgagttcaattcctggatatcctttttaactttctgtctcattgatctgtctaatattgacagtggggtgttaaagtctcccattattaatgtgtgggagtctacgtctctttgtaggtctctaaagacttgctttatgaatctgggtgctcctgtattgggtgcatatatatttaggatagttagctcttcttattgaattgattcctttaccattatgtaatggccttctttgtctcttttgatctttgttagtttacagtctgttttatcagagactaggattgcaacccctgcatttttttgttttccatttgcttggtggatcttcctccaaacctttattttgaacctgtgtgtgtctctgcacatgatatgtgtctcctgaatacagcacactgatgggtcttgactctttatccaatttgccagtctgtgtcttttaattggagcatttagcccatttacatttaaagttaatattgttatgtgtgaatttcagcctgtcattatgatgttacctggttattttgcttgttctttgatgcagtttcttcctagcgtcgatggtctttacaatttggcatgtttttgcagtggctggtaccagttgttcctttccacgtttagtgcttccttcaggagctcttgtaaggcaggcctggtggtgacaaaatctctcagcatttgcttgtctgtaaaggattttctttctccttcacttatgaagcttagtttggctggatatgaaattctgggttgaaaattcttttctttaagaattttgaatattggcccccactcttttctggcttgtagagtttctgccaggagatccgctgttagtctgatggacttccctttgtgggtaagccgacctttctctctggctgcccttaatattttttccttcatttcaaccttggtgaatctgacaattatgtgttttggagttgctcttctggaggagtatctttgtggcattttctgtatttcctgaatttgaatgttgtcctgccttgcttggttagggaagttctcctggataatatcctaaagagtgttttccaacttggttccattgtccctgtcactttcaggtacaccaatcagacgtagatttgatcttttcacatcatcccatatttcttggaagctttgtttgtttctttttactcttttttctctaaacttctcttctcgcttcatttcattcatttgatcttcaatcactgatactctttcttccacttgattgaatcagctactgaagcttttgcatgcgtcacatagttctcgtgccatggttttcagctccatcagatcgtttaaggtcttctctacactgtttattctagttagccatttgtctaatcttttttcaaggtttttagcttctttgcagttcaaacatcctcctttagctcggagaagtctgttattaccgatcatctgaagtcttcttctctcaactcatcaaagtgattctccgtccagctttgttccgttgctggtgaggagctgcattcctttggaggagaagaggccctctgatttttagaattttcagcttttctgctctagtttctccccatctttgtggttttatctacctttggtctttaatgatggtgatgtacagatgggcttttggtgtgtatgtcctttctatttgttggctttccttctaacagtcaggaccctcagctgcaggtcattggaatttgctggaggtcccctccagaccctgtttgtctgggtatcaccagcggaggctgcagaaccgcaaatattgcagaatggcaaatattgctgcctgatccttcctctggaagcttcatctcagaggggcacctggctatatgaggtgtcagtcggcccctactgggaggtgtctcctggttaggctactcaggggtcagggacccacttgaggaggcagtctatccattctcagatctcaaactccrtgctgggagaaccactactctcttcaaagctgtcagacagggacgtttaagtctgtagaagtttctgctgtcttttgttcagctatgcccttcccccagaggtggagtctacaaaggcgggcaggcctccttgagctgtggtggactccacccacttcgagcttcccagctgctttgtttacctactcaagcctcagcaatggctgcagccttgctgccaccttgcagttcaatctcagactgctgtgctagcagtgagtgaggctctgtgggcatggaaccctcygggccatgtgtgggatataatctcctggtgtgccgtttgctaagaccattggaaaagcacagtattaggrtgggagtgtcccgattttccaggtaccatctgtcacggcttcccttggcttgaaagggaattccccgaccccttgtgcttcccaggtgaggcgatgccctgctctgcttcagctcacactccgtgggctgcacccactgtctgacaagccccagtgagatgaacctggtacctcagttggaaatgcagaaatcacccatcttcttgttgctcacgctgggagctgtagactggagctgttcctattcggccatcttggagtcagtagttcatttttttattgttaaataatatttcattttatgggtatacttcatgttatttgcccattcattagttgatgggcaacatttgggttgtttttgctttttgtctattatgaataatgctgctatgaacattcatgtacaacattttgtgtggatgtaagtgttcatttatctttgatatacacctagcattgcaaatgctgaatagggtaactctttgtttaaccttttcactaaattgttcaactgttctccaaaatcactgcaccattttacattcccaccagcactgtctgaaggttccaatttctgcatgtcttcgtcaacacttattgttatctgtcattttgattatagtgattctagtgaatgtgaagtggtatcacatgagggtttgggtgaatttacctaataacttatggtgctgaacttctttttcatgtacttattggtcatctgtggctcttttttggataaatgtctgttcagatcctttgcatattttctaattgggttattgtctttttattattgagttgtagaaattttttataatctaggtatactagccccttatcagatgtctgatttgcaaaaaaaaaaaaaattatagtatttgttatattttccctttcttgatggtgtcctttgaagcacagaagtttttaaattgtatgaagttcagtttatctgttttttcttttattgtttgtgattttagtgttgtatagaaaaccattgcctaatccaaggtcacaaagatttatgcctaagctttcttcttatagttgtatagttttagctcttacatttaggtcattgttccattttgagttaatttttgtgcatattgtgaagtagggatccagcttcattcctttgcttctggacattcagtgtaccrgcaccattgttggaaagattatcctttccccattgttcttggtcaaatatcaattaaccacaaatatataggtttatttctggactctcaattctatctcattgatttatatatttatccttataccagtatcacacatgagtatcgcagctatgtaataagtattgagattgggaagcataaatcctcctacaactttgttctttttttaaaattttttttggcttttcagggtcagtcccttaaactttaatataaatttgaaggatcaccttgtcaatttctagcacctttaaaaaaatttttttgttcagctccctcttccccatcttacctccttaaatctacatctgctctctttctcctcccctagttaatggatgtatacatagtccaatattccatatttatttacctagtcccagagtcttgtttatagatmcacacacacacacacacacacacacacacccatgcaratgttgacacatgcatatatatggtgagatgatcattgttttattaatatgggattatattacacacacttttctatatctgatttttctcactcagcaatacctgtgaaaatcccttcaaatcaccaaatatatcactgaatcaccccttttaaaggtagtataatgttccacagtgtgtactaccataatttattcagccrttcagccatgactgggcatataactataaatgtttccagatctttgctaccatgagcaaarctgaagtatgtccttattgactggttcatttctttctgtggaataggttccgttcctagtagtggaatttctgggttaaaaggtgtatattttttaaatttgaatagaacttgcaagattgccttccaatagttctgtagcacttcacatttccaccaacaatacatattaatacccttcccccactcattcctgccagcaatgtgttgtggctttttaaatatttcctagtctggtgggtgaaagtaacatgttgttttaaatttgcgtatccttgacaaataatatatttgaacatctttctatttgtttgccagctgcttagatttactcttatgaattgtatatttatatatgttgccccttttattgaattatttatatgctttatgtcaatttgtaagggctcattgaatattatagacattatatgtttctatcatttgtgttataaatgtttctttatacttgtataatttgtctgtgacttactttttgtcatatttgtttaccataatgaagttctaaattttcgtttattcaaacaaatttacgtttttgttcatagtatctaggtctctactttcagttaaaaagttttcccctaactctaggttgtatgtgtagtctcctagattttcttgaaagtttaaaaaataaatttatctttaatcatttgaaatttattttatggtaccagatggagcaccacttttcttttattccagatggagagccagaattgacttatcctatattaaggccttatatgacatataatctatttttgatgcctctattttagccatcaatctatgttttctacttctatacagtattctgttgtcttgattacagtggtttgattctgtgtttttctagtaaggctattcctgctctcgctttcttcttttccatattttccttagctattgtttagcattgcttgtccatacaaactgtaagatcaatatattcaattccaacaaccccacttggacttttaaytagaattatattgaatttatatattaatttttggagcactgtgattttcatgatatgtatgtcttctcatcccaaattatgaagcgacttatgtactttttgtcttacaactttgtttagatgctgtttcgagtttttaataataatctatacttatattcatctggaacttgcatcttatttttaaatttattaataactatgttaaggtttttattataagggaaatgaattttccaatggcagaatttttgagatatataatcatgtcattagcaaaaagaagagttttacccctttcatgtcatgtcatcatttctttttcttgtttgtgcttagatcatctaagactagtctaagtcaatattaagtaataatgattatagttggcctctgagtctagtttctgattttaagtggttttagtgttttgctatttttttggaaaagaatatttatcataattaatttccttttattgctgttttatttagggttgttattaggaattctgctgaattttaccaaatttatttttagctgctattgatataatcatattttttcctacagcagtttgttgatgcctccttattctgttgatagatttcttaatatttaaatatccttacatttctggaataaacccaatagagtccatctttatcatctttttgataaatttctgtatctatgagctagtattttatttcgaatttttgcatctatatatttagcaatgaaatgtatctattttttttcttttatatcagatttgattactaaagttatgccagtgagcttttttctttttttctttggcctatgtgagttaaaatcagttcccaatgttctctgaagacaagaagcaccttgacacacatacatgagtcttaaccagacctaccgtatagaaatttctgggagagatctagtatttgctgccattacagcaccccaagtaattcttatcattagagaagactggggacaatgtcttttaaaaccttaaataaagattagaggctgggcgcagtggctcacgcctgtaatcccagcactttgggaggccgaggcgggtggatcacgaggtcaggagatcaagaccatcctggctaacacagtgaaaccccgtctctactcaaaatacaaaaaattagccaggcgtggtggcaggcgcctgtaatcctagctacttcggaggctgaggcagaaaaatcacttgaacccgggaagcagaggttgcaacgagccaagatcacaccattgcactccagcctgggcgaaaagagtgaaacaccatctcaaaaaaaaaaaaaaaaaaagattagggtaaaactcaactgtgtctgacccttgggcctttttgatattgagtctttaattacctttctgattcttctatgataattatctttttgaatttgtttttctctttcaggttatttgtattttgctaagaaattatcatgaaatcttatgccatagattttcatgctgaattttcttataatactttaaattaatcccatatctctggctttgtttcctttctcattccaaatagaaattctcatttttgcccttactcttttatctttaattgggtttacaagggggtttcgaatcttaaaaaaaagagaaaggcaaaaccacaacagctattggatgcatttacccatccgataaatgttttcattgtctgtattattggttttaatttgatttttatatttttattaatttattcatttgtttcttctgttctttttttttaagagaatacttggtttctctatttctttacatttgttattgaataatgaaagcatttaaggctagaaatttatccccaagtaataaacacttccttatgtcccataggttgtattttttaatttttgtaacaaagtatcgtgtttaatagggacgcctaaggcttttagagaagctttcagactttgctcrtaacagtttattgtttgctacattgattcagagtgtgtgataaaagaagattttactctaaatgtgaatcaggcttttagatgaactctttctggaattttagatgaactctttccgcaatttgttgaattttgatttcattttcataaatgacactcctgcagctttaaacagtcaatgtgtctgcttaagaagtttaccaagatcccttgggttatcagatctctagtaagagcttaagctaaaacaaacaaacaaaaaactaattcttcaattattctcaaaaaaattagaaaatttaatcaacaatatataaagtgtagaaatgctaatagacgtgaaactttataaaaattattcaaattgtatgctatgaaattattgaatctaatgattttgtagtctgtttttaaggcactgttgactcccttctaaaatggaagactatcagcaataactttagttccatgatcatctgcttgccaaaagtaatatttgtaaagatgtaagtgcttttggcatattctccaaatagggaaattctgctcttggcagctctgaagacaggaatctctcagtcttgccttctctttgaaagcttttggctccatcttgagtatccttgctgcaggcttacaggaggtggggactggggaatgttttcaagaccttacccctagaagatgaagtgtgatctttaccaactgggtgaggttggagaagaagcagagtaaatggattttattttggttggaaactagggccctgccttacaagggaggtttaggtaaatccagtgccatctttgtccatcaagatcttagaaatcttcactgatccatctccccaaagctaactttataacccagaaattttccagacagttatttgatagaacaagaatacatagattcaaatggaattccaattgtttagttcagcactatcttatttaataaggacttcttgagagattttgttttgtacaatccatgtaagaatggaaaatgtagaataatgatatgacaagttgcccactctaacttaagaaatgagaaataaaaattactatgaaaggaactttgttagacttaactgacaaatcagacagtatctgtaacaatgaatatttagagtacagtactaccctcttatctgcagtttcactttctgcaatcccagttacctgtagtcaactgcagtttgaaaatattaaacagaaaattctagaaataaacagttttaaatagcatgctgtgctgagtagcatgatgaaatcccactccttccatgctggtaaatgaatcttctctwtgtctggcatgcccatgctgtataggctacctgccccttagccaattagtaaccctgttggttatcagttcaaaaatacatagtacatatatagagagttcagttctatctgtgatttcaggaatccactggaggtcttgggaggtatccaccatggattagaggggactactataatctggtgtgttacagtcaaacaattgttgctgtgaaacattccaacttttaaagtaaacttttctagtatgggctttctccttaaccaagagaaattcagatttgatgaagagactctttcctggctacttttacaggtccagaatttagaatctctcattgaattctgaataaacattgctactctgtttctagaggaattaattgcttgtagggaaactggtgaaagagtttgaggagccagargggaatctggaaggctatttccagcaccaatcaagaattattaacaattcctcttgggaccagagcgggagttattgcaatgagttcccccaaagagttctgattttaccagaacattatgaattataaggacaacaagaaagttgtactctagactcaatggcaagccaagattgaatgcatccttaggaagacactttactcgcaaaaagtcgtgagctgaagttaaatgactttttggcttaaaagtagagactccaacttgaccatcttcatttctgaatcatgctttctctccattgattcatggaccctacctggaactttggattgacaagtcaggctgtccattctatatctactacactgcagctgtaatttgggaactcagtggttctgtggtctctaggtcagaaaggagatgaatgagccccttctctctcaatgcattagatggtttttaggctataaaatggaacaaaaatccattgtttaatgcattttctctgagggcttttggagaagctttcacactttgctcttagctgtaatttgttacagtgagacagtacctggttcttaagtggccagtatgtgaatctcattcccccatctccctccctccaaaaaaaattaagcagcaaaggttgtcaggatgtctggaatgatacataaggacaggaacattggcttcaccatagcaccttttgtctgagagttgaaagaaaatgatgaggagtgagtaggagttgaacaattgagagatcactaagcatttagaacttatcatggatacctcgtgtaaaggatagagtgtgcatacccttgtacatgccatsaggtctgcgtggtaggcatcctatcatgctgaaatttgtgccattgaccttacctgattgtcttttggaaacaaggtctgaactgtaggacctggagtcagagatgmccctgatatatttctggaaaatcgttttttgggttttcttttctttttttttttttttttaagagatgggatctctctctgttgcccaggctggagtgcagtagtacagctcactgtagtttcaaactcctgagctcaatctgtcctcccacttcaacctcctgatcagctgggactataggtgattacaaccatgcccagctaactttttaaaacattttttgtagagatgcatctcactatgttgcccaggctggtctgaaactcctggccttaagtgatcctcctgcctcagcctcccaagtagctggaattacaggcatgaggtgctgtgcctggtgatatttttaatgctagagaaataagtgtgttcataatggcttcaactctggaagaggaactccctgactcagaaagcatgagtttcagccatattccaggtgatatgtggcccccacccaaagactacagatgagctaggggcacactccaaggagactccacatgccaccctgttctaaatatagtctcattcttatgctctaattctgatgtcccaggcatcataaatgaccacttgagtgttttgctcttgttagtcagcctaaccctaattctacccctacccctaccctttcctaggcatgaccacttccaggtgcatctttccctgctgccaacattcagtttcaaatctggccactccccttccactgcatcatttctcctccctcagtcctccctaatcgggtcctcattcttcccacagtttgtacctatgaagacaagctgattcaagcagtcagtgtcctggctcttaaagcagagccaatttatttgggattcagtcaataaagaaaaaagcagcagtcattcttttcctcaatccttggtcataagrtcaatgttgctagtggtagatgctccttgtgaactgtgcctggctctgttggatgcctggttaggggaaaacgggagcagctaatagamgctcagggcatccttctaactggaagatgtacaataaacaagacagtgcctgcttgtgaccaggggctgggcctcttcatagctcttttccctgccttttgtcttcagagttgatctgcttcttacacattcactttttcagagtttgctatcttagaagcaaggatcatttttaattggtttgtttacttcaaagtcccactcatcagaggcagtgtttcgcttatatttggctcaactactttctcttgcttggtttagtaacactaatgtttactaacattaaaatgaaaccagttttgcagctagcatctattgacaaatataattatttatttcaaactgtatattccaaatttaaacatattcaatgcttattgaacatctaaacatatagcttaggataaaggaaaatataacatctgtttttggatctgaagcacaaccactgctagatattttgggaaggcttttagtccagttcaaggtgattctccgagggtgtggtggcctcccatctaacagcagaaactgtcccagtttggatttggtagaaataaaccgcatgagcatttacttcctttttatccccaatattgatttttatgctatcttattggctttcttggatatgttgtttgacaatagctgcttctaatctattttgatagtaaaaggcaactttaatatcaagataagtggcatgattctgacatcctctaagcacagcatgcgaccttcacagtttactgcagcacaatttgagtgactctccaatacagtctctttttctcactgtctctcctgctctctctctctctcattggtgttgacagcaccccaagygtatgtgtccctttaaatactctcagagtttacagttcacgtgtgcatttgtgattcagcacaatccaaaggaatgacaggcaaatcaaattcagatattctctaaaaataacaccaattagaaatctctgaaaccgttaaaccatatgatttcctaagccatttccctgccatagttttaaaataaatgattggtagtttgatgattcatagtagtttgatgattcaatgagtagtttgtctcatttagaaacaatttttaccatataatgggaattttcggggggttttttgcacaaatttatgtcttatgtctaagatgagaatgccttttttctgttttaattgcgctttcatttcttatgatagtctaaaaatcacatgctagcatgttttctttggattattagttatgtctttagggaagatcaaataatatttgtgaaagaaattaaatattttaaagcatcacaaaaaggattgaatttccatgaaatactcacttcatttttaaaaattggttttaggccaggcttggtggctcacgcctgtaatcctagcactttgggagactgaggcgggyggattgcctgagctcaggagtttgagaccggcctgggcaaacagtgaaaccccgtctcttttaaaatacaaaaaattagccagttgtggcagcgtgcacctataatcccagctactcaggaggctgaggcaggaaaattgcttgaacgcgggaggtggaggttgcagtgagccgagattgtgccactgccctccagcctggcaatagagcaagactacgtctcaaaaaaacaaaaaaaaaaacaaaaaaaaactgattttgaccagaatggaaagggtgtgtgtattccatttggtttgtygtttgtaataacttaaaaataacaatttgataccaagttatttttttcaatcaaaaaacataaaacaagttacaattccagaatgccatgatttggccaacattgatgacttgaactaaatgacgcagccaaggaggtagttggtaaaataaaaataattctgtgctagggagtcaagatccctaggctaaagtccttgacactgcttatttctggctgtgtgtccaataactaaactttctggtctaagcttatttaccagtaaaaggaggggaaagggataattaatttctgaatcacttcgaactctatgattccatgactaaaattgaggggcatttaatttccttctagtytctgcagattgctcatgctgttttattgctttaagtgtctgcagaattgaacctaagaatagagaacatattaatatctcacataccaacagctgcaaatgctgattgcagagcatctccttctatcccatcagttcttatctgcctggtatgtgagttgcagtaacakyccatcctgggttccctcctccccaacctccctccaccccagcctgcctccctgtcctttctcaacaggagcatcaacactatggccttccaaggattagactggatggtgccagatctgccagggatgggccactttgtcctggtccatgatgacccccacctactttgagrtctggtcattgttctctctcccagtcctctctcacatgggcatcagttaggcatcaggtataggttgaggccctaagaaaggacttagcacatgttgccaaaacaactctgtgcaccraactcagtctaccctgcatggactgttgcttccattcccaaaacaaaatcactgaaaaggaaatcatatatttcccaaccacagggctctgccactgagagaagttaattggcttttggaaaaaaaacaacttggcttagtgagatctttttgttctcataaactctaaccactcactgaggatgcaaagtttgacgtcaaaagaagaggacatttagatttataaaaaaattctgagaaagataagtagaaacaatgaggcacagattaagagacataaaacaaataagaaagattctgttttgaaagtgaaggaaattgtactgtcacttgattgaaacaaaagaaaacagtttgacaagcatttattgagtactacctstgtaccaggccctgtgctaaaagttagagatgtgaattagtcacagtctttgtcctcagtaagtttataatctgatagaagaaatatacactaggcatcatttcaataaaatgtagtaaattctatgagagcagagaatttcacggaaacacgaagtctggggtggaaaaatgaacaccccagaatgggaaaaaaagaacagcataagccagaactgagacatgaaattaacaaaataacatggaatgcttgggaacctacgaggagtttggctggctgaaatatgtcaaagaaaactagctggaaatgacaatggacaggcagtcaagcacaagaagatgtggcaccttccttctcatgccttggtaggaagctggaggtttattgctaggggaataggggccattgaaggattttaactggagacataggaagatgtgatttgcctgctagaaaagtcactctgacagccgtgtggaagacggatcggcgagtggcaagaccagaggcaaggagactggtcaagaagaggatcatggcagaggcaagctgtgtgctaatcatgcttttgagtctaggtatgaccctcaccttgacagataaatatgcaactaaatgcaggcagttcacctgttagttgtttttaatatccaaagaaggcatgcttgtgctcagaaaggacaatttacagttgcttatatttaattaattcagtgtatgtattaatgattttgaaaccatgtayctatatctagattttttcttaagcttttaagttctgctcactcatcattttattcaatttatgaatccaacagttttttgtataagaatagaaaaaaatcttagtcagtttttctttattcatttaactcataaacataactttacaytgccctaaacaaacataactaaattctcttaaacacttgaacttatataaaaatttagtacatctcagtcttttgaatgctccaaatgatggacagggcaggcttacaaggactgataagtgccttctaaactttctaataatttaccacatcttcttatgcacttaaacttactagtgcataagaagatctaataattcaaaattattaatgtagtaaatcaagttgttttacatttgaatgcagtttgcaatcaaaatatgttctgcttttcaaattaaagtcataagtgtaatatcaaataagtatttaaatttaagtcacaagactaattgtcagatgctttactatgtcactaatatgatctttactgtgtctcacatattaacagttttagatatttaagaataaacacactgattcttccaagattacatatcttattcataaatttaacaaaaaaaaagcattagtttgctagggctgccataacaaactaccacatactttgtagcttaaaccacagaaatttattgttgacagcacaggaggctcaaagtctgagattaggatgtggacagggtttgtttctcctgagggttgtgaggcagaatctgttctatgctccgctccgagtttctagtggttccccagtaatgattggtattcttgtacggcaggtccatcaccccatctccacctaaatttgtcttcacctggtgttctccttgtgtgtgtctgtcttttcacatggtgttcttttaaacagacaccagtatagtagattaggaatccactgtactccagtatgaccttatcttaactatttacatttgcaatgagcctatttccaaataagaccacgttctgagtactgggacttaggacttcaacatatgaatctgagggggacacaattcaacccacaacagatgctacagatttcatttacttcaatacctctattcttatttttatattttcctgggattatgagctgagactaaaagttcaggactattctttggggacaaagcattttgagactttctccaaaatctagatcctgcatttttctgggacaaggtttctcaacctcagtactatttacatttggagtgagataattcttgtggggtttctcctgtgtgatgtaggatgtttagcagcacccttgatccctactccatagatgccagtagcactccaaccccatttgtaacaaccaaaaatgtctccagacattgccaaatgtcctgtgagggcagagttgttactcctttccccacaattgagaaccactattttaaggtcatttaatccaagccatagatctgggtctgttctcatcagatccagttggggaaccccaagatgtacctttcagctgatatttagttgtgatacttggtgtatcatacattcccctgggcatatttcaggtgttactcctactcaattttcattataacctctctgaagaatttttctgcaggtttgggtaggtaggatttggagatgcaactctgtatacagccaagcctcttcattattttgctggattcaaccaatcccttaaactttatgatggaattctgcatcattttatatacttccaagttcatagaccagttttatactcattatatyggtaacatccttatcgagggtaaaaaaacacatttaaaaaaactgttatttaagttcagggtacatgtgcaggtttattaatatagggaaacgtgtgtcacgggggtttgttgtacagattatttcatcacccaggtattaagcctggtacccattagttatttttcttgatcctctccctcctcctaccctgtgccacacctcctactgtccaacctctaataggccccagtgtgtgttgttctcctctatgtgtccctgtgttctcatcattcagctcccacttataagtgagaatatgcagtatttggttttctgttcctgcgctattttgctaaggataatggcctccagtccatccatgtccctgcaaaggacatgatctcattcttttctgtggctacatagtattccatggtgtatatgtcccacattttctttacccaatgtatcattgatgggcatttaggttgattccatgtctttgctattgtgaatagtgctgcaatgaacatatgcatacatgtatctttataatagaaaaatttatattcttttgggtatatacccagtaatggaattgctgggtcagatagtatttctgtctttaggtctttgaggaattgccgcactgtcttcaacaatggttgaactaattcagactcccaccaacagtgtaggagcgttcctttttctccacaacctcaccagcatctgttattttttgactttttaataataaccattcttactggtgtgagatggtatctgattgtggttttgatttgcatttctctaatgatcagtgacattgagcttttttcatgtgattgttggctgtatgtatgtcttcttttgagaagtgtctgtttatatcctttgcccactttttaatagggttttttttttcctaaggcctatagtttcctcaagaaaaatacagcacaatgtcagatgctgtatgaatttttccacctgaaagccatgaaagcccatgctggttccttcattgcaagttatacatattacaaatgctaattccttatcagagtttccttagaaaaatgatctacatctaatatatcagcatatgtattgttacacttctgaaatacaccctacatccatttacttctttccatctctaccatttactgttatatccaagccactgttatctctcacctagacsattgcagtagctcctgagtttttccatcttgccccagtccactcagtttcacaggataactagactcatccatttaaaacacaaaaataatgttgcttcccactctgaaatctctggtagttttctctggcaattagcacataaatcaaagcttttttttttttttaattgtgtcccagtctcactctgtcacccaggttggagtacagtggcacgatctcggctcactgaagcctccgcctcctgggttcaagtgattctcctgccccagcctcccgagtagctgggattacaggtgcacaccaccacgccccgctaatttttgtatttttagtagagatggagtttcactgtgttggccaggctggtctcaagctcctgacctcaagtgatctgcccgcctcggcctcccaaagtgctgggattacaggtgtgagccacagtgcccagctccaagctctttctgttggcccagggagcctgggtggtcttgcctaggctcacctctctgagttcttactgcactgttcctcctcatcctcaccctcttccagccctcgtatgtcttccttctttcctctaggaaggtttttgcctttgctgtcctctgcctagaatagttcatgtctggtgccttcctgtcattcaggcctcaacttcctgatggcctcctccaagggcagccttccctgacctcctaactgaaaaagcctgcccatcctttcccaggaactctcctctttattaagttagcactttttggctctattttcttcgtagcccttgtaattttttttctgaacatatcatgttatttatttgcttattttcctactgtctgcctccccacggcctgaacaccccaagraaaccaggatctttagcctatctgctactgaattacctgtgactagaacagtgcctggcataaaatatgtttttattagatcaatgaatagatatcccacatatatattcattcaacaaatatatttgttgtttatgtatttattacatatatatgtatattatgtatgagtaaatgcatgccttgaagatgttttttcatatccagcttttatctggacttggaatatgggagtgaatggaataatcacctttgttaagtgtaggagctgggctggaatagatgcagcaacttgtaaaaacagtaaagaatgttgcctctttcctgtacttcactgcaccatgaacatagttgaagagctagaattaccatagactccttgataaatgcctccagtgtctccaaaaagaatcatatatgtgtgttatgtgtttctgaatgtaatttgatgtaccttaattaggaatgtatgttaaagaagtaataactactataaactctatactgtcatctaaaattcttatgtggcctggcacagtggtttacaccaataatcccagcactttcagaggccaaggtgggcagatcgcttgagcccaggagttcgagaccagcctgggcaacatggcgagatcctgtctctataaaataccaaaaaaaaaaaaaaaaaattagctgggcatggtggcatgcaactgtacatctacacaggagtcgcaggtgggtggatcacttcagcccaggaggcagaggcggtagtgagctgagatagtgccactgcactccatcctgggcaacagtgagtctttgtctcaaaaaagaaaaaaaaaaatcttacgcttacatttaaacgacacatatcctttgattttggtcctgggatcttttgatttttctttcttagtcctcctttattcatacatatagcctcacttttaagatggcctcaaggaaaatccatatggtaacaaccacactaagttctgaaattaaattctgcatggatagatttatctatggcctaatgaatgaggcatttctacttcctctgagaacagcttctcatttttattttttattcatatttgcatttataaaatatttttaagcacttaaaatttattttaagtaacaggcactatgctaacctctgaggttaaaataatgaatgaggctgagcctacttggatctcagtgtggcgtcatcatagtctgtggatagatatgaaagggcctgagggttctcttccagtctgtccccagccatagtcactggttggctgtactcaaggaaagaatgatgccaatgtttctktggtgtgtttcagcaacttggtagtatatacagcatactcgctgcaatcttgaatgttggcaacattgaattttcttctgtggcaactgaacaccagattgacaagagccacatttctaatcatacagccctggagaactgtaagttttattaccttctattcaaaactgaaatctttcaaatcttatgacataccataagtatcacataaggaccatttcaagcaattgtgctaacctagaatmcttaaaagaatactcagatttaatgtgtgtaaaattaaaattttaaagtccactacttaaaacatcttcatgcttacaaattaactgattactgtagaacacatttctgaagactaggcttttacaactattttgggagctatttacatttcgatataaaagcacagatagtatagttaaaattcagtaaactgatctgaaaaagaattatgttattgtcttatagatttagcatctataccattttacaagtaataaagacctgtatgtttccatactagatggattctacagccattcatcctgggttgattaattttgcgatcatttctacacaagagaagcatgtcatagtatttgcttcaaatcaagtttttcttaatagtagagtttgataaattatttccagtaatttaaggttttccattaatatcttcaacagcacagcttttttctatttagtgttgcctagtatgccctgttattttatttttaatattggcacatgctttcataattgcatatttgctgtttcattaataataacaaatggagaatcactcctcgtccaaaagctcacacctctaatcccagtactttgggagsccgaagctggtggatcacctgaggtcaggagtttgagaccagcttggccaacatggtgaaaccctgtctctactaaaaatacaaaacttagccaagcatggtggtacacgcctgtagtctcagctactcgaggaggctgaggcaggagaatcgcttgaacccaggaggcagaggttgcagtgagccgagatcgtgccactgcactccagcctggacgacggagcaagactctgtctcaaaacacacacacacacaaaatggagaatcatgatacaaatttttatttatatactttttcctgatttatgcttaggaacagagtgagatggtgtagttttagggggctaagtgccagattatcctggtctggacctgtccccagcatccctataaatgctatcccactgtgtctctggagccaatgtgataatacagtagcacaagtgtatggaattggcatgtagtgaccggcatgtgcctggaaacctcaaggaaacatgttctaattttccatatttaaaaatttttaattggcatgtatgatattaacttatcagaagtagaaagaataaccctacaactccattgataagatgtaaatctcacatctgatcatattcagaagagctagcagcagccaatggaatgagytgcaatagagataggttgtagataagagtatacctagaaacaaccatactaaaaaatgattttgatgattgagaacctatttctgcataacagaagacagtcatataagttacaaaatgttgatattaatatgaatatcattaaaattaacatactttctggaataaccactcatggaaagtagaaactttattaatttacattaaaatgatttctaattgaaagttataaggaattatgtccaaaccaaggctgcatttccatatggttttacaagagccttgtttcaattaagcaccagttctgaccattttgtcccataaatatctctcaaatctgaccacttctctttatcatcattgtcaccattctcatcaaaaacaacatcacctctcacctgaactaagtgacctcccagttgttcatttcacatcaagaattgattttttccaggtcattctccacaattctttcagaaaccacataacccatctatcagtgggctctctcagtctccccctttccctctccatcacctccctctccccctccttctccttctcctccttctccttttctcttcctgcttaaatttcttactggtttcccattcttgctggataaagataatcaagactagtgctttgttttakaaagtattgtgcttagcaatttatccccaggtaaaatgcctagcatgtagtagacaataaatgtatgtcaaataaataaacaatgtaggaacagaaatagacatacagatcagtgggagacactgttcagaaacagatccaaagtatattaccaaaaatggcatcacagatcactagggaatcggtattgtagggaactagctaaccattttggggaggaggaatttgaatcattcttatatactgtatatcagaatgaattccaaacacacataaatttaaatgcaaaaaaatcataagagagactggaattgatttatataatattgaggggagaaaggacttgaagtttatgtgtagaaaatcaaaagcacaaattattttctttaaaaagtggatatttgactacataaaaattaaaacttttatactaaaaaaagaaarcataaataaaattgcagtacaaatgaaactgagggaaaatatttgcaacatatatatcaaagcatttctttaagctatgaagaggctcatataaattgatcaggaaaagatgaacatatcaatgaaaatattgcaattttcaaactaagcaacagaagttaccaataaaaatatggaagaaaaaagtattcagcttcactaggaatcaattacaaataaatagaaaacattttctcctatcaaattggctattttagaaaaatgatagtccgtgatgtccatgaaattgaattgaagttattggtgttttatttggctgagaggagtgtaattggttcagagattttgaagagcagttaaatagtatatatcaaaaaactttcagccaggcccagtggctcacgcctgtaatcccagcactttgggaggccaagacgggcagatcacgaggtcagcagatcgagaccatcctggctaacacagtgaaaccccgtctctactgaaaatacaaaaaaatagccaggcgtggtggcgggcacctgtagtcccacctacttggtaggctgaggcaggagaatggcgtgaacccaggaggcggagcttgcagtgagcggagatcgtgccactatactccagcctgggtgacagagcaagactccatctaaaacaaaaaacaaaaaacaaacaaacaaaaaagacctttcttgatcccaggagttcgaggccagcctgggcaacatggcgaaacactatctctaccaaataataataataataattagccaggcaggttgtcatgcgcctgtggtcccagctgcatgggaggctgaagtaggaggatctcttgagcccaggagtttgaggctgcagtgagccataattgtgctgtagcacaccagcttggatgacagagcgagactttgtctcaaaaaaaaaaaaaaaaaaaaaacttttacatatttacgtattttgaaaaattgctgaatttaggcaacctatgctaagaaaatagtacaaaatataaacacagatttatgcttaaaatatttatcctggcattttttaaaattattgatatattatcatatttgtcaaaatattatgcagcaaattaaagcatatttacagacaatattgaacaaaatgggaaatgcataagatgttatatgagataaaatgtttatgcagactaatggtagtaaatatgcctagaaggaaagaaatgcagaatgttaacttagaaggtaaaatttctgcaatgagcctatcgtacttccacgatatgaaaaaatatagggtttaacaatcttagccatataaccaagaaacatcttgtcacaagtgctaaaagtaaatktaaaatgttcaaaatattttaaaaggagaacaacagatttgaaaaattagccaatctgtcatgtaatagttttggttaaagatgtttattatattcaaaaatgagttttgttcacggaattaaagtgttactaattttaaattccccatgaaatgtaatcaacattaaatgccaaataaatgtttgttcaaacatccagttttaacaaaatttagtaattgaagtatgaaactaaaaagtaggatgatatgtacatgaatgtcaagtataagtacatgaatgtcaagataagtttgtgctctttctgttgtgtattgcagaaggtacttgaaatacatttattgaggtatacccctgaagtctaagtaacctgttccagttaatttctacattttgaaaatatgtatataataatggtatccaaattatgccaaatctattcattatgttttaaaattatttagcataatttagtgaaactatatttgacatcacataaacaaccactcgcttatgcagctgtattactctgccagccagtgtgatttgggttatgttwtaatatgcagtaacctaagtttaaccagctgagaaaagttgagaaaaatgatcaagaagagacataggactcatgttggatagtatcatatttttacattacataatctccacacatttaattcatgtcatttgaagaaggcagattaagacattttcatttttggggagtgacctcattgccataatttcttctaacaatgcatctgtttgtttttcaggtgcttctttgctttgcattcgggcagatgagstacaagaagctctcacctcccactgtgtggtcactagaggagaaacaattatacgacccaatactgtagaaaaagctaccgatgtcagggatgccatggctaaaactttatatggacgtctctttagttggatagtcaattgcattaacagtttgttgaagcatgactcatcaccaaggtaaaaatttttacagaaacatttttttcccaaatgtcaggtgatgtaagtctactttctaattgattgttttgtatmgatctctttcragatgtttctataattgatgtaattaaattattaaaatgataatttagtagataagcttcacttcctaatagttccacctcataatgccacttaactataaaatttttaagttgctgcaacataaaacctgtagcaacataaataacacaatagaaagtgaattcttaaaatgtgatatcttactatgaactaataggtttttttaattagaagttgtaccatgaagcatataccattttatgcttgtataaaatgtcagctcagcagtcctttgtttttattttgaaggtttaaattaaactttgaagataaaggaaaactttattttcatattttaactctcactgtaatgccattacagcctcactgtaactccaatgaaatttggttcagaaatgcactagataaatgtaggtaatagtaaatggcagggccatgatgtaagcattgttatctgactgtaagtctagatccttccttcttaaagataattacagccacgactgactgagtgctctctataggcagggcttatacatggacacaagtccttccatctaaagctttgttctgtgataaatggcataatctttagaattttgcatgtggaaaagcaagatggatgcctaccataagatcacctcattcacacttgcttactaagcataaaagaccatttatacacatttcaagtatgcaattcattattatttttttcactaaaatacataccacaccattatactatgtatagtcaaactgtctaagaccttatccattatttctccatgttcttaactttgtgtctctcaaaattgcttgtgtacctcctgggtactatctataccattttcccattacaatgtaatggtcaaaatggttgtatgttctggtacggtcatctatattatgtcaagcattcatatgaaaatggaaaatattcagggatttttattatctgtatattccagaaaatgtaggcaagatggcaagatatttagagatttggcctcattttgttaattatcatctgcatgtttggcactaaatgatacctacccagaagggggatctactatatccactgtagcctatgtactaaatgtacatatactaaatatactaaatggcaactttcctttccattcactaatgaaaaccatccaaatcttagattttaaaattttttacagaaagtctaaaagctaaagggagaccaattgaaataatttagttcaactttgttaagttgtacactaagactttaaacggtatatgttgtatgctgggctttgccactatctcgttatgggacactgggcaacttactgcatttgtctgggtctttccctcctcaactgttaaataggggcattgaatgacaagtcagtggtcttagttgttggggtgtatcttggagccttttaagaacgtcttgaaaactgcctatttccttcacttaaaaataaaaaatagatatatttctatatgcccacgaaaatattgcacgcttatgattccattcctcttgaaagccattaatagatcttactttaagaatctctgaactagattatttgtaagrtccctcctgcttctaacacttttttatgcaatgagttaaatatttatctctgtgggatcctgtggggcaaagagattgtaaaaggataataatcttgactaaaccagcataagttttaactagacatcttgcctcatacaataatacagaattattattcaaaataagaactttcagaaatactcaaatagctttccttttgtccatcccagcacatatttaaagtattctacagcctggattttgaattcagttgcttcctccaaatgtagagcggatccttcaggtcacagtgtgcagttgctgactgtcatttccaaatcacttccttacataatactaagtgtaaccctggaacacctaaatgatgaacacaaagagaagcttttgtactttctttttataattcacatcaaaataactctacaatgtatatatttctttggggaggagtaaaccttttgaccaatagtaaaaaaaaaaaaaagtatttgaaatacttaattgtaaaataaaatttaattatattttaaagtatttaaatgtaaaaataaatccctatgtatttgtatttctccagtttgccatttgttctatattaaaaaattataagcaaatgatccaaaaacaaataacaattctttaaaataattaagatctttttagtaagattttcaaaattgttctcctaaaatgaaagactatactttttaacagaatttttgctttcctgggagagtttttattgaatatgtttttgctgtgttctaattgcttcccaagttgttcttgtaattcctgactcactcaagcctgtgactttgttcttaggagaagaaaaagtttcttttgtttcagtgtataaaagtatcggagtggtttctgtagttcaaggaaaatattgtttcattttcatataaaaatcaatatctgccgttatctttatgtgctacagagagaagctatttcagttaagaaagtttcactctaagtgtatgttcttatagtagtttcttagctcagtcacaaatggtaactctaagattccctgttttacattacctcttcaggaaataactcaaaataatgcctcttcaattcttctagtgggaatggtgatgagctgagcattggcattcttgatatatttggctttgaaaatttcaaaaaaaattccttcgagcagctgtgcattaacattgcaaaygaacaaattcagtattattataatcaacatgtgtttgcatgggaacaggtaagtctaagtacttactataaatatgcatgcatgcatgtattataggcagacttgtacaaakgaagcaggaccttaaccatagatttaatgccttaaacattttagaaagacaaaagatttttattatctccacgtccatagtaaaaacaaacaaaaacaaaaaaactggtgtgaatttagtgtgactgatatgtgatgttaaatgtcctccattgaaaatcggtacactcttctccaaaacttagaattctgagcctttgtaaacgaagatatttcctttgaaaatttaagtagacagatgcgtccaacagtttttctttctgtagactacatagctgaaattccttttgaaatttcaatatccagctaaaagccattaaacttcagaattccagtagctaggcaacagaatataagataatgggtttgatgcaaatgccatgaaatgatcattttgtcagggtacaatgtgtaatttatgaatcagcttcaaaaaatattcctccttagagaaaaatcagacttaaatcacatttgatgtactgtaatactaagaatacttaaattattttattaaatctaaaggagtcatatttaatatcatccagtatgtcatttttctccttcaagtaatattatattgttttgcatttaaattagaggtacatgaacttcattttattcaaaatatttaggcttcttaagagtttattttggaattacattttgaaaacagtggtcacaaaataaaacatttcgattttgacatttcttaagccaaaagaagacataaatttaagaccttatctagttgttcagctctttttcatctatcccaggatgttccatcaaatattcattccctctccctctcttcctcttcttgtctcctctgctcctctctgtcggtgccctcccatagcctagatatgcgaagaaatatctttaaaatcttaaaagcaaacagaataaaaaacaaagcccttttccactctgcttatctctgtagcatggtcctctcttttcccctcacagccaagctccttgaaagcatgttcagcactcactgcattgcgtttcttccttccccatctggtactttgaggcgtatctggctgtgacctccccaattcccctggaatggcccttcctcatctcatcagtcattagttcatttttgtctttctcactaggcatctcctttagatcatatattgtgtcttaattctttttgtctttttagaggctgacacgtagcaagtgttcaataagtaatgttgccttgctttaatgcttcacaatactcacagcatccatttgaaccagagaccaaaacaagtaaaaaatttttggtttgaactttttgatatgatctatcagaattgctaactttatgggaccaggtgtatccccatgcattgctcatgtgatgaawtagtgacttgcattggtagatctctgttgttcttttggtggttgggtagactctggttttagccttaaccaaggtacagatatttcaataattattgcttttcactrtttataaaatgttagtttacaaattgcttttttttttttgaaacagagtctcactctgtcacccaggctgtagtgcagtggggtggtgttggctgactgcagcctgcgcctcccaggctcaagcaatccttctgcctcagcctcccaagtagctgggaccacaggcatgcaccaccacacctggctaatttttgcattttttcatggaaacggggtttcaccattttggccagggtggtcttgaaatcctgggctcaggctcagcaatctgcctgtctcggcctcccaaagttctgtgattacaggcatgagccaccaatcctggcctacaagttgctttgattgctggccttgaatttcattcatgatcccaatgctcttaattcttttgtctaagggcttgttacaaaacttattctataaagccctttaagatacccttgagaggattttgaaataaaacaactcaaaatttcccccaacaaaataaaacattcaactagaatccaggattatacaaagcattttgaggaattaaaacaatttccagtcctttcaggtgccttcctagaataactatctaggaatttctgcttcatagtcttatgaaccagacattggcagttgagtatgatcagattgctgaatgtgttatccagaagatacagaattagtcaatgactctcttgattttaacacstgagtgtacttgttttttctttctaactcccaggtgaatgctgaaaatgtaactgagaaaagctaactaattgtatgtagctatcacagacaaagagcacacttacactaatttctgtaaatgagaaactgctattaaatcttgaattaaagtcttggtctacattttttggtcgaatataattacagatttgacctaactgagagctccttagtttaatagagccattattgcctattatttcagaaagaaatagtgttcttactttcatgagacttacaaatgatccggccagatctcggcacaagtcttgggcagcacctttacagatgaaacacctctgttcctgcttaaaccaataaacattatttttattgacagttgtacaacactggaacataaataacagtctgctgaaagcattttcctatttagtccaatttcagtgtatttgtaatagacagtgggacactccagcaaagctgtttacaatggtattttgaatatcataatatcattttcccattgccttccattaaaaaaagatcaagaaactacagtaaaacattttttgtgaaagaatttatgatggtgacccaatctatagcatgcagagtagatagttttatgtttcttggaattgtttccacctgtttgcattacctttgaaacattttcctaaatccaggaatctctattatccactcactggcagctatacctcctttctcttatagcctgctttcccatggacagttactatatgcctcagaatctcttagtaacaacctggagcatccactttgtatccctttattttccttattatctagatatttagaatgttaagagagcttgtgtatagaagcattatttttctatgtgtaaaatatgtagctcctaaaattttcctggagtttgatattttatagtatttgaagcttttacagtttccyggcactgggagaataattttatgtatatttattttaatgaaatctaaagatactatttgtatctcaatagtttgaaaattagatggtaatctatgtccccaccctgcaaatagaagatgatcagccaagaagtatagttgtaattattttaaaatttaagactcaaccccttctaaatgagttgcagccaaaaagtatataatttactctcaattgtatcaattccacaaatatagtattcatatttcagccttcgctattacattcgtacaccattattgtgtcatacactgtcaacttccattttctgagaggcttttattttgcagctcaaatggcagtattccattgccaagaaaggaagtgtttttttcacaatagccctcatgctgaatttccacgataaatatgtagccaaggttttggttttgtttgtttgttttgtggttttcttccgtcggaaagggagcttaacagtaatcaaactgtgatataacgactgaagttctctggaatcacctatctcatattagaatcccacatgagaaatgtacataccttgtcaaaagtgttctcatgcagctgctgtagtggtggtttttgtcctttgtcttaattttgcactgtggtatcatcattgtggtatagaacatacaaaagaaatgctccctgctccctagaagtttatacttcaaatcaaggggagtacataccaaggactggtcaatcctgggcatgactttgaattggaacaaatgccactgttcttaagggccagtgagcacctagaacatgtgtatgatgctacagcgtattgatctagaatcctgaaaattcactccacttatttatgtgtgcctatttgtattttggataagctttcttcatccattagagcagcacatctgactattaactgaactaaagtttttttttttaaatgagctattactatttatttctgtagaaggatgagcttttacagacatcatttagacatgcatctatgggtttggaactgaatgtcagaagtagttttagaagcaggaaactattactatttacagcacataatggaaacaataactgcaattatggctctagcttctcttgcagaaagtaatgtgtatgactctcatctccagctgctcacattctaaagtttacagtgtttgagattttaaatgtgggctccaacacataatttgtggcaattacaaagaataaaaattcacttaatataaaatacctacattttcaaaactttttacattataaagtaaaaaccagtcatttgatttttaaaaatgtgtggatgattaaaaataacccccttatcagtgtcttcacattgttttgctcaaaagtgtgaattattattttaagttcaactttcttccctattaagtcatatgtgtgcaaatggtaacatttgtcccattttagctctccaagtgataagcatttcctttaagtgtcaaagcagccaaatacatttgagaagcccttaatacaacaaatcttcctttttaagtgcttgaccaagtgttaggttattaaatattccttaaatgtttcacacactgaagatggcagctgatgtccacgtggttggttggttggaggtgtttcgggacccttgcagcagctctgggctgtggacctgttgctcttctctccctctggcttcgcagacggcctctcaggctctgtgttcctcatccctgctaggcagctrcgtagcacacttagtctgtttctctttcattggtgaagtttggtcgacacccttaatgtgatgtggggatttgtggtacttattttgatgatttaatgatattcttaaatttaaaaggttttttttcttttctgagttggggtcttgccctgctgcccaaactagagtgcagtggcacaatcaagactcactgtagcatcgaactcctgagttcaagtcatcctcctacctcagcctcctgagtagttggggccactggcgtgtaccaccatacctggctaaattttcagaagttttgataaaaagtaattctcagtgaaatacatagttagaagtctagatccatatgatagtactgtcgttttctacatgtgaggttagagcatactattgacaaaccaaaatacaattttttggtaaagatttaaacatggcagtaatggaaaaatagtttaaggtgaaagagatcctgatatacagaacactgtatttctgaatttctaatccaaatgcctccttattctaagctgatacctattaatagaatataaatttgtaaaatcctttatgtctcttaaatagttttgagaaacaggtatcatatccaaaaagtgactaaattggaattttcatcttagcatgcattagtatatatatttttttctgaataaggaagctgctgtrgggagaaatattctaaaactcatctcttcaaattttagtaaaatggatgtaaaataaaacatgaatattttattaggaattatccaaaatactttctcattaggttatttgtcatattctgaattaatgacttgtgtcatctcaagttaatgatggccagcattctctgtgacttgctattaacattaacataaaaactaacaggatcatcaatatcagcttcaaatagaaaatacaggaagaaatagatttcaaatcataaatcttatttcataacaagagttcacgtttttacaggacaagtattatcactgttttttagaatttaaaaaagttatttcattaaagtattattaaaatatgtgtatatagaaagagagaatgaaaaatcaaacatgatgaagcttaacaattgtggaataaacaccatgtaaagggtacacaggagttctttgtactattcttgaaattttctgtaagttttaaattatttcaaaatgaaaagtggcaaaagtttttttttcactgtaataaacataaaacatactcagttcatcytgagttatggtagcacccttaaagaaatcttagattttcaacctttaaaatctttctgtttgataaaggaggatttttgtcaatggttagaataagcaacttcttctcaatggtttctctctaccctgggcaatgttttcatgaataggcacactcatttgagcaggggtgagtaagagttcttttactaaaatacagacttcagggactatatatgtctatgtagcttctttcctgttgcaaacgttctgtccacagtcttaaccacatttattcattgagttttataacatatccaagcagttgtgcattctgaaatattagaagaaacytaaataggttatctatatttcattgattaaaatgactccctctcctcaactgtgatttgcccaaggttataggacagtgaaatgaaaccaggaccagagtaaagggcttctgacagctatccatggtttttctcatgaacaaacaagtaagcaaagaacagggatctagtaaagtaatctcctgtgcagaagaaaaaggtgctctttccttctttctttctaaatagataagagcacctttttcttcttcataggatattactttattagaataatctattagattattaggttattaattcataaatataaattattatttaattattagattatttctgttggattagaaagaaggaaagaaaagaagcataagtcagtcttaacatgaaaagccaaggagaatcaacataaggcaggataaaagaaggcaggaaatcccagggagcacttaggctggcagcagaggctggcaagggttgtgacagctggagacccctcacaggaaggaactagaactagaaggtggaacaactgaaaaggagaatacagccacaagcaaagaaatctcagacatgattttagggttggaatggaaaggcagagagcatctttgccatgtcctaaagaacagaaactcgaccgggcgcagtggctcacgcttgtaatcccagcactttgggaggctgaatcacctgaggtcaggagtttgagaccagcctggccaacatggcgacacctcatctctactaaaaatacaaaaattagccgggcatggtggtgggtgtctagaatcccagctactcgggaggctgaggcagaagaatcgcttgaacccaggggccagaggttgcagtgagctgagactgggtccacttcactccagcctgggtgaaagagcaaaactccatctcaaaaaaaaaaaaaaaaaagaacagaaactctatctttctgatctttaaattctaccttccccggccccatctacccctaaccacacacagagtaggcactcctcgaacatttctggaatttgagtatatcacatcctctccagtgatctgtacaaagacagcatcacaaacccaggtgaattgccagtgccatctcatgatataaatctcattcttccttccttgacctaaaatgggtaggaccataaaaaagtggactaaacttataaaaataagagatactgatttatgacttgaaaacaaacacaggagaatattgagggtcatatataccagctattaacatttccccattctgaaatatctacaactgtggagcagtgtcaaatggtgaacttgcctatcagagaaggctatgacattgttccccaggtgtaagttctgtgaaagaactaagtgttccctgtcactgcatataccagccttttataaaagaaagatgtcacgagccaaagtcctcaaatcacttcaattggtgactttggaagaatctttttaaaactttgggcttggataaaactgtcagaaggtagtagagagtgttctcctatagtaaaatgatgaggtggtgtgtcagagggagtggggagaagactgttctagaacctgtctattttttacttgaggatgtagtcagcctacttaagcagtgttcatctactgctatctggattggtgctaagaaataaaaacacactaagtacagattggctgggcatggyrgctcacacctgtaatgccagcactttgggaggccaaggtcrgcaggatcacttgaggcccgggagtttgagaccagcctggccaacatggtgaaactccatctgtaataaaaatacaaaaattagtggggcatggtggcatgtgcctgtacccagctactcaggaggctgaggcatgagaattgcttgaacccaggaggcagagtttgcagtgagcagagttcgtgccactgcactccagcctgggccacggagcaagactctgtctcaaaaaacaaaacaaaaaaaaaagacccagtaagtacaggttgattggtctggtgtgtactaatgtaggtgatgagactatataaaaaataaaattattgttgattcttaaagatttaggtactacatagaagggcaataaatattcatttctgagtgctaaagttatttgtgaactagaaatgtaggttattctatattttaaattattccagacatgggtaatttcagaacttcaactaaggaaacaaagatttgaaatagttcactgttgcgggaagtcagggaccctgaatggagggacaagctggagctgcggcagaggaacataaattgtgaagatttcatagacatttactagttcccaaataacactttcataatttcttatgcctgtcttactttaatctcttaatcttgttatctttgtaagctgaggatgtgtgtcacctcaggaccactgtaataattgtgttgactgtacaaattgattgtaaaacgtgtgtttgaacaatatgaaatcagtgcaccttgaaaaagaacagaataacagcgattttagggaacaagggaagacaaccataaggtctgactgcctgcagggtcgggcaaaaagagccatatttttcttcttgcagagagcctataaatggacatgcaagtaaggaagacatcactaaattattttcctagcaaggattaatactctgggaaaggaattcattcctgggggaggtctataatcggctgctctgggaatgtctgtcctatgtggttgagataaggactgagatatgccctggtctcctgcagtaccctcaggcttactggrgtggggaaaaaccccaccctggtaaatttgaggtcagactggttctctgctctcaaaccctgttttctgttgtttaagatgtttatcaagacaatatgtgcactgctgaacatagacccttatcagtaattctgcttttaccctttgccttgtgatctttgttggacccttatcaggagtttctgattttgcccttgtcctgtttcctcagaagcatgtgatcttcattctcctttttgcgctttgaagcatgtgatctttgtgacctactccctgttcttgcactgcctccccttttgaaatccttaataaaacttgctggctttaaggctcaggtgggcatcacggtcctactgatatgtgaggtcacccccrgtggcccagctgtaaaattcctctcyttgtactgtttatctttatttatcagccagctgacacttatggaaaatagaaagaacctacgttgaaatattgggggcaggttcccccgatagttcaccattattctagtccatcttcccaactaatggtacctcatttaggtcttccaactgtattttttattattagaaatctgacttctaacaatgttttagaattctgttaaaagtcaaattctaaggaacacttgaagactgtagcttgtcatatctcaagaaccttctgataagattatgttatgataataatatcatcatcatggtgatagaaggaaaaatttccaagcttggggcttacatttttcttcaaaatgactcatattattgaaaggcaagagaagtcttacttcgtatgccacagagaggcaatgcaagagcaatagaagcagtgtgagcaagctgacaaggaaggagtctagacctgcaggcgagggctacagaaaccatagctgatgttgtgactgcccttgtcaagtcagtccactgagatcaaactcaagaggatgatttccccaggaaagtcactcaaatgccagcttcatgaatggattcctgtggaatgttgtcccacaaccaagaggacacacagaaggaaatgggaaagagaccagggagcaaacatcaacctgacaccaaggatgttttcaagaaagtcctggagcctttcccttcatttaactctgtctgattgctagcttcacaaatcgtcagcaacatcacaacaactgatgctgtaaggaagcctctgagtccaaaacacgtcatgtttcttattatgtggtttcaaaacaataatactcctaataatagctgacaggcattaagtatgtagtatgtgctaagcatgtatctactttatttcccccaaaatctatcctcttaagtaaatacataatcaaagaaatgcaaatacaataggctacaatttcccccatcaaaaatakattaaaaawatatatattttttgagatggagtttcattcttgttgcccaggctggagtgcaatgaatggcatgatctcggctcaccacaacctccacctcctgggttcaagtgattttcttgtctcagcctcccaagtagctgggattacaggtawgagccaccacactcagctgattttgtatttttagtagagatggggtttctccatgttggtcaggctggtcttgaactcctgacctcaggtgatctgcccgcctcagcctcccaaaggattaaaaatattttaatgaaaatattcattgctggtgaggatgcagcaagttagaagtgtttattattagagtgcagtttcttcaagctttcaaaaatccatctatggccaggtacggtggctcatgcctataatcccagcactttgggaggccaaggttggggtgcggtgggggaatcatttgaggtcaggcgtttgagaccagcctggccaacagggcaagacccaactctactaaaaatacaaaaattagccaggcacgcctgtaatcccagctactctagaggccaaggcaggacaatcacttgaacccaggaggcagaggttgcagggagctgagatcatgcygctgcacaccagcctgggcaacagattgtctaaaaaaaaaaagtcaatctacaaacacgtttcaggtgcctgtaaaatgttcataccatgtgatcatctaatcagttttaagatgtaatagaaaatacagaaaagcttgatgcacaaagcagtaccccagagcatggtagagtgcatggagagtgaccagttaaggaagggaaattgctgaattaggaagatgaaggaaggtctctctgaggaggtgagacctgaatgatgaaagtgaaccctcattgtattactcatctgtgctgagaaatctgtgcttaaatttgcacctgatttacaagccatgtggacgcttgcagcctgtctcagcccatggtgaccacccttccatgctgctgtgcaagtctgagggctcaatgtaatcatcttgaatctctcctggaatggccgtttggccctaaatatttaagctggttgtttaggccaagcttctgtgggctttcctgccactgtgctgcttcatgactcagactcaaaattcaatgaaaaacaagggagaggctgggcacggtggctcacgcctgtaatcccagcactttgggaggctgaggcaggtggatcacctgaggtcaggagttcaagaccagcctggccaatatggtgaaaccccgtctctactaaaagtacaaaaattagctgggcatgatggcaggtgcctgtaatcccagctactcgggaggctgaagcaggtagaattactcgaacccgggargtggaagttgcagtgagccgagatgacaccactgtactccagcctgggtgacagagcgagactctgtctcaaaaaaaaaaaaaaagaagaagaaaaacaagggacaactttgtccaggtgtgggatttcctaacatctaaatctaatgattttcctgaagaaaatatatataaaatgattattcatctattttcaaaagggaactcagacagtctgaagagagtaggaattacattagctaaacacttcagctttaatacagttagtaactctgctcaccttatgctttaaatgtatatgtgtttgtttgtttgtttgttttttgttttatgagatggagtctcgctctgtcgcccaggctggagtgcagtggcgcaatctcggctcactacaacctctgcctcccaggttcacgccattctcctgcctcagtctcctgagtagctggggctccaggcacccaccaccacacccggctaattttatgtatttttagtagagatggggtttcactgtgacagctaggatggtctcgatcttctgacctcgtgatctgcctgcctcagcctctcaaagtgctgggattacaggcatgtgccactgtgccggtacctaaatatatttttaatgtacagggcagagcagaggactttctgaagaaataggagctttctttctccatatgcttgaaaacaactaagtattttgggatcataactgctatataatacataattattttaggcattataattttgctataagtattttataaattctgagtaatagcgtttttttcttccttggtttgcctgaagtccctaatactaacaagtgtcttgaatgggagcccattgttttccacgccactcatctctgctctgtgtaacccgccacaaaaacagtcagtggattttgacacaggcaaatagaaatgacaaatgcattagtttagaccttaacctcgtgtactttctgtataaaacagacraaagttgttttcaactttgcagttgccatttaaattgtaatatgctgtgagcatgatgtgtctaacagtaaaataattctaggtctactcacttctcccaaggttaccttcaaatacaaaagctgtgaaacttcaagtcatcgttttcattttcttatactggataagctaaatgcctttcaggttctccaccttttagaccatctattcttctcatttttatgcattagatttcattttatttaaaaatatgcatttatttttcctggtgacacctttgaaatgaaatttcagcttcataaggcccctaccatagtgactaaaagctctggcttatcaaaatgtcccacctgccactggctacattgcagatgttcccagaaatttttctttctctttactattgtagtacattatacatcataactatccatcttatgttactcacattatttcaaattatatttgaactttgtggagggccgggagcttgttttaaacttctctgtcatccactataatgccttgccttcagtattcaattaattaaagaatatattaaaataacaatgaaaatggtctgtaatttaaacatgggaatgtcacatagtgttccactcgagtcagtgattgatttatacacttacccaggaatggttgcttatcacctgagaagcagtgactcccccacatgcaagcatggctgcatgtcgtagttcagaggtcacacatgtactctgtctgacagacttcagcactgggctggggacagtgtaaaggcagagtcatagaagccaactgggcacaagccttcatgtcccttttgtaaagtagatcataggtacctatgctgtgctggtaccttaaccctacagtaattatctgtggttcattgtttctrttttacacatcttatattacactatactcaacagcaaattattattaatatgccatatgtttttactttgtgaagtggggtttgttacccccatttaatagattagaaaatagatgtttatagagtaaggaaattccaaaggattttgtggctaggcaagtggcagagccgagatgaacctatgtgtccttggttctaaatccactggttgtttctataactctctgctgtcttgtaactaygtaaatgtctggaattgtgattgaaaagttatatacctgtgcttgagagattcagtggggaaagtatacctctaagatgtatctagttaaatattctgtaaagtctggaacataattttgttacttctcattaacaacatattttcctacatcttgaaaacttaggatgtccataattctagtatggagactagagcttcttttattactaccctgagtataatcagttcagactttaaggaacaagcagcaatgtggagagaaaaataaaatgatactctcagtttaagagcaaggtcaggccgggcgcggtggctcatgcctgtaatcccagcactttgggaggttgaggcgggaggatcacttgaggtcaggagtttgagaccagcctggccaacatggtgaaaccccatctctactaaaaatataaaaattagccgggcatggtggtgtgtgcctgtaatcccagctactcgggaagctgaggcaggagaattgcttgaaccttggaggcagaggttgcagtgagcctagattgcgccaatatactccagcctggacgacagagcgagtctccgtcacaaaaaaagcaaggtcaaagggagcaatttattttaatatatgcaaagtaaaattttaggtaattactatgaagctatatattattcacagttttaagtggttttgtctttattatagaatgaatacctaaatgaagatgtggatgctagagttattgaatatgaggataactggcccctcttagatatgtttctgcaaaagccaatgggtttactttccctacttgatgaagaaagtagatttcccaaggccactgaccagactcttgtaggtgagttttcagtccagtgtgtctgcatggttttatgaatagagtcttgtcattctgaatgattttttaaatggctttaaattatctggaagaaaatagctgtcacaaagcctgcatatttgactttaaagaagagcctttggatttaatacctggaccagtgcatgtttatgatagggtaaaatatttagtgataaattaagcaagtttaaatattggacttctccttattttgtggtgaagctcaaccatagaatcacaggttataaatgaccttagaaattttccagcccaaaattagaaattggtgagcagtgcaaaaggacagctctggaattgagaagagatagttaacaggtaggaaataaattaatctgtgatgttctgttctattcatttatttaatataggcaaatcacttcaaataccttaataacctctaagttacagtacattaataaatattcatgataataatcctaagtcatcaaagtaagattaaatgtattcattttttgtgtttgagaaagcaragaaatgtataatacattttaaaagatcaccattcaagctggttaaaatgaaaatgtcttactccttaaattaaaaaagaaaaaaaaactagatttttcagatatctgaaaaaaaaatgtttttaaacgcagaacattgtgttccctgatgataggaggtatttattctgtatgagaaatactttcagaaaatgtggattcacatctttctgtcatttactttgggtgacatgtagagcctctttcttaccattaggtctgtgatgttccttctttctgactcactgattggcttaatttctyctcaaattggacaatactagatggaaaataaactgaccccaaagtggtggggaaaatcatttcatagcagtcagttgatttttagatcaaatgatccttctagaataagttctccgaaggtggcaaaattgttatagaaattcagctgcctttaagatcatgttttatttctcatgtaatcaataataatttatagctctacaagtagaaaagagagcaaaaacgccagatttttaggctcatggcttgacatcaaactgtgttttacaaacctctttggtcagtctcaagtagtttacttcctccrtaccagtggttctcaaaatgtggtcccctgcccaggaacatcagcatcacctgagaacttattagaaatgaaaattcttggatcccaccccaaacctactgagtcagaaactctgcgattagggcccacaacctgtgttataaaccctcagccaggtgcagtggcccacacctgtaatcccagcactttgggaggccracacaggtggatcacctgaggtcaggagttcgagaccagcctggccaacatggcaaaaccctgtctctactttaaaaatataaaaaattagccaggcatggtgtcgggctcctgtaatcccagctacttgggaggctgaggcaggagaatcacttgaatccaggaggtggaggttgcagtgagccaagatcgcaccattgcactccagcctgggcaacaagaacgaaactctgtctcaaaaaaaaaaaaaaaaaaaccctcaaggtgactctgatgcatgacatggcttgaggactgatgccctaaatcgtmmtrwawyggtggaaattaatgatcttgagttttactttaccatgtataattctattccaaatctgcatatattagctatgtaaaattttctttgttcactgcacattgtcctttttatggtaaataattttcrcagtaytttttgaggatctcatacatgcttgatatttgagttcagtatttttctacagaaaaatttgaaggtaacctgaaatcacaatacttctggagacccaaaagaatggaacttagttttggaattcaccattatkcaggaaaggtaagaactctaaagaattatgactgagtttctccttagccttttaatgaataataggatagacatgaaaattatggcccaaaatgtttatagataatgataatgtcatagctgtctgtttccrcccccactggccctaattatgccctctgatgtcctgtaatccatcctgtcctttgctagccactcactatggaggccagacccactccagggcatgcgcttctagcatctatgctgaagaggttaaaagaaaagtctttctcttagtttaacaatcataagtttatagtttttctagaggaatcatttttaagtaactaagaaaaaacaaaaagaaaagacacaaaactgaaagaatccttcggtgagattagctggcaatggttacctatttgtttccttcttgtagcaatgcctgaggacctttggtatagactgcctttttcagactttagatgattctctctctactgcactctttgtccctcctccctttcaagaagagaaggtgccaggctggaggtacagtcagataactgagctaagccagatgaatggattatgatgcagttagaggaagaaatgtctctacattgacagaaacacattcccacagcagagaaaacctcagatttgttgtcctagacccagaggatgctctctttccttccttctgcagagaatgacaggtcattctttcacaatgatgtcataaatatgggaggacaaagaggatattcagatcaagaaagaatgtatcaaatgaaaaatacataaaaataaaattacacagaacttaaagttatctaaagttatctaaagaaacaatctattagtctgctcgggctgccataacaaaaataycacaggctgcatgacttaaacaacagaaatttatttttttgacagttttggaggcttacagatcaaagtgctctaagtggggttagcatctgggaggcctctcttcctggcttgaagatggctaccttctcaaggtgtccccacatggcctttgctatgtgagcatagggagtggggagaaatatccctggttcctcttcctgctcttataagaacacaagtcttattggtgtagggtcttactcttataccttatttaacattaattacctccataaaggccctgtctccaaatacagtcacagtgaaagtttacatcttcaaaatctgaattttagaagaacacaatttgacccataacaaatactatattggatcatttccacaaaaatctttggataacattgatctttaaaaagtcgtaaaattggctaggcatggtggctcacgcctgtaatcctagcactttgggaggccgaggtaggaggatcactggagctcaggagttcaagaccaccctgggtaacatagcaagacctcatctctaaacttttttttaagtaataacattatttagaggtgccagaaacacaaaaagccacagtgtttttaaatcacactactactgagataaaaatctatcatggccaattcaacacaggtggatcaattatcatagaaataggaatgcctttgtggctcaatatgcttcctttatgctgctccatccctccaaacagagaaaagaaacataccaaattcctaatgtaataaatgagaggaatcaaacctctttggtcatttcaacccaaataaaancagtgwgacacwgatgataaggagctaccttaagatgataaggggctaccttagtaaatgcttgtatcactgttgctgaacatagagtaagctcataatgagtatctgttgttgatkatgatgatggtgaggaggaggaggatgacaatgacattgattgtgataattatagcatactgtatcaacaggtcctctataatgcaagtggattcttagccaaaaacagagacactcttcctactgacattgtgctacttttgaggtcatccgacaacagtgtaattaggcaactagtcaaccaccctctgaccaaaacaggtaagacaattttccttacctggaagttttctgaagcccaatcaaatagtttctatctckgcgcttttcactaatttcatccttaatttttcatgtgagtttgttttcggctcactaaatattcatttgttaatatcctctgccccagatcatctgaagaaaatataaaaatgaatataaataagctagtttttcattaaaggtaagtgtttgcagcagtcatgcagaaaatgtggtggtatcctagctactcactacaagagtatactgacctccagagttcagaattacctgggcaaatcaggagtgggcagcttttggatgattctttgaggttccaaaagtttggtgggctctcttattgattaaaaatggacgtgtctttgttccacccaaccataatacatccttgcatttgctgtaagtagaaaaaatatagtttgggttgtttttctttactggagtttaaaattgttctctgcatttcttttttcatagttttattgaagtataactgaaatacaagaaacagcacatatttaaacagtaaaatttgatgagtttttgacatatataagcacctgtaaaactatcaccatgattaatagtgaacatactcatcactcacaaatgatgtttctcatgaccctttataatccttccctccaaacctctctgttctatcaccatttgttgaagagattgttctttccccattgaattgctttgacactccttgaaaaatcaattgactaataaataggtctatttctggactctttattgggtgtcattgatatttatctatctttaggctaatgcacacttcttgactactgtagctttctataaagtcctgaaatcaggcagtacaagttaacctgactttgttcttattcaggcttgtttaggtaattataatttgtttgcttttccatatacgttttagaatgagcttgtcaatttctaccaaaaatcctggttgggttttgattggaatgcactgaaactatagatyaataatgggagaattggtatcttcccaacattaaatcttccaatcagcacagtatagctctccatttatttaagtctcccttaatttctctcagcaacattttgtagttttcactgtacaagttttgcacatcctttgccaaattatctgctagtgtatcacatttttatgtgattataaatggtaatttttaactgaaattctggtttttgccagtatatgaagtctaattgatttttgtatattgattttttgccctgcagccttgctaagctcatttatcagggtagcttttttttgttaattccaaaggattttcttcacagattgatcatgttgtctgtgaagaaagagttttgcctgttcttttccaatatgtttccttttgaattcttttttcttggttgcactggctagaatcacaatgcaatcaccagtgttgaacacaggacaggttgcaagagtgaacactcttgcctttttcctgatcttggggaaagagtagttagtcttttagtctttcaccactgagtataatgttaactgtagattttttcatagaagccctttatcaggggagaagttacttttttttttaattcctaatttcctgaatggttttttttgttgttggttgtttttygtttgtttgtttttgtttttcatgttttttttgagacagagtctcacactgttgcccaggctagagtgcagtggcacaatttcggctcactgcaacatctgcctcccaagttcaagagattctcctactccagccttccgagtagctgggattacaggcgtgcaccaccacgcccaactaatttttgtatttttactagagacagggtttcaccatgttggccaagctggtattgagctcctgacctcaggtgatccacccgcctcggcctcccaaggtgctgggattacaggtatgagccaccacgcctggccaatttcctgagtttttatcaggcatgcatatagtattttgttaaatgctttttccacatctactgaatagattaccctttttttttgttatttttttaaattgacagctaaaattgtgtttattgtatacaaatgacatttggaaatatacgtacattgtagaataatgaaatccagctaattaacatatacattactgtatataattatttgtggtgagaacacttaaaaatctactctcttagcaattttcaagtatataatactatgaacttacgtatcctatctagctgacattttatcctttgaccagcatctccccaacctacctcttctcactgcaaccaccacaactactagtaaccaccattccactctctagctctatgaaatcaacttttttagattccacaaattccatccagtatttgtcttttttgactggctaatttcacttatagtgtccttcaggttcaaccatgttgaatagtattcgtgtgtgtgtgtgtgtgtgtgtgtgtgtgtgtagacaccacattttctttatccaatcatccattgatggacacctgggttgatcatatcttggctattatgaacaatgctgyatctgttaaatggtgagtgactgattttttaatcattcctgggaaaaacctcaaatggtcatgatgcattgtactttttatatattgctgaattcagtttgcaaacatgttttaagaatgcttgcatctttgtttatgaggaatattgcactatagttttcttatgcttcattttgtgactttggaatcacagtaatgctggcctcatagaataaattgagtaatattgccttttcttcaattttcaggaatagtagaatgagtattatttcttcctaagttgcyttgtagaattcaccaatgaagccaactgggcctgaaggatgttttgtgaggttttcaactacaaattcaatttgtttagtaaatataaagctatctgagttatctaatttttgagtgagctttagtagattgtgttttttaagaaatttatttcatctacatagtcaaatttattgacaccgttgattacaacattttcttactatccttttagtatctgtagatcctgaagttatgtcagctgtctcataagtgacgttggtaatttgtgtcttctctcattttattcttgatagatttcctagacatgtgttaattttattgatcttctcaaatggtttcattggtttttttattggttttgtttctatttcattctctttttctttctcgtttatctttgttgttttctttctctgcttactttgtgttttattttgtttccttttttcatttctaaggtaaaacttagatcattgatttaagaagacatttttctaatatcagcacttatatgggttatttataagagtttataaggtttccaaatatggtgagatttttcaaatattatttatggacttctaatttaacttcatagtgttcagagagcgtactttgtgttatttaatccatttaactttattgagatatgttttaagacccataatattatctgtcttattttattttcatttgcacttgaaaatattgtttattctgctggttgttggatgaaatgttccataaatgtcaattaggtccacttgattgagagtattggtcacatcttctgtattcttactgtttttctctctcctggttctatcaattactgagagagggatttttaaatatttggctatagctgtcaatttgtctctctttttttttcagtttttgctcatgtattcttaagctatattattaggtaaataaacatttaaaattgttatgtcttcttgatggatagactcctttgttatgtgatgacccttttcatccttggcagtattgtttgttctgaaatctactttgcctaatattaatatagagactccagctttcttatgattagtgagtgaatggcatatctttttccatactcttaatttcaacttattgtttttctttatattcaaagtagggtttttctaaacagcacatagttgcgtcttggttttttttaatccagtctgacaatctctgcctttcaattgagatgattagatgatttacatttaatgtgattaatgatatggttggatttgactcttatcatcttgccacttgttttctgttggttatattggcttattttcccaggctttacctgagttccctcactcgctgcatttcaggctgacacttctccaggcagaaagctggcacaatcagagggctcacctcatttgtcttccctctcttagggatcaatgtccttacactgcttgacgcacaatgtatgaaacctgtttttcattttgtatgtctttttagttgtttgaggtgcgaaggttaatctagtcggtgktactttatctgacccagaagcaaaagtcattaattttgactttaacaattgccatcccttttcatatacaccaacagcatctatccatctaattccatgttttttgcccttataaaatatgcagccaggctctaaatactatgttgtgttgcttggctatcagcagaacagtgtctggttggccagggagaagagaagaacttaatagtcargtatgtttcaataaactcagaacctcagagatagcaaagacatatggattttatattcacccagatgtgcaaacatgtaataataatcatagacaactttgttatctattatgtgctaggcaccgtgctaagcaccttcaattactcctaataacaacacaataaggaggcactacttttttacaaataagacattaaggcttgaaagtgttgagcagctttcccaaggtttcccaatggaaaatgttagagttagagttcttcaattctatattatgatgtcttcaagattctaaaataaccatggccctttgtatatatgacttcacatrtgacatacagttcagccatttttaggggaaagtgcaccacagttacttgcagctcacgtctttagttgggtttatcacaagtttgttcattaggtgagctataaaaaccaaaatggatatattttcagaaattaaggtctatgctaattttagttcccgttgatctacataaataaatttaagcgaaattcctgaaactgccactctaaagatcatctgttactgtatctgtccactctgctgtagtcagtaagtttcacattttgaaaagtgaacagggcagtgtgcagggcaagcctagcatggaaactgtggcacacacccgtctcagcccctcccctggagttcggatggaggggaggaagcagagcagaggccctgccaggcacactcccatcatgattccttcctgcaccatcttaggccagccttttgcaaccataaagaatgggaaaggtttgccaaaaacattcagcctctacttatcacctagaagaaggagagagacaagaaatgatctttctgaattgatactgcattttgaagatattttgcacattactattaggataataaactcttcgattgtgggttggttggttccttgtgcttggtggggtgagagctgtgaaagtgaactgcatttcaggggccttccatgtgccagacatattatcgcatttcatcaaaactctgtgaggaaatcaccattattcccattttatggattctgggtgcagatcagagactaagtaaatgacccaaaggcaacacagtttaagtactatacctgggattcaaagccaagtctttctggcttctcaggccataattttttcactgttttgggttgtgtgcatttgtgtagtccttagaatgaagcacgtttctgaaagttagattgaaaaaggccattgcctccaaccatagttgatttgcttataaccacctcatgcaaattaatgattcatatgatttttcaggccaattgtaaagcttagcctgtgttaaagaaaatctcagatgccatttatcacacaaaaaaataagaagcaaactgctccctcaatcataatcatctcaagtcttctagcaattcaaaggaaacccaacacctcagccttttctgttttccaagctcaagagtttttttctgaatttaaaatttgttgtacatttttacataattttttttattcctaagttcctccataaatagttaaccaagcatatgattatgaatattgcaggattaacaatgcttattttaacatttaagtaaatgggaaaaatcatctagccattaaggattctaaaaggtatattacatttttctacattctcataggtaatctgccacattctaaaactaaaaatgttataaactatcaaatgaggacttcagaaaaattaatcaacctggcaaaggtaagaaaatgctttttttcttggcagtgagtctaagaatctaaccggtatgatggcaatatttgtatgcttctcaaagtcaacagtttttttcttagtttttctccctttgatcttgcttttctgtttgaacagatatttatgttatgttcttgttactgctaggggctaaaataatcatgcatttctgatatattaatatttccaactcttcttttttagctagtttttggggggcagtttttgtttttgtttgtttgtttgtttttgagactggagtctcactctgtcacccaggctggagtgcagtggcatgatctcagctcactgcaacctctgcctcccaggctcaagtgattctcctgcctcagcctcctgattagctgggattacaggtacccacccacacccagctaatttttctatttttagtagagacaggatttcaccatgttggccaggctggtcttgaagtcctgacctcaaatgagcagcctgcctcggcctcccaaagtgctggcattacaggcatgagccaccatgcctagcccttttttagctagttttaaatgttacactaagaccaactaaaaatgtactagtgaagatgagagatattcacagtctacataagaccaattaaaattccaatgagactgacaaaacaattacctaaaggaagaatatcaacattttgctgttttacatatttgaatgcataaactaagatagcctgaaggaaaatgccacatgctgtctgtagatamtaaagtacaatrgataccaargcatcactgtcttccttggtctccttagggcgacactggagaagccacacgtcatgccagagagacaaccaacatgaaaacacaaacggttgcatcatattttagagtaagatattaaactatgatgtattgtgcttaggggtgctatttagtctaaatgagttacagatcaaaagccagtaacactagcaaagagaatgtttattgtattccatttactattgttagatacaggatatgttagcatctaccttcaaaatctgcagattggtttatttttacattctacctgtgaaattattgtatcccaggtcaatcttaatgaaagtctataccttgattaaaatttgtccatagaacagaatgcatttccactagaataaaacctaaaaggatttttacttcaatgctatgataactaccaattctccttccccatcctgaatgattttagagtagacagatagggcaaggctgagcatccatctccatttcatatcaccctgcctgtacagagctaaaaacctcaaaaggaaaatagagcccgtgtaggaatggtgcgaggagaagagtcatcaggaagatgcggtaacgtgcttaagagagtgtgcttagcataggatcaaggcgaccttccttycttgggcaatgtaggataaaagaaaaaaaccaagtacttttttttcctctgtgctctagataaccctcccattattggttccagttcttgtttacctattctgataaaaacctattaaccatccaatgaaaatgaagaaaataccactaaaacttggagttattacttatgtaatttaatgtggaggaggtggaggaaatyagattaaatttactctaagtgttcagtgaatgtatccaactctctagcagaaacataaaattctttaaaaaatatatgagtacctttactaaatattttttaagtccgaagctcatagaagacagtgtgtacttaatcatctttgagtagtgccagtacatttatatgcttaatacctgacgtttgttgctaatacatttcactttacatcagaaatgcagcataggtgaatcactgaacgtatttacagccaagttgtttcctttttttaagtgagttacccaacaccattatcataccactgttgttggcatcaaacactgtatgtatgtttaaaccagattagttcatgaaatctttttaatcttcaggctgaagtgagaaatgatagaagataatcccacctaacatgaagtgtgtttttaaagctattttcattctgcagagaagactgaacacagtgtaacactatgctttagtccctcagaaaaaccagcgcctaaattgcaggaaggtcctgcttagagtatcacccctgtaccaccagtacttggcagatgttckcacgagtaaaggaatgatgacttacagataaatgtaatgaaaaaggctccaaagtgacaggcccagctgtttgaaaagatcacatctgagcctcagtgcccaagaggaagccatgcaaattcagagctttgtcggttgccaatttcagcatttgttttgcactggctttatgactgtaggctcttacatttccaacactaaacgggatccagccgtcaattgctatttgtgtccatacattacctcaccaataaatgtgatcctggtctttgagatactcgctttctgggattccacttttagttgattatcctaatatgttatacttacttgtctagtaattggctactgttttaataaggtattgctatagaacacagtttcatatctatgtgaattttttaaattatccaaaaataaataagaaaatgatcaaattagaactgatgaaaatatttaattggatttcactttgcttatatctacttcttacatattaaacgctattgacttttctgtccttattttaaactaagagatgatcctaacagggattaaggtgttcccttttttttaattgtattttaagttcaggggtaaatgtgcagtttggttatataggtgaagctgtgtcatggaggtttgttgaacagattatttcatcaygcaggtattaagcccagtacccgttagttatgtttcctgatcgtctccctcctcgtactctccaccctccaataagctccagtgtctgttgtaaagtattcccttttttaccatctataaagagagagttggacaaggaaattaatatataagaaggattagtaagattgtataatattataatttggtaagttagcctaagagtatataattgcttacaaactacatcaaaaataattttatctgttaattaaagttgccttaatggtttataagcaaacttttaatagctaaatttctagttactgcctctacawttttataagtaaatctgtattttttagaactatactataaataaaatgttcattaaaacagattttcctccatttactgtgactaatgggagcatttataacattcattttttgaatgttattcttgtagtaaaaagaaaggcctayaagctcatacgtttttgtatgctacattgggaaatttatttttgttgtgtattatagtattccctgatggatttgttgtctaaaatggtggtgggccaacctcattttgtccgttgcatcaaaccaaatartgagcgtcaggcaagaaaatatgacaaagagaaagttctgctacagcttcggtacacaggaattctggaaacagcaagaattcgaagactaggattctcccatcggatactttttgctaactttataaagcggtatgtggatttctttttcagtttctattgtgcagtttatataaaaatcattcagaagaattataagaaacataatatgaaaaaatctttagaggtctaggagggaggcattttgttcatgcaaatgattatgtgttgaaaaaagaagatagctattaactgaggctgaaagactctggacagatgggtggtactatgtggtataggcagcatgatccagaggcrtgagcttctgtactgaggagttggagaatctgggttctcgccctagctcagccacttgctatgtgactgtaggcctataccactgattctcagctgggagagattttgcccctcaaaagacacttggcaatgtctggagacatttctggttgtcacatcctgtgtggtgtaggggcgtggggggatgctactgacctctagtgggtagaggcctgggaatgctgttaaacagccattctacaatttacaggatggcctccccacaacaaagaattatccagccccaaatctcaacagtgctgaggctgagaaaccctggcctataaccctaacctcactttactcgcctaccaaatctgctctaactacctgataggatccttataatgatcaaatgagatactgtctctaacggtgatttggaagatgaaacaattaggtttatgtgtcaatttaaaaagctaacataawtttttttaaaagaatcaattggtataaggaatgttttattttattttatttttttttttgagacggagtctggctctgtgacccaggctggagtgcagtggcgcgatctcagctcactgcaagctctgcttcccaggctcatgccattcttctgcctcagcctcccgactagctgggagtacaggtgcccaccaccatgcccagctaattttttttgtatttttagtagagatgggggtttcaccgtgttagccaggatggtctcgatcttctgaccttgtgatccacccgtcttggcctcccaaagtgctaggattacaggcgtgagccactgcgcccagccaaggagttccttttaatatttgagattaacataaaataaattaagctatatactaaatatattttattgagtaatacgttattagtaatgtgaaggttcaatatcttatatatttaatattttaaatgcccatattttttatattttttcagttctatcatttctattggtcattaaacataatgaaatttccatttttaaagatgaagtctattaaaattttcaggtgaaacccagtatttgaggaagtcccatttataatattcttcaccctttttcaaagtatataaattactattaagaacaaaaccgtgttttgtgattgcacatcaaacttgatttctaattttcctcccctcctccgtaaaactttatgcattttattagccattcttttacttggagtaaccaagactccttctaaatgtgatgagaattctgattatttctgctaattttttttttttttttgagacggagtcttgcactgttgcccaggctggagtgcagtggccggatctcggctcctgggttcacaccattctcctgcctcagcctcctgaatagctagaactacaggcgcccgccaccacgcccggctaattttttgtacttttagtagagacggggtttcaccgttttagccaggatggtctccatctcctgacctcgtgatccgcccaccttggcctcccaaagtgctggaattccaggcatgagccactgtgcctggcctatttctgctaatttttatatgttcagcaaatttgtggtagttcttgatttagtttttcttttttttctttttctttttttttttttttagacagagtctcgctctgtcacccaggctggagtgcagtggcgcaatcttggctcactgcaagctccgcttcacagtgagcttgcattctgtgcaaactcacgccattctcctgcctcagcctcccgagtagctgggactacaggtgcccaccaccacgcccggctaattttttgtatttttattagagaaggggtttcaccatgttagccaggatggtcttgatctcctgacctcgtgatccgccagcctcggcctcccaaagtgctgggattacaggcgtgagccactgcacccagctgattttggttttctttagagacctgggattatttatttggaatgctttgaaatcaagaaaactctactacctttttcatgatggagatcaaaattacataaacatatgacttttgtgttggccaatccttatagtagtttaagacaaaccaaaacctcaagtttagagtccagaaatctagttagcagctaatcatcaactttacttcctacagatcagacacaattttataaccaaaactaagaaataaaaaaatggaatttttttattggctaataggtaaattctccatcctgctcatgaaagcaggtaaaccaaaaatactagatacaaaggagtttcaaatatcaaattaagattaaaatttgaccttattatcatgcacttcatgtttcagaaaaaaatgagatctttaatttgcttaaatagtaatatagatattatgagtgtaatattaatataagtactcttaaatttcagtgattttttaatgtataaggcaccatgctaagcactgtgggagacactgaattttagaagtggcttgatcttcaatattggacagtccagttagaatcaccagaggcacagacatggaaagttaacaagcaatgtgaagtaataagtgccaaggccaagagaatgatatacacagtgtaagagttcaagggaaggaagagcatctccaggaaggctgatgagagaggatatcaagaagaggcattcagctaatgcagaaggatcatttgakgccaggagtttgagaccagcctgggcaatgtagcaagaccccatctctaaaaacaattttttttaattagctgggtgtggtggctcatgcctgtagtcttagctactcaggagtctgtggcaggaggatcacttgagcccaggagttcaaggttacaggaggctatgttcataccactgcactccagcctgggtgacagagcaagaccctatctctaaaaaaaatgaaaaataaaaaaataagaagaaggactcaaactgggacttgaaggagggtacggcttatggagaaaacaggagttttcttggtgtacaggttggtgtgccaaaagctagcgggacttagattggattgggttggtagagtgggcattgcattggtgaagtgacagaagataatatgaaaaaacaattgtgttaaaattatgaagagagccttgaataccagcctaatcttatagcttgaaaaataaccatagttttacaatgtagagcataatgagaataaaacctattttcttaatgatattgtagttcaaatgtcagaaatgagaataaattcttaaatatatttgtaattattgtgctattacagaatagcaaattactacacaataaataaagagaaggggataaaactaagtgtatagagaacacatgaatagctgttctgaatacaggaagttccagaaataaaaggctaaaccttttctgtgtcactaatttggaagttgtcatccaaattggcatagactcttaggaaggcagaacaattttcagaggttctatgggggtgtaaatagaactgctaatcctctgcataggatgcaaaattccccagaccctttgttctgttgtagataaattcttctgttctataacaaagaaacaatcttaaggaaaaatatacaacatgaactttgcacaagacactgggtttttactgcagctatttcaaaggaacccttacgctaacaagccagccacttaacttggctccattttcccactaagcacctgtacataatggtttggctaccagagctctaatacaactagaacttactgaaggcagtagtatggtggagtagataagtaccatgctttgaagtcagcaaacccgggtttgaatcccaactctgccacttactaaatctgtggccttattcaaagttacttgagttctataagcttcaagcttcaatgtccttggctgaaaatagggatgataataacaatatctacattatatatgtgtttataagtattaggtgaaataatatatatggattttattgatagaaccaggtgtcatcaatacatattagctataattatttttattattttttttgcctcagtctcaagctcccaaaattacctatgacctatagtggcctaggggatgccctccataagcacgtgtggcttacctaagtatttatttccacaagtcccagcaacagcacattatacattcagcaaacgtttagttgagggacccactgtgttccagtccttgaactaaaaatgagttcaaatcttaattgaaagattcaaagtccaaagattaatggatgagcccctgacattaagaaactyacagacctgttatggaaacagggctttaaaaatctgcattatcatgcaatgtaaagtcagctgcaggcagcaagggtgtgggtatcctgtgttcattgttgtgtctgaggcacctagaagggttcctggcaaataaatagtaggtgctcaartatttttcaaattaatgaaagaagaccgggtatttttaatgaaagtataaagaagatactctgagagcataaaggaaggatggtttagattgtatgagaaattctgataaagcagagaataataaaagtaatacataaaacwcagcaaaaatatttttacttacaacatcaatgtaagtttgttttttaaccttttgataaaggcttaatttttttctttgagtgtacatctattaattatagtttattggctctttcttgcataagctatctgtaatctctcatttatgatttccagttaacatttcttggagtgaagcaagatattaaaaatacttgtgaaacagccacaggactgaatatttcttgattcttatgattttcctcaatgctttgtaattgcttcatccacgtttaatttcatggttttttacaagacttctttataaagtcttaccaaagcatttgatgcagttttatagaaacaatcctctggctttctcacttagatttcaatctgatatttatttgaakaacatcacaccaaatacaactggcataaacaggtttgggggcaaacacagctcatccagtgagagcaaacacacacacgggcgcactagtgagaactgccagccttgagccttaagtgtgcagcggacctcagttggtgcgttttgcataagaaaagacaatttcattactccagttaatctgttaattgaagatacattgaggagagtttttagaatattgaaaaagtaggtcttccttaaggaaactaggagtgrgatgaaagggcgcgcaagcgtagtgagttacacatacgaaggcatagaagcatgagcaaacatggccctctggcacaattttaagtaactttcatgactggagctcggagtgtcatggaaaatagcaaagaggaggctggaaaggcagatagggatataggagggcagaagggagcttgcatggtagtcatcatgtgtggcaaacaatttaaagccaatgctttttggcaggtgtaaccttttcctccgacattcccactgctcccaggctcccatatttatggtatctgcctagactttgaaagcacctgattttgccatcccagcttagaacttgggacatccatagagacttttcgagtcaggaaaggacatgatcagattttcatttaaaaaaagataattcagacagagctgtggacggtggctggggcagggcaggggagtgacagtggaggtaactagttgggaggcaattgcaaaagtctaggtgagaagggatgaggtattcaattaaggtaatggcagcaggcatagcgagaaacaaatggattccagagagactttaagcttgttagatccatagagtgaagaatagggaagagtaggctggcacacagatttctagctcaccttttaaaaagtggtaatatcattcatagagacaggaaatggaggaggaaggaaaaagtgatgaatgtcgctgagtttaaagttaaccaggtgggcatgtagagtaggaagtcataaataatgtgtttagagttgatatcaacagttagggttgatggtgtaaatttaggaatcaccacatacaggaatagttggagccaagcatgtagatgagatgcctgtggacagagcttagaaaaaaatggaacactgtagaacactagcgtttaagcaacaagtcattaaatcattaaatatggggcatgcagggagactaagagggaggaggagaggcaggggacattaggtggaagccttggagagagcaagacagaacagccaataacagcaagtgctgcagaaaaaacgcttacaattagaatggaaaaggacctgttagatttcaccactcctgcatcctttatgagtaaataagaggccttgttgctatgtgattaaatgagattcttggagctgaagaagtgatgggaagtgaagagtgaagagtgatgggaagtgaagacgattattttaaaccgtctttcaacttatcagcaaagctagtggaagaaacagaatcattacagatgagcgaggcttaaggtgtttgctttgtaacaacacacaaacatccattttgtaaatggagggagccagaagagagaaatgagattgaaaatatacagaaaaggaggaggagatggcctctagaacacaggcggaggatgaaaatctcctctgaaggaggagggaaaattgatagtgaacaaatgaatttttatttggggaagaagcctatgaattgtgtgtctggtggcttccagtgatatagtagagaagcttgtctgctgagagaggtacggagggcaggggctgctgggagacttggagaaagcaggacgcaattaagtcgcttttgtgaggaagaagagaggaaagtggccctggacactggtcaggatccagagctttcttgggagcctggctgagtcaggaatccacacatccacagggagccgactgtgaagattttctctggctgtgctctgaagcccggcacgaggatagagacgcagatgattggcgggtccaggcacgcatgtttgcagggagtgcacaacaaaggaatgagagtaggaaaggtgcgggggctgcctaagggtggctcctgcgatgaactgtgagaccctggctggttctggaaggaaggaaagccaagagttgatggacaggctgtgaatgcagagtcgccgctactgggtcaccatgtgtacatgagcgagttagtcctgaagtgagcaggcctagtggctaataggcactccctggggttatttgcactaacagcaaaagttatggtcacttcattctataccattctaggccagtattcttctccacggagcctaacagaagctacttcattgcagatttaatgaggtgaaacttagcaaagttgaaatatgttcattttagaggttttatctccggactcatttttagatgaggaaattgatacttaattgtgacatgtccaagtatatacagttaatgagtcaagggtaaaactctgctctgcatgtcaccgtgccacctcagccgtctacatatcagggcctctcttttgaaattcaaaacctaccaaaatttgctgctttgttgcactggactttcaggctaatcttgcaccaataaattaaaaatagtagagtattaaaaattctggaaatctgtctttttgcacaagattattgaccagtgtaaagcagattttctttccttaattcatccccttccccactaagccttgtgatttaacctgaggacctgctttcagttctttcctgcattagcccttcctctttccttccctcgattatggatagattaaccaatagagcaaaactctagcaggmgacatagtgtccctcaaggaaaaacaatgatggaaggcatgtatacagtgatgggaagtttcactggaattaagctccatcacccaatttgaagatcagcttccagagttttgttaacactmaatgtgaaaaataattccttctgcttcctgccactgcagtcctgcactttttagtgtccagagaaaggtagcgaaaaaacaaaaacaaaactgctaatttttttgactgatggagttcttgtcaggggagtgcagtattaagttttgaaaggtgatcacaaaggtgaaaacacaatgctcaaatttatacagactggactgggtttccatcagtttggaatttggtctactccgaagttgttctgaggatgcctaaaggatttctccgcatcaagtctgggcatctcttcctcagcccctgcactaagttgttggggaaccaccaagctacagagatgttggcactttatgcaatactaaccagcccttttttccattccaaggtactaccttctctgctacaagtcgagcraggagccccgcatgagccctgacacctgtgccaccattttggaaaaagctggtctcgataactggrctcttggaaaaacaaaagtaatgttttcatgtaattttcaggaaaataaataattatgctgggttcactgagaattgtaacattttacaatgtttgaaagtatggtttttttatgttatagaatctataacttacaatagaggaagtaaagttataaactcataaagattttctttttcgtcaacattaaaggcttttgctcttcataaagatttcttttaagaaatacaaaaggctgggcaaggtagctgacacctctaatcccaacactttggaaggccgaggtgggagaatggcttgagcccaggagttcaaggctgcaatagctatgatcacaccactgcactccagcctatgcaacttaagaccctgactctaaagaaaagtttacattgaaatttaaaaaaagaaatgcaagaaaaatttatcttgaagatttatcaaaaaaggataaaccataatgattgtactttacttcagatggtattgaaaacagatatatattctctagtttatcactactaaatatagttaaaaagctgtagagaatcataatgatccaaataagattcgtgttttcctttttttcttaattctcagacctgcttctatcataaacttgaaatttttctggagtaaaatattcaccactattactagactcgctatatgtattggacattgatgtgtttatatattagcttgcagaacctgtgagatcttagcttatttaatcccttagagaacaaagtaaaaagcataaccaatcttgaacatggaagaaagagaggtcactgtttggagaaaggatgtattggtcttctcaggtattctcatagcatcacgagacagggatcaggaaataaacagggttccattgtgcactgaatatatcttaaggggatatgaaatgtatcacggggaggatgaggaaaagagccaagctaaagccaagagatactcatagattgaccactcaagaatacctactatcagccacaccacagaagtaaaccaaaacaaactcccatatttgcaaagaaatttataatatttgtgtcttgggtgtaggagatgtgggagagaattttaataatgtttggatgagaaaytatccctgtaacaatttaagagatttaaaaaaaaagccaccttaaactgagtgtcctgtgtattcagtaatccatatttactttagtaaggggatattttgggcattaaaaatgagtattttattcacaccattttctcttagattataaatttcaaaatgatcaattttatcaggctaaaatctcatgatttayggtctgaaacacatgcctaacttcaaatggagttttaacttgtaaaaaggccttttgcagttatagttctgcatgatatttaagtagcattttaaagctatttgtattcttccacttcaccttttccaactcattaacatggatagaaagtattaatataggaacatttctaatgtcatgcaaaaagaaatgatgacctttttaaacagattgaattttaaatgaattgtcaacagcagaatggactaaatgtattaacatctagagtcctgtagaaattaaaactgaattaaatcaaacctgtaacacaaacgtgtttacccatggtgccaagcttttaagtaatggaacactgagagaattctacagtcagggttatcaggtctcatgactcagccataaaatttgaatgtaagtgactttcttgaaggattcaataaactctttgagatgagttttattaggaaatttagccattaaaaggaaaacaaacaaaaaacaagcttttcatttccttggaggaggggagagaaatgttagatgagaacacgccaagccttcgggctcctcccttgctccaattgatgttgattttagaataatcaaaagtcagccctcccttctccatggcagcctttgggtccagtgagaaccttgttaatgaaatctgcctggggccttctcttggccttattctcttcactgacaacaataccagccccaaaggacagtgacctgccttgttcatctctgtatccccagcagatacgtacctgtaacaggtctcaataacattaataaacattagatgaattaactaacggaactataattctgtcctctactttataataagatctattcagatttttttaatttgggaaatatagttgcctttaaaaaataaaaagcataaaaattagcttagcccagaatatacgatgctagaaactttgctaaaagagctcaacatcctccactcttattgtctcatccaacaaaacctagttacctgttgtaaataaacagcatggttgtcaccttctgcatttcttctcaaagaaatgttttcttcaagcataaaaatctgtactgtcatagtgacatctagggcaaagaagcaaaagacagtgatttcnaaaatctcaagcaayttagaatgtgttctgttcttcaaagcacagcacrtaactgcttcacatctgtgtgccatggttctttgtattatattttaattttycaggtgttccttaagtattatcacgtggagcagttaaatctaatgcgaaaggaagctattgacaagcttattttgattcaagcttgtgtcagagcattcttgtgttcaagaagataccaaaaaatacaggagaaaaggaaagaaagygctataataatacagtcaggtaatctctttgacatatttagatatggtcataaaatcaaatcttataatacttcttacaggcaaacctccaattcttgtgtagcttttgtgtttaattccagactgtgttgccttgatacttttgctatattaaatctaagtcaaattgttttagtgattgacacttttaatatttggataaacgttttgtcttaaataatttaatttttaacttttctgtcaagaattaatggaacacaattgacctattgtggangatatagcaaataattaattatagatctcaagaatcatattattatagctcattggacaataagaattttttctactttattccaaaggttacacttgccataatttttgacaacttaaatcttattttgttaaagggcatccatttatttctgttaactgtagagaaataatatttataaccatactttacttcacatacttttattaagctgtattaatagactttggattttgctttctatttttccataagaaatgaaatttagatagagcttgtcacagcctagtatgctctctttcaaatttttttgactggatacttagagaaaaaaaatgtattttgctttttaacctatacacacacacactacaagcactgtgttctgatctttttaattctagtctattccatttcatttttagatgctagatttggcctactacatcaattttatgatccactaatggtttgcagcctgcattctgaagaacactaatatcgtgggcagaggagctgactgacattcaagagattaacattccaatccccgttctgtcaatcagcaatgagtcatcctcatctctttttgtattttaagcccttaacttctcactgagaaatcaaaatgcaaactcagtaatttgggctctaatcctttatccacaatttcaaaatttataaagctctgataaaaaggttcttcatagagcctttggcagtaaaacatagcaatgtgatgtgaagttatttacagttctttactcccccaacttagtaaaaatattctgtttttctgaagaaatagtcattgattattgggcgctgccctgacacagggaatgttacagaatatatatttgctctgtattaactttctaaaacttaaaaaaaattaatctgaattctcaaatatacaatctgatcatctgaaatgtatctggccaaaatatatgaaacacatagcaaaaaaatgaaaatgattattactgaattttaagcaaatgagcacactttgtcatcaactttgctcatctctatcattttgatttcattttagtattcttcttagtatgaaagttactttagttattgttgctatagcttgccatgtagaagaatcttgttaatgaatcacatttttaagtgaacctgttctatttggcattttaattttattttcctctttgacatcaatggtcaaagccaccatttctactctttaaagtaaatttcttttatttgtttataattaacactactatgggctttctgtgtttcagctgcaagaggacaccttgtcaggaaacaaagaaaagaaattgttgacatgaaaaacacagcagtaacaaccattcaaacttctgatcaggaattcgactacaagaaaaactttgaaaatacaaggtataatgatgttcattcttataccgttgtaacatatagatttttcagatctgtaaggtcatagaataatgttcacagcctttcttgtactagtcaggttcctgatactgacacatcaaatgtcagtgaacacscagaggctacttttgtgttctctatcctattttggagttatttctcaaatgttttcttccttggcttctaccagattgctttctataattctactcctaattctgagtgtyctttgctaatatgtcctccaatccccacatttaaatcctcatccatatctaaatgtatccctgggccctctcattcattccagtggctttaatagccaatatgccattggcccctatgtcataatcaccagctgctctttcttcttgtgagccctcatgtctgtacttccaagtgcatgttagcaaaccacttattcacttattcagcaggctttatgctgggcagtggggacacagatacgtgaagcaaaatccttatcctcaaatttctcagagtattacagaaaaaacaggacagacaaacacatccctcttgtaaaatgtgttaactctgctataaaaataggcaaagggtacactgggggcaaggaggagggaaccctgccttggttggtagtggttagggaaagggaaaaatatctacattttgcccaagtggtgaaacttgaatttatcaaactgagtacatggtcatccagagagataaagatcattccagccccaaccctagtccccttgtttttaacatcaartctggccatagaaagggtgaaggaatgaaatagaagaagaggtggcttcctagcttccttctttccccacacacccacatctaacgttctcttcacccaccgctattctctcctgccaatagtggtctcacagatgatctcatagatgacttctctgccacctcttcccctcaccttcacccacacattccctgaatccctcaggccaacctcatttccttatttgaaaaacaggaatgtttatttgaagtttagatacatttggtgttttcagtttttgtgtattctgagacctatatatatgctctctgtctttgcttgtgaggatccaaatgatttgtttctctttgttactggcgataaaacagtccagcaaacttccagacatcacaggcctgcctcaggagcaggaggctggatgatacctgtgacttctgtacttcagtctggaggctgagagaaatataaactggctgcaaatcgaagaaagatggactaattgtactacttctagaaattactgcttgtagatatcacatctaataaggaagtgtgatgttcaattacatacccatttgctaccacctttcttctgaggataccagggattagctttcaatgtagcagatacttattaagaatctactgcacacaagatccacttcagggcacatgagtgtgagtaagaagctatcactgtggtctgggatggagaatttgacattgattgggctaactctcatgggaggtggatgacaaagtcagacatgaaagaagtagaggcagaaagtcaagggaagcttgtagagaggaaagttagggaagggagaagcaggtgggcctgaccactgccagagatctgcgggccagcactccctccctcctccacttctgactttccttttccctcagctacctgaagcgcttgttttcacttaaccattccctgtcagagcccctgaactgtgacctagaataccacagcrgggagctggagaaaggcccaggccggcagggctctccagcagatgtcagaagagatcgccagtcctccccacgctggagctctgaagggttgatcctcagaagcacccatcattgcacatgttccccagccagccgcaacacagagtagagttgcctgagcccagacatgtaactgatgtgggaatttcagcagtgtgtacaagtcttcaccagtgaaatgcatttaaaggatcaaaactaacttataaatggatttttcggaacgtaatcagttagggactgcacgcttatcttcttagttgtattttgaataaatgtaagcattctcagagaggtcagtactatggaggaattcaaaatactagtgtagcgattcatcaaaatcatgggcatctgatgccctacctagttttttgactgatcctagcaggattctgctatgcctcctgtactagcctggggataccacagtaattctagtcctaggaagtggccagtagaattagaaaaatggaatcccggtagctttttccagatttgactcaaagaagagtccgacttcacaaacagatcacagaagacctaaactctcacatgggtttctgggctaagatgaaaagtttggtgcaaaagccctccaagtagcaacgagaggtgttagcatatcaaggtgtcatggtatgacattttcattccatcttaacttttttcttggctgtattgctcttgtaagggttttgcctttggctagaaaaaaaaaaaaagatgcagagaaaaccttatcttcaagtgaaggggaaatcattttggaaggatattagcaaagtagcaactgtgaaattttggccaccgtattacatgatcatgaactgtagcgaggacattgcttttcctttaattttataagatacttcctctgatcagtaaacttagtgcttattaaagtacagtatgtcagccaagtgaacataccctgcttactggtatcaaacttaggtatatttttcacagcatctcactactaaaggtactttgttttgaaaaggatatattttgaaaggattaagttcctagaattttgatatctcattaaatgaaaagatggttcttcatatgctaggatatttctcactccgagttgaatctggttttctcattatttgagtagttatcacagttgtcaccagagagaacattctggaaagcacttgattaatgtgacttgatacwttttaattttgagctttctttgttccttttgcctttctcccaccggtatctagcatataactattgccaatagaagtaataagctccagtttartactgtatattcaaagataatatattttacacagggaatctttygtgaagaaacaagcagaaaatgcaatctctgctaatgaaagattcatttcagctccaaataataaaggaagtgtatctgtagtgaagacttccactttcaaacctgaagaggaaaccaccaatgctgtggagagtaacaacagagtgtatcagactccaaaaaaaatgaataatgtgtatgaggaagargttaagcaagaattctaccttgtagggccagaagtaagccccaaacagaagtctgtcaaagacctggaagagaacagcaatctaaggaaagtggagaaagaggaagctatgatccagagttactatcagaggtacacagaggagaggaattgtgaagagtcaaaagcagcatatctagaaaggaaggccatatcagaaaggccaagctacccagtgccttggttagctgaaaatgagacttcctttaaaaaawctttggaacctacacttagccaaaggtcaatttatcaaaatgcaaacagcatggaaaaagaaaagaagacatctgtagttacccagmgtgcaccgatatgcagccaggaggaaggcagaggccgtctgaggcatgagacagtcaaagagaggcaagttgaaccagtgacacaggcccaggaggaagaagataaagcagcggtattcattcagagcaaataccggggttacaagagaaggcagcagttgaggaaggacaagatgtcttcttttaagcatcagaggattgtcacaacaccaacagaagtagcaagaaacactcataatttgtattcctatcccacaaaacatgaggaaatcaataacatcaagaagaaggataacaaagactcgaaagcaayttcagaaagagaagcatgtggtttggcaattttttcaaaacaggtatgtgaataaataaatttatttactaataaaagtccctgggaactatayaataactgaattaaacacataattaataactrgtagattgttttatctgsgttgatgggcccrcaaacatttttaataaaatgtctcagggattgtgctattcaaatagccaggaacttttaacccaatttaccgtggtaacaatagtataaaatatgatagaaacctcatgtagtcgtgatactagagattggtttatacagcttactaaaatgctgaggctcgacagtgaaaagtttgatgtatctttaattagatctttaattagagctaaaaaaaaaagtcgttttaagttttctaaatcctccaaagtttatgctttctccctttcacaaatttgagmagacataattaggtatcagattttgataggtagccacaccgaagcatatacagtgaagatgaaagtctgcatgtcacatcatgacagtgaatgaacagtcatggaaaataaggaatcacaaagaaaaaacgcagagaaaagttccctcctggagaatatctcatgccaatcataggtgtgtttcagctgtttctagagaggagcataggaagcaacaggttttagggcttctcatgggtatacatgcaatttgtctctgatacatacaatttatctctgatacatacaatttatctcctataaattggtgctatggaaagatcgcaagaaccggcttctgtaaataccaattccacttcctcctttctctttctaggcatttaaccttcataaaatcactttatgtgttagcactgttattttctccagtgtgaaaygaagagttttaactggatgatctctaaaatacatgaatttccagggtaatcaatggtgtatgaagtaataaaagaaatatcataatgggttagttccaagaaagactatctaatattcctgagtccctaaactcccctttttgtatttgacagtggctgagcctatgagaaacacgataactgcacttggacccttccttagtgygagaggtgtggcccagacatctccaacttctagctgtcagtagagatctgccatttttaatttacccatccccttcctactcttcttaagcatgtggaaatagtgagcttaacgaacatacagttcttctcactccaaagaccaaatcagggattagaactcagacctgctatgccgtggagacatgagatgtagaattaccaaggcatccactaggagctggccagtaatgccatggagtaaattcactgctccatggaacaaagctagaggctgtcccagcaggagcctcacactcaacccagcaggacagccgtgttctcagagccaggatgcggacacgatagaggcggggggcagaatggaaagagaaaccagaatagagcagccctgaaatcagggtaaaagactggaaagaaggccgggcrcggtggctcaagcctgtaatcccagaactttggtaggctgaggcgggcggatcacgaggtcaggagatcgagaccatcctggctaacgtggtgaaaccctgtctctactaaaaatacaaaaaatcagccgggcgtggtggcaggcacctgtagtcccagctactctggaggctgaggcaggagaatggcgtgaacccgggaggcggagcttgcagtgagcggagatcgcaccactgcactccagcctgggcgacagagcgagactccgtctcaaaaaaaaaaaaaaagactggaaagaaaaggaaggaggtttacacaatcaaaggcagcagaggggtcctcaggacagaagcagaaaggcaaacacagcagagtggcgaggctggaagccggatctcagaaacctgggaaggagtcgatcagaacagaattctgcatgtagcatgacgtgcttggcagttttaaagaaaaatgtragatggcaagtattcagagcacaaggggggaaggttgtcaggtgagaactttatcagaccttggtgcaagggacagggtgggccctggagaggaacatgagagtccccaagagtgctggtaaggcgtttcccagcccccggtgcctgcagaactctctgtattcttttccttgatttaacctgacacatgaccttctttttagatatcaaagttatctgaagaatatttcattctgcagaaaaarttgaatgaaatgattttgtcacagcaactgaagtcactttatctgggtgtctcgcaccataagccaattaatagacgagtttcttctcagcagtgcctctcaggtaaaaatcagtagagtyagaamttcctgaatgggaaggaaatgccagatactttgtttattagtttcccaccattattctatggcagatttgaggagcctgtgtcctgtcttaggagaacctttatttcatttcttatatggagatacagtttttttaggatgttctacccactttctaccttctctgacttaattcccctccatttagtatgttttccttttttcattttaactagaacttggcatatgacgccacaagggaataaaaggggktggtatagagaggggggctggcaggaggcagatttgataagagagcgcaaaaatagaaatagaaatatttctatttcctttgtcaacatctgcaaccttgagtatagagtgtggaaggtgcaaaaccccattatacaagaagtattgttattgaacttttttctagtcaacctattatactaaactggtgaggaattcaatctcaataattttcagacctccctctccccagagctgtgcaaaggttatatggccttgcacaccaccaaaagatcaggtacaccctgtagtctctggtcatttgcccatgaagttactgttgggacactcatggctccagctggcctccatgagcccttcaagttgggaggtctggctgctcccacaccctgcaggtggcacctagactgtggaggtctggagcctcatattatccatgcccactccaggtagccattctctctgcagtcttatgacctcccccaggagctgtcacggtaaagttcaggagtcccacgactttgaaccctgctgacctctgcccagaagaatctgcatttattttcccttgctttcttggaggccctccgcaatctcactgccccgttcagggatccctgacatcatctctgcaatgagtttggctgttaccaaagacaggaggagccactgacctcatgcaacttctaatttcttccctgaaaaaatctctgaggcagaaatatactaagatgcacttggctatttgcctgatatgagaggaaggggaaataccttaatgttttcatcaattattctgccacatcgttttcaagtcaagaattgcagtgaagctgaccacaaatggctctttggtgcccttcattcctgctgctctcctgctctctggccctggctgagagcctcctgctgtgaagaagagagactagcaagtcagagcccagaggcccattcatttggctgctgcaatggcctgtgcccaggaggcatgctggcagggtaggagctgagggaaggccarggcttcaggttccctcatggtcacagaagtggcagcactggtgagtgtggggcagagaggagcaggtggtgtggggaagcaaggaagccaggcagctcaccccaggccgctgctggaaaggagaggtacaaatgggaggcagcgtcctgggaggaagtagaggtcgccaccaagattttcacttttgaacatctcaggtcaggagttcaagaccagcctgaccaatatggtgaaaccccttctctamtaaaaatacaaaaattagctgggcctggtggcaggtgcccgtaataccagctactctggaggctgaggcaagtagaattacttgaacctgggaggtggaagttgcagtgagccgaaatcgtgccactgcactccagcctgggtgacagagcgagactctgtctcaaaaaaaaaaaaagcaaraagaagaaaaagaacaacaacaacaagggacaactttacccaggtgtgggatttcataacatctaaatcttctgattttcctgaagaaaatatacataaaatgattattcatctgttttcaaaagggaactcagacagtctgaagacagtaggaattatattaactgaacacttcagctttaatacagctaataactctgcttgccttctgctttaaatgtttatttatttatttatttatttatttttgagacagagtcttgctctgtcacccakgctgtagtgcagtggcgcgatctcgactcactgcaagctccgcctcccaggttctcaccattctcctgcctcagcctccctagtagctggggctccaggcgccagccaccacgccgggctaattttttgtatttttagtagagatggggtttcaccgtgttagccagggtggtctcgatccgaccctgtgatccgcccgccttggcctcccaaagtgctgggattacaccgtgcccagcctaatttttttttttttttttttttttttttttgagacggagtttcactcttgttgtccaggctggagtgcaatggcgcgatctcagcttgctggaacctctgcctcctgggttcaagtgattctcctgcctcagcctccccagtagctgggattacaggcgaccaccaccatgcccagctaatttttgtatttttttttattagagactgggttttaccatgttggccaggctgacctcaaactcctgacgttaagtgatctgcccacctttacctcccaaagtgctgggattacaggcttgagccactgcacctgacctaatttttcttaaatgtatgcatagttcacatatatttcagtgttggtctctgttgagaagtttggtaatgtttttgtgaccaaaaatataccataagaagttaactcttgtttatatcagtctattgtaaaattggtcatttcgcttaaagttgcagtttctaagaacccattgacattgtcaagtgagaacttactgtatgatgatgtggctgttcaaagaattacctccaacaaaggttccaagaactcctagtgttttatgcaaacacattcaaacattcatggaacagataaatctcattgtatgtgatttgtttgagaaaaaaagaaagaaaaatatacgaagttacctattttatgatgttcatctgtcctagaacaaaagtctaacaataacattttttaaaaactattgttcaatctcaattattaattaattaatttttgagacagagtctcactctgtcacccaggctggagtgcagtggcacgacctcggctcactgccacctctgcctgctgggttcaagtgattctcatgcctcagcctcccgagtagctgggactacaaacgtgcggcaccacgcctggctacttttttgtatttttagtagagatggggtttcaccatgttggccaggctggtcttgaactcctgacctcaggtgatccacctgcctcagcctcccaaagtgctgggattacaagtgtgagccaccgcgcctggcctcaattattaatttagagataaaattcctgagtatagtatttaatactagccaatggaatgcaatagtacattaaaagactgtccacataatacatattaatataacatatcaaaagatcaaaaaaactatcttgataaatgctgaaacagttttcagtaaaatccaacactctgtactgatgaaatgtaaaactcttactaaaccaaaagcagaaggatattctttaacaatatgaagaatacgtttcttaattcaatcatctacctcataattaactataaaacactggaagcagttgcattaaaaaggaggatgaagataaagatactagtaacaccacatttttatgttattgggaaatttccagttaatgcaataagacagcaaagagaagctttttcaaaaagcataactatcaaaagggaacagatgggattgtaggactattagcagacaacattaaaaatgcaatgattgatgctaggaatagaattcagtaaggatgtatagttatatagatagatattctttcytataaaaatttctaatagaaaaagagcccattggaaataatagcaaaaaaaaaaaatcaataccttgaaataaagctagcaaccaaacctgaaagagacaaaaaagaagagatgcataatggaatgatacattgtgtttctgaattgaaagataaaatacggtaaacatgaccattctaaaattactttctaggtttaaaaaaattgcattcaaaatctctatgagattttctttggaatttaagaaaatatccctaaggatcatttgtaaatttcagagaaaaaaagaataactataaatgaggacttattcattagatagtaaaatgaataatgctataataattaaaatcatatgtcccctttacaaaaatcaatcacagattaatgaaacagaatagccctaaaattgacctgagtatttataaaaacctgtcatttacaaaaagatacatacgaacagaaaagaaatggatggataatgcttaaaatgtctctgatttgggatgaggaaataaaatattcttatcttctgctgaatgcccagwtattttccagatgcactgatcatttaaatgtaagaaataaacaaaccaaatgaagccagatgctatgaactgagcatttcacaatctctgcttagaaaggacaaactataagaagtaataaaaggaattacaaagaaaaactgtgatagatttggattacatgaatgttaaaaccttctagagattccaaagcatgattaaaagttaaagagctgaagacaaaatatttggaacaaatgtaaaaagagttaaactgtttagcgtagaaagagctctttataaatcattcggaaaaatagcactctcaatggaaaaatggcacaagccattaatttatttacaaaagaagaaatacagatggaaaataagcatatatatgaccactctaggagtaaaaaaaataaaaagtcaaacccactactattctttactcatcaaaattgcaagtatgaaaaaatattttaacagtaataacaaagtgctaatgtaattattcccaaacatatggtaagatggcagtgtcaacattttgaaaagtgacttggcaatatgtccaaaaaaaaaaaaaaamcccactgaattagtttatatcattgacccagtaaactcacttatgagagcatagcctaaggaaacaatcagagctgaaaaaaaaattgtgtatatggtaagaaaaaaaattgaacaataggagaatgattaataagtaatgacacattcacatatggaatattaacagccctttaaattcatttttcaaagaatagccttagcaaactgctagctaatctaaccactgaataaaatattgcagaattggaattgtaatactgtaagtaattcagcttaatcttcacatacgcgaggtggttcattaacaacaagagcccctaagtctagggttctagaagagttgagtgactagttagtgagaacaagatggtcatctccagtatagcggatactctccatccctcgctaacttcacttctatataaaattaagaatctgaataatattattgcaacctggtagaggacttccacagccacatgtggtaagactagagtgtcatctccagatctgtcacctttgctgccatgctgtctcaagccactaaaagtttctttgatactcctccagccagcttgtgatcagatgtgctctaataaagaataatcactttttaaaaatactggtatatttcagctcatcttgataggaaccaaaaacccttttatctatgtgttatgaagtatgagcggagggaaagaaaaaaacaaatgttgtgtgtttaaagtcagagaatgttcttcaattctgtatttttaacaggccaatctaagaaaatgactatgaacagtcaataaataatttttttaagtttggctctctgggaaaaattattccaagttttcacctcaggctatgtatataaattttttaaataaatgaatacccacttcattttgaaaaatagccaagatgtaattagatgccacctctgagttttccttattctccaagcaaataaacatgtattttggttgtttggctgtatccatagttggtgggcagtcatacacagaagacgtgctcacagtgttccgcataacagctcattctccccaacaaagacctcactctcagggcacccttggtatcaccatgtgcattcgcatgtgcttctgttgtggcgccctgttttgatgactgctcacatataagcgagatgaccaggcaggtgtgtgtgtaatctaactccttggactagaacaaaacgaactggcttttgaggactgtaatccatgcgagatgacagcccaaggaaaatgacagaagtggagtgccaagatgtagcgataatgtgcaagagacaagcgacagtccagagggtgtatctgtgggtctcaccccccacacaggctgctttatcctcctgcttctcctgccacaactaggagagacatgtggggcaggaaccttacctgaacctaccagtattgttaaaaaactaaatgtttcggctgggcgtggtggctcacgcctgtaatcccagcactttgggaggccgaggccggcggatcacgaggtcaggagatcgagaccatcctggctaacaaggtgaaacccgtctctactaaaaatacaaaaaattagccgggcttggtggcgggcgcctatagtcccagctactcaggaggctgaggcaggagaatggtgtgaacccgggaggcggagcttgcagtgagccaagattgcgccactgcactccagcctgggcaacagagtgagacttcgtctcaaaaaaaataataataaaaaataaaaaataaataaaactaaaagtcgttttcaaggatctgggtattaattcaaagtacccaaatcagagagcggccaaaagctacaagcccatgacctataggatgggtagaggtggaagctatccctggggcatcggcattcagttggcaggaagagaaaggccacgggagtggttgtgcagttcagaatggggctgggggtggcagttgcctcttgagaaggtcagagaagactgcgagtcagatcccctaaatagtaacacatcccctaagttctagggacactcagagcaggacaagcacgtacccttagcttttcacctcaaataaactcaagagaacagagatatcccagagtagacgcaagaggtcaaatccagggcaagcatgagaattaagggtacgaaggctcaggcctgtaatcccagctactcggaaggctgaggtgagagggttagagccccggaattcgagaccagcctgggcaacataacaagaccccatctcttaataaaaagagagagagaattgaacatgtccgtcggtgctaaaggaaggaggccatgcaaggcagagaggactcctttggaactgtcctgtccataagctcagaactgtgtgcagctctctttaagtctagaaccagtgccaaaacagccagcctggccaagggcagatgaggtgactggtggaaatggcagcttccagaaggcaggttgcaaccatgactagagtgagtctgcctttaacatgcagcaatgaaaattcctctcctaagatttcccatagatcactctattgcttgaaggtcatagactcttaggaggaaatggaaatttacaaaaactgaaaagttgatttattaaggaaaaaattacagtaacaagtgcatttctgttctgctaatatttgatttagacatgtgatatttctgcaaattatactctgcatgtatacttaagtaaaacagtgtaattatcattaaaatgagactaatactgaaatttaattttctaaatcaattttccctggcaatgagttttaaatctatcttctttcttctgaatgcaaaaaagcggggatgttaggtgattcattatccaaaaaaagtgcatttctgacaaaccaaaacacttaatgacattattaccacaactgcaacgtaaataaatatcttaccttctggctactgaatacagcaataacctttacaagctaatatttaccacgcacaacccacaaaatagccacaaaccttattatgctagtacccacattgatatgctgctgataatttgtgattataaatgtttatgtcacttttgtaattaaggggttaggatgaggttagtagagagtgtttatatttttccaaaggagcaaaaattcacagatccattagaggccaaataaatgtatgcctctctgaaatatttgtatgctgataagctcatgggaagtttgctctttaaaaaaatattctgaaggaatttaagcagagcaatcatagtctgttgaatgcaatacattcatcataattttcattcactggctggccaccttgcattgcaatatcttaagtgagacaccccttaagactagtcagccctctggctttagattatcctggtgaagaaacaatgtcaagaagctaacactaaagcagattagattttcagaaattctgaaaattcaatgcatttkgatttttagatctccatgatacactaacatgcatatttatgattttacatcaatgctaccataccatacattccaggattcttttttttttttttttttttttttttttgagatggagtcttgctctggtacccagatgggagtgcagtggcacaatctcaggtcactgcaacctctgccccccaggttcaagtgatccttctgcctcagcctccctagtagctgggattacaggcrtgtgccaccatgcccggctaaattttgtatttttagtagagatggagtttcaccatgttggccagactggtctcgaactcctggcctcaagtaatacacccgcctcggcctcccaaagtgctggaattacaggtgtgagccaccgcacacagcccattccaggattattatttaatgtagtgttttgttttctttttctcttttttttctgtttgctcccctctgttccttttctcaacccacattactcacccccaaccaagggaactagtattatagaaaatgtartttttcatattttttgcagatgtgcatacatgtaggtgtatatatataacagagattttcatcattgttttatataaataggatcataatatgatcataatataaacacttaagcaacttgcttttctcaatacctttgcaggaatccctgcatatcaactagtatagctgtaatttattcttttcaatggctgcataatcctctatttgtgaatcacaataattacataaccttttccctattgttagatattctctttgtttccattttttgctaccatgaaaaatgttgcagtaaatatcattgaaaatgtacttgtgtactggaattttaatattatgggacaaatccccagtgatgaagttactgagttacaagatgtttttggttttaatagattggtttcctaaaaggctctagaaattaacatttccttyaacaatttgggagcatacacttgtcctgacatcctgtccatcagtgatatccttctttttttttttttttttttagatggagtcttgctgtgtcacccaggctggagtgcattgacgtgatctcagctcactgcaagctcttcctcccgggttcacaccattctcctgcctcagcctcctgagtagctgagactacaggcrcctgccaccacacccggctaattttttgtatttttagtagagatggtgtttcaccgtgttagccaggatggtctcgatctcctgacctcgtgatctgcccacctcggcctcccaaagtgctgggattacaggtgtgagccactgcgcccagccaatattcttctttttaatctttgctaatgtgtagcaaagtaaatggcatcttgttttaatttatattcccttatctgctagtaaattcaggtgccttcccatgcttatttgctttttggatttgtgcatcttgaattttctactggaatcttgctcacttttcattggtctatatttttggtagtcatttgttagcactctttgcatattaaaaatatgaaccctttatttatatctgtgttgtaaatatagccttccaagtctatcatgtgtcttttgactttgttgccaaataaaggtttttgcctatatttaataggcaaatatgtcttatcttttttatgacttctgaatcttgataaaaatattcacacccctagattgttcatgaattatcccagattttcttccaagagctttattacttattttatttacatttatctttaaagcatgagaaatttatttttatatgtgatgacaatagtgatccagttcacagaagtayatgaatatctactattcacttagcactacatctctaagctgaaatgaaatcacagtctttgcatctccaaacactaccacatgtagatcaccaatgaaatgacacaaagacatcaaaacctaagtcatgatccccaccatctagagacttcgagttccactatttaaaaaaaaaaattcacagtgaaaaatagtaagcggcaagaatatgggattaggttctatgttagttttccagggctgccataacaaagtaccatagactgagtgatttaaacagcagaaacttactttctcacagttctggaggctagaagttcaagatcaaggtgtcagcaaggttgttttcctctgaggcctttttccttgcctttagatggtcatcttctcatggtcttctatttgtgtgtgtstgtcttttttttattattattatactctaaattttagggtacatgtgcacaacgtgcaggtttgttacatatatatacatgtgccatgttggtgtgctgcacccattaacttgtcatttaacattaggtatatctcctaatgctatccctcccccctccccccaccccacaacaggcaccgatgtgtgatgttccccttcctgtgtccatgtgttctcattgttcaattcccacctgtgagtgagaacatgcagtgtttggttttttgtccttgcaatagttcactgagaatgatggtttccaccttcatccatgtccctacaaaggatatgaactcatcattttttgtgkctgcatagtattccatggtgtatatgtgccacattttcttagtccagtctatcattgttggacatttgggttggttccaagtctttgctattgtgaatagtgccacaataaacatatgtgtgcatgtgtctttatagcagcatgatttataatcctttgagtatatacccagtaatgggatggctgggtcaaatggtatttctagttctagatccctgaggattcgccacactgacttccacaatggttgaactagtttacagtcccaccaacagtgtaaaagtgttcctatttctccacatcctctccagcacctgttgtttcctgactttttaatgatcgccattctaactggcgtgaggtggtatctcattgtggttttgatttgcatttctctgatggccagtgatgatgagcattttttcatgtgttttttggctgcataaatgtcttcttttgagaagtgtctgttcatatccttcgcccactttttgatggggttgtttgtttttttcttgtaaatttgtttgagttcactgtagattctagatattagccctttgtcagatgagtagattgcaaaaattttctcccattctgtaggttgcctattcactctgatggtagtttctttggctgtgcagaagctctttagtttaattagatcccatttgtcaattttggcttttgttgccattgcttttggtgttttagtcatgaattccttgcccatgtaaggaatggtattgcctaggttttcttctagggtttttatggttttaggtctaacatttaaatctctaatccatcttgaattaattttagtataaggtgtaatgaagggatccagtttcagctttctacatatggctagccagttttcccagcaccatttattaaatagggaatcmtttcccccatttcttgtttttgtcaggtttgtcaaagatcagatagttgtagataagtggcattatttctgagggctctgttctgttccattggtctatatctctgttttggtatcagtaccatgctgttttggttactgcagccttgtagtatagtttgaagccaggtagcatgatgcctccagctttgttcttttggcttaggattgacttggcaatgtgggctcttttttggttccatatgaactttaaagttgttttttccaattctgtgaagaaagtcattggtagcttgatggggatggcattgaatctataaacaaaccactgctcaatgaaataaaagaggatacaaacaaatggaagaacatttcatgctcatgggtaggaagaatcaatattgtgaaaatggccatactgcccaaggtaatttatggattcaatgtgtgtgtctgtcttaatctgctcttttaaggacagcagtcacattagattaggacccactttaatgacatcattttagcttaattacctcgctaaagaccctatctccaaatacagtcacattctgagctactggaggttaagatttcaacatgtgaattttgaggtgacacaattcagcctgtaacaggtttaaaatggcttgtgcaactagcaagtaccatttatgctcaatgaaagagagatcactggggagtcagtgaaagcttcatgaaagagataggattgaaggtggacattgaacaagcttaagatttcagtgaggctatgaaaagcttttctatgagaaggtgagaaaaagcaaagttacacctataaacatcgtctmtcagggcttcagtgagataactggactgacaagaggagaaagtccatttggggggaaatgggagataaaactgaaattgctaagattgtaaataacctggagtcagaagtttaacttgatgaagaaagaaaaaagaggcatcatcataaatttttgaaacttgaaatttcacaattaaagtggtatttaagaaaggaaaatctgggccaggtgtggtggctcacgcctgtaatcccagcactttgggaggctgaggcgagatcacctgaggtcaagagttcgagaccaggctggctaacatgctgaaaccccatctctactaaaaatataaaaattatctgggcgcagtggcaagcacctgtaatcccagctccttgggagaatgaggcaggagaatagcttgaaccagggaggcagaggttgcagtgagccaaaattgcaccattgcactccagcctgggagacagagcaagactccatctcaaaaaataaaaataaaaataaaaggaaaaagaaaggaaaatctggttttcatttgtgagataaagcatagaaaccatattaagactctaccacagttattaaatgagtcgtttcatccagagtgattgcaatggcaaatgagactaggtggtggatgaatattagatatttcaaaggatgtgtcaaaacaatggacagaagttaatgattgcttgtctgtaggaaatgaagaagaggcacacggcaaaggtgttatcattgttttcaacctgggaagcagaaataatgctgccattgaggttgtagtgtacagaatgttagatggagaagaatgatgactgcgggttcatttgagtctgagagagaagtattcagtaaggagtaagaaattagggcaggagctcctatgggatgggagggtcaaacctgaggtgtgcattaggaacaccagaaattgccaggacctgaggagaggatgattcaatccaggaggcaaggggaagatcacttagtcatcttaagcacttactatgtgtcaagtatttctataagtactgggaatacaaagaaaaataagataagtcatctaccttcagaaactttatcytgagtcatgaagacaaggggtgtttaataatgyttaatgatgaagggtcagagacaacagggacagataaaggacctttggatttgttggtgaaatgcacccttcaccttctatttgacattaattttaatgtcaaaaactgcaattccctttgcaccaacctaatagaaagcattttcaatagacaaatcagattgaatgggggaatatttgatgaaaaaatgaacacaagatcaataatgcctttattcccagaacctttttttgtttttcactctcttggcaattattcagcttcttggccatcttcattttaattaatttgtattatgatagtaatgttctgatattttaattcagattttaaataatattgaagccaagttaaaatttagtcacataccacattcatgtttctaaaaatattaagaatatctaataacttataccatatttttatgtttcttgccattcagattcaaatgagtaatataaatggatatgwcaaatgcattttgaaatgataaaagtttgcaagagccaatagaagctatttaataatcagcactgggagagaggataatgagaaggaaaaaaataaaagamcactatttatgatggtggcaagaattcaggccttaccatctttcctcgtgcctgtgacagtctaagatggatccagaaatggctcagatatttggactccctccacctcctccatctattccttgaaaaagggagagagggaatgggagatgaacctccagggatgggttggacagtgctttcacttttgtttattactaatctgtactaacatggtctcattgacaaagatctctttttgttttattcaaaaaagacagtaatgtatgatagttgaggtttctctgaggagcattgttccatgcactacacctctgtgaagtactcccaattagctgatctcctttgtcacccagacatttcccataccttttggaatgaatgagctggataatgtcagaatatgaatacttctgtgatcagtgtctttacttagtgggctggtcagggaactagaaggttagacgtctatgagtctttcaccctcggttgaagctgatttacacttgccagtcacagttgtttacatataataaatataaatattcatttatttgattagtctagtttgggacagctctgtttctctgtgtatttcaacatctggggattaggaatcatcactccccctttactgtatgcaagaatgagctattactgcttttaaagtcctacctagaaatatgtgctcaggtgtattgaatgaagctttccaataagtaccatacccaactcacacttgtatcctgatctatctgtcgagcagacattcttgcgcaaacagagtcggtggatggggtggtcaagaatcatgaaaaaartagaaatatgtaatgaggtctattagctctgtaaatacaaagccacttgtaatgaacatgaacatccaagtgtacagatcaccagaggctctgacggtgttgctcccggtttgagatcttggctatattaacagaaagagtaggaaaagacaaaaaaatttattctctcttggtcactcttttaatgtcatatctaaaacagctgttggtttgagrttctaaattttggagaaagaatagattaggcttttgagaaagagtcaactctgcaaatgagctgtctcttcatttggggccataacatatgaggcagtacttaaaaatgaagatcgtgcagtgcttggatagacgggtcactgcgtgaggctggtacaagggggagggaagggacagaagaggttctgtgagcataacattcctttttaagttttttttctggcagctttgacccctgaccttatccatcctctgaactgctctattcaattccacgtgaccaaactatgcattctttctcgttctttccttcctccctccctccctcccttcctttctttcctttttttttttttcttgagacagagttttgttcttgtcacccaggctggaatgcaatggcacggtctcgactcattgcaacctctgcctcccaggttcaagcaattctcctgcctcagcctcccaagtagctgggattacgggtgcccaccaccacgcctgactaatttttttgtatttttagtagagacagggtttcatcagttggccaggctggtctcgaactcctgacctcaagtgatctgcctgcctcagcctcccaaagtgctgggataacaggcgtgaaccactgcacccggctgcattggttttctttttcttcctcttgttttcttccccttagctctcaaagtcctagaccaccagacaactagaggaaagcacatggtgaggagtaggataagggttggttatgcagcaaacgtatttcctttttctccagccttagcctcagtcatatgtgtataatttcttatttatcccaaaaggaaaacatcacttgataatagtatttgtaattaaatacttgtttatgatcacctttcttataggtgtctgtaaaggagaggagccaaaaatattgagacccccaagacgaccccggaaacccaaaacattaaataaccctgaagactccacatactattatctacttcatgtaagtggctcactcttactatcagatgggagccatcacatctactaatggccagtgtgaaaactgtggctagattagttcaggcacaaaggaaggcctggcaggacagagatgcgcttggtctcctcttcactgccctcccctggctggggatctgggcactttgatctcctccagcccttcttcctcacattcaagcctctcccatggtagtacctaccatgtcctccttgcagctttctctgctggtccattaatatgagctgatatgaaaatatcaactcagaaagagaaacccatcatagcaggagctctccagagaggggccctggtgtaaatgggtgggttatggtgaaactagaagaaaaggaaagaagaggggaaacagacgtttattaagcatcttttaaattccaggcctagaataaggcttgttcacatccactgtgatagctaatcctggaaatatccctgaatgtattatccatatctctcagatcaggattctgagacacagataagcatgccttagctgccaggccattcattttattgaggtcttctgacccctcagctcctgctcactaacagcatgaggactcattggcgttgcccctgatcgcctggccttcttctcatgttcctgttctctataaatgccactgtcatccacatggtctcataaaccaagaacctgggagtcattctggtttttgtcctctctctcatacctgtgatccatcagtggctctaactgtggcttctacctgcaaaagctcactccaactcatttcccccctctaayctcacagcaattaccatatttcagactattaatcatttcccactgtggaatatttcaggtcccacgtaactgcctaatcgcatcctctccagcctgcacctgaaaatgtctctaaaccatacctttgagcatgctccycccttaattgttcttttaatggctcagcaactccttcaggatgaagtcctgattccttccaaggccttcttcgtgggacccgtgactgcttttcagcctcttttcttgccctcttcttgtcctcgagccatagtgaactgcttgaaactctgctggtgagctgcattccctcatgctcccgaggcctttgcaccctctggctggtccctccatttgcaatatttattcagtcttccactccccactgccacagtgacacagcagcactcccctatgccctggagaacccagaggatgtgttgaaacccagagaatcagttrgaaataagtttcccacctygcaggcagaaaatgaagctcacacttgacctccaagttagccagtcttctctagttcattcccttctgtctagtgatttcttttcagtttccaaagagggttgtctgtggaaacccattctcctcccctctcatttcctttagacaatcccattagctactacaacctcagtgactgctgatttctgaatcttgatcgctggcttagatctctctgtagctccagactcaaatatcaaactacctcatgtttgttttacatattctacatagatacacatgggcatccatgtatacatgtatagagatatatacacacacatacacatccatacatgggcgcacacactcacagctttgttgagatataaatcgcatgccatacaattaacccaccttaatatacgttaaatggtttttagtacaataatcacaatcaattttacaacattttcatcaccttaaaaagaaactcattagaagtcattacccactccccaccccctgccccaagctctaggcgatcaccaatctagttttctgtttctgtagatttgcctattctggacatttcctataaatagaatcacacaatatatggtcttttgtgaatagtcaactaattttacaaaccagtaatctgactattaccttgacttctccctcgttctcatcttccatattcaaaaatctaaatccaaatatctcttgagtttctgtttctctccatgctctgtgctaataccctcttccaggccagcatgtcttgtcagtagttctgagtcactcctcttactggtcccttggtcttgtttttccccttccaattaacgtattttccacactgtagcctgagttgtatttctaaaattaatatccaattatactatcctcccattgatggaacttttctgttacgtctcactgtcctaagatatgaaggcctgtcaaaatctgggcctgctcacctttccagcctctgtgcttgatattcattcattcacccctccaaactctccactccagcccttccttcccagtaacctgcattctcctcttcaaattgtccacgaacatttgtccttggacatgcccttttctcagcctaaaacacacatcctcttccccttcttgtctttcatgatcaaaacaccctcagcctagatgtctttttcttcaggaaaccttcttgtcactcccaaatcccaagagagctcttcctatatcctcccgaagaagcccatacttcccttttatgacactttatcatgctaaagagggattggtgtggcttccacgaggtcaaggagtttgcctattgcattcaacctgacacatagcaggcatgcaataaatatgtgttgtacaaatgagagcaatgaaataaaagaatgaaaaacaaataggagtaaattgagaaaaatctaaaattccagatacctgcgtttgacagtcactttatataggaagctgaataagaaatgaaattgatttttttctatgctctcaaataatttaaaaagcagcaaatactctgacatttgtttatgcaattaaatagaacagcagaaacaagattagaaattaccaaacattccctattaaccctgagtttaagtagtcaatgatactcaatgctctttattaagtgcaactgaaatgacaagtgattgtgatggcttcaacagcagatactattcccagtatgagaaattgtaaaagacctgaactgaagtgaaatgttattactaacaaccagtgagaagtgtggagcaaattctgagcctcataaatgagttccatccccaagaagcttactttgtcattgcactattatttttaagtgactatatttccatacatcctaagtcattagggaataggatcctttttaataactctgagtttgaaatctatgacttcaatgaaaaataacacagaaaaggagtatattattacaagtgaagatataccacgtgttcatatttatctggcccttcccaggatttgaggcattacacatagtgaaaagtgtggctgtaatgaggccccagtccctttaaccaccaaacactttctgtaattttaaatggttttcatgaaagtctttctaaaatatattatactgcatattttaaaccctttcttgatgacccagggtcacttaagtgaatgaattttttttaactttttttaatgttttatttttcatttttatggatacatactagttgtacatgtttatggaatacatgtgatatttcgatacaagcatacaatgtgtaatgatcaaatcaggataactggagcatccatcgtctcaagcatttatttctttgttaggaacatctcaattccactgttttagttattttgaaatatacaatagagtactgtgaacttttattgtagcactattcaaaatgtttgttyttgattcttgttactgaaacaccaggggtttggttgaggtcccgctgcgcaccacacagaaagccaatcactgaaccgagtattaccaaggaagaaggccttaatcaggtgccgtagcccaggagacacgagctcagtctcaaatccatctcccttacagattcaggccagggatttatatagcagggaggaaatgtaacaatgtttaagaaaacaagaactagggaggggcaaggaagyagtcatggtgaatgagtgcagtgttgtggtgagtttcagtcctttttttgaggggcctgaaggttatttcctgaggaaggaactcagataaaacaaaagtttcaaactttaagaccagaagggttagtttctatgtttatcaaaaagaacagtctatgggactattgggttggtttcatttgtatctatacttaccagaagatccctgactgccatggctaaggcagcacccaatctctcttgtatgtccctggcctgcttcatttttctccgctgcattttgcgttttttgttgttgttggtggtggtggttttgagacagagtctcactttgttgcccaggctggaatgcagtggcccaatctcagctcactgcaacctccgcctcccgggttcaaccgattctcctgccttagcctcccaagtagctaggattacaggcacctgctgccatgcccagataaattttttgtatttttagtaaagccgggatttcaccatgttggctaggctggtctcaaactcctgacctcaggtgatctgcccgtcttggcctcccaaagtgctggaattacaggcgtgagccaccacacccagccttcttcagtgcatttataaatatttatttgtctacttgtctcctgtgtgacttccccctctaaactagaagctctatggaggcgaggcctatgctcgctgttacagccatactcctcagaacactgtgctgcttacatcgtaactagaagactgttaaataatagaccactgtagtacagtactctcaggggctgttgagttgtagaaaattatttcctttacatttgcccaacacaaacatctctgctttcagttgttttgctatttttatagtttttgttttgtttttttttctccttggatgtcacttcttacaatggcgattctagcggccttaaaatcagtattgcctctttcctatgacttgatgctctttatctcttacgtccaggaaatgctgctgctgtgtccaaaataagagtgagccaagccgcagaagcgtgcctgtggaggagagcattagcggagtgcgcatggcctgttgtactgcctgggctaatgctcaaagctgtgcagcatcagcaaaaatgactcagggccaagtttcctcaaaaaaacgagtaatcgaacacaatcttatcagagatcccttccaattttattattctttccagtactttccctgaactacagcagtagctagtttggccactccaaagtctttttcttcctaacttcaacgtttagctccttcatccgtctaaataaagaaattggtagtgtattaccaaaaggaaagtaagattgtgctcaccatgatgtaatggatatgaattttaacgttttgtcataaaacatatttctttatgtcgggtggggctggagggggagtgcaatgtgcctgattaaggaacaggttcttcaaagtcttcagagctaagacactattctttaaaggcctcctcaagaaacacccaagccagaaaatctacgtgagtcatgtttgtctcctctttctttcttttctctactctggttctacaggaaattgccatgggacatttgcttctttatttgcatttcaaatttcaagkttttaatttgtaatttcaaaactataattgaaaacattgtacatcttcgcaaaaaagtccccactataaagtccgtgtaataaatttcttataaaatcctcacctttgaggagtgatatgcttcccttttcatgacaaagggtagaggttaatgcatcgtgctccccttttagccccagctgttaggaaactaagagacaaatgtaagcctccatcttaatgcacctacttcctttgcctcctttgtttctcatttacaatttttactttattattttgattgtataacgacttatattatgagccatcttaaataatttttggaaaaatatattactgaattacatttcatgagaatattctaacacaaggccacgcgcagcggctcacacctgtaatcccagcacttggagaggccgaggtgggtggattgcttgagcttaagagttcgagaccagcctggggaacatagcgaaaccttgtctccacaaaaactacaaaaattacctgggcacgatgggtcatgactatagtcccagctacaaggatggctaaggtgggaggatcactaaggtgggaggatcacttgagctcaggaggcagaagttgcagtgagccgagattgcactgctgcactccagcctgagtcacagagcgagacactgtctcaaaaaaaaagaaaagaaaaaagaatattctaacacaggcaagagtgaaagatgtctggacaatacatcctcttctaggaattcgtgtaactgagaaccaacttatatacaccatgtcccagaaggaagtgctgatctagtataaataggatcttcaccagcctgagaattcaagggcagaacattatttgattcttggttatataaagggcatctctgtcactcaacatagtgccatcacttaagcctaactttgaactataggcaattgttacccagaacaaaagggactttttttcaggtaatggatgagggaggcaggacctctgtaggaaactactactgaagtcatgttaaaacagaaacaaccaccacaacaaacagcaccccagtcccggagatcattaactgaactgctagtggccactgttcctatgcaggcaatgtaattatttgtaagcgcctcttagcctagggcattggatcaagaatgtgaagtgacaggaaacgggagaacaggaatgtaattgatatcctgcccttacattatttcctgaatggtctcctcccagacttgatgcaaggaagcactcacttccacctcatccacccgttaaaatgccaaccaataagaataaaagaaaccatgaactgtttcactcatctactattttagagcacaacaaatgataaatcctgaaaaaaacgtgacttactgtgtctctaagaatactggggaaaaccctcagtatttataaaccattattaactgccatttttgttatacaacacttttatggtaccagccaacttgatacctgctatagggtttccacagttataatatcttcagtttgttcaaggtgagtatggtgtctgttttctcagcctaaaagacaaatacgctgtggcaacatgtaaatagatgagctcaaatgtattgaagtagcacacacacaaaaacacattactaatgctacagtgcaaaagataatactggtttgtatataaggtgaaacttacatacaaaggaccattttgttagtgttcgaattgaagtatcagttaaaatatatctaatgatttccatatttgcgtatcttaatttgttctgaccttgatacataaagttctcaactatgaaaacattgtgcaaatgaaaacatatatcatctgtgctgctacatttatgtcataaatgggctcctataggtttatgaagtcacaattccattctttttgcggactgtttcacctgccgtccatattcacccatctgttttacctgcagacaaagaagcaagacattcaaagcagcttaattaacctgcttccatcacaactgcatttgtatagagaaatgggcttcccagaaattttagtttgctcccgtttgtagtaaatagatcttatgtatagccttgtttatattggtcactgtgtgggaaatacatttttcatgtggaatgcaaagattcgtttcagtttaggtgtggcaaaaataaccagaaatttataattaataaaacttgagtaaattatatttctttaaatttttaaaatattgtatccacttgcttatttctaacttagtcttttaagagtaaatgtatttacatattaagattatagttatatatccattatattaagatcataatattatatagatcttttgaattcttctttcctttagaagtcaatccaagaagaaaaacgaagaccaaggaaagacaggtaattattacttctggatttcaatcagtcatcttattcaaacaaaaataaaaatccatgtgttcaaattatgatttaaaatcacctattttaggccaggcgcggtggctcacgcctgtaatcccagaactttgggaggccgaggcgggtggatcacgaggtcaggagatcgagaccatcctggctaacacggtgaaaccccgtctctactaaaaatacaaaaaaaaaaaattagccgggcgtagtggcaggcgcctgtagtcccagctactcaggaggctgaggcaggagaatggcgtgaacccgggagacggagcttgccgtgagccgagattgcgccactgcactccagcctgagcagtcgactgggcgagactccgtctcaaaaaaaaaaaaaaaaatcacctattttatatgcatagatttggaaagtaatgtgcacccaatacatttacgttacgaatatgtgatttatatataatttataagatcctgcctactggaaatctattgagccagcatagcactaagaacttaaatatgttttaaatgaatcgtaccctcccagtaggtaatttgcttttcttgttccatggaatggttttgcttgggcaatttgaacatacctgtattcatgaatttcctttccccaaactcctttttgctttttctccttctacacatgctaaatcttgctgcttgtaatttttatagatttgttaagaagataaggtttatgttacttgcaagtatagcacacttaaattcacattattctccttttcttatatttcccactgatattttactcttttaatattatatcactgttttaatcaatgttcatgtcaaccaatttccagacagtgagtgctaagaacaaacaagagcgtttctattaagcatgagtgaacacasttctttatttctgaatcagtgacatcctgaaagtcctttttagattagtatctgtaatttgaaaagtgtgttttcctggaagcattgtaacacctggagatttcccagacctacctgtttatctcttaggaagtcccagagcaccataggaacyagactgtgccctgagtagaaccaagaattaacatgggcaaggatgcacccttatgtgtatgtcatgtgtgggtgttaaaatctagcacagaaattaatccgctaaagaacagagtagagggaggacagaatgttattcatgaaggaggtaagttaagatcatatgtgtatcaatgtactgagggctgataaaatttgaaaatgctgagtattagtacacaaaggtgagcttttctgataatggcctaaaggtcagtagtgactgctgatctggactggccaaactgaaacactgcaatcactggctattctagtaaccactagtttggtgccaagttcagtgcaatagaaccaggaaaatgtgttcccacagctaatgttctgttcaaggtaagatatgaaggtttttcttttttacttatgggatacactgtttttcccacatttcaagamcttccatttctattgacatgtgtatgttactctaaattatagtaaatacttttaaagaaaaaaaagtatcctgtaagtttaagtgagtagaaaattagattgatgcaatggtgtgtttatgtgttcatttacagtcagggaaaattattagatttggaagatttctattataaggaatttttgcccagtcgttctggaccaaaggaacatagccctagtttaagagaacgaagaccacagcaagaactccagaatcaatgtattaaggctaatgaaaggtaaaaagctaaactttaaagtacatcatttgcagttttatactcacaatttcatttcttaagatatttcactttatatatagatgaatgacaaagcactcttactgaatattgcatctttggagtgatatggtgtttaaaagtaatgtcatgtacagtgttatggtaaagtaatcagatacctcagttttcctagcaaaaactgagtttttatctgttttcttggagtaattattaacaaaaactcctgttatttaataaaagtacttcagtttggatgataaattattatatggtcatctgattgtaagcaatatatcatatccaaaatctatattcaagctcaatcaaagtaattttaattactcattggtttcttaattatgcttgttaatttctcagaatcaatgatgtcagacccaaaaacatttgagagaaagattcatagaaaaatgcatattttggacttgaattctcaccttgccaccaactttctgacattaagtaaattattttgtagcttatttcatactttaggaattttttctcttttctcccaaaatatctgtggcattttgagatctgggtacataataaaacaaacatgacatatgaaaaatgggagtaatgatggaaaacaaaaagctgttcatccaaaattctaaacgaatatcctgtgaatctagggtcctcagaaccctcacccattttacagagtgacatggtggttaagaaaagaagttttagagtcacatggtcttaggtttggatcctgatcctgctgcttagttgttgagtgaccttgctcatgatagttgacctctttaagcttcatttccatatctgcaaaagaatttactaataactgcctcaccatgttgttgtagagactaaatgtagcaatagggtacttaggagaggcataggaaaggtgttctatcagtggtggctattatcatctttatttgctttttcagaatccatctaaactatgatatttgccctttgcctccaaaagaagatgtgctcttccatcttgggatccagcactgtaacatgttggagcttagagatgttctagtctaatctcagagctctgtacagaagaacaccaaatgccagaaagattaagtgatttgcccaagatcacacactgagttagtgaactaaaatcccagatgttcactccctgcccatttgcttttcactgacttacctgcttcccattttaaaagctcaccctgccccttctccaatgtatccttccccttccccccactggcagatacacatctgctatgaaagcgttctattcctgaaatactcctgatgtagattaagtgatgtctatgggtgttatttagtatccactgcaataaatgctagcagctagtattgttgactgcctacattgtgctaggcactatgccattgtctcatttaatcctcacagcaaccgcacgaggcagttactattattgccccattttatagatgaggaggctaaatctacaaagtttagtgactgcaaagagtcacctagatgataagttcatggagccagaatttctaagtttagagttgatggccttaaccattactcagtatttccatcctatgcaaaagatcatgctgggcatttgaagaaggggtggatagaatagtgcataagatgtgatccttacctccaagagcttgatgctgaaggaaaagtatacccatataacaaagctgaacaaggtaactcagataaggkttttttttctaaactaaggaaggttacagagacaaaacagccttgacagtatcctgaatttaaaatagaaaacaaaaaccaaacagcgaaatagtgctattgaaacaattggagaaatttgagactaagctacatgtcagaagatgttagtgcacaaagaatatctttttgtgtatatacacacaccaagtattggcattgcgcgagagggtgtaagtctgggagtaagagacaacagcgatggtgaactgagtgccttgtgatttttttaattgacaaaacgtgtataaacttgtggtatagaacatgatgttttaagatacatgtacattgtggaatggcttgatcatgctaattaacatatgaattacctcacttagctatcttttttatggtgaaagcacttaaaatctaccctcagcagttttcaagtacacaatacatttctattaactatagtcaccatgttgtacaataaatctcttgaatttattcctcctgcctaactgacattttgtatcctttgactgatctctctccccagtcccgtgaccagtgccctggtaactactattctactcactgctctgtgtgcttgtcttttttttttttttttgggggggggcttccatgtataagtgagatcatgctatatttgtctttctgcacctgacttctttcacttagcattctgtcctccaggttcactcgtgttgttaaaaatggcaggatttcttttcttttcttttttttttttttttttttttttttgagacagagtctggctctgtcgcccaggctggaatgcagtggcacgatctcggctcactgcaagctccgcctcctgggttmatgccattctcctgcctcagcctcccaagtagctgggactacaggcacccgccatcactcccggctaatatttttttgtatttttagtagagacagggtttcactgtgttagccaggatggtctcgatcttctgaccttgtgatttgccctcctcggcctcccaaaatgctgggattacaggcgtgagccaccgtgcccagccggatttctttcttttttaaggcagaagggtattccattgtgtacatataccacatgttcattatccattcatccattgatggactcttaagttgattccatatattggctcttgtgaataatgctgcaatgaacatctgagtgcagatttttttttttttttgagtgagtctcgctctgtcatctaagctggagttcagtggcatgatctcagctcactgcaacctctgcctcccaggttcaagcgagtctcctgcctcagcctccagagtaactgggattacaggtgcatgccactctgcccggctaatttttatatttttggtagagacggggtttcaccatgttggccaggctggtcttgaacttctggcctcaagtgatccatccgcctcggcctcccacagtgctaagattacaggcgtgagccacagcgcccagcccaggtatcttttttacatactgatttcattacctttggatatatgcccagaagtaggatcatatttattttattttattatattatttatttgtttatttatttttgagacatagtctcactctgtcacccaggctggagttcaatggcacgatcttagctcactgcaacctccacctcccaggttcaagtgattctcctgcctcagcctcccaaatacctgggattacaggtgcctgccaccatacccatctaatttttgtaattttagtagagatggggtttcaccatgttggccaggctggtctcaaactcctgacctcaggtgatctgcccacctcggcctcccaaagtgctgggattacaggcgtgagccaccgcgcccagcctgattttaattttttaaggaactgccatactgttttctgtaatggttgtactaattcacattcccaccaatgatgtgcaagagtttcccttttctccccacctttgcgaacatttgtaacctttcatgttttttatagtagccatcctaacaggtgtgagatctcattgtgtttgtaatttgcatttccccaatgattagtgatattgaacattttttcatatacgtgttgaccatttctcagtcttcttttgagaaatgtttatttgggtcttttgcccattgtttaattgggttattggagggttgttttctgtttgggttttttttttctaagttgtatcagtttccttatatattttggatattaaccacttactagatgcatagtttgcaaatattttctcccatttaaatgattgtttcttcattctgttgaatgcttcctctgctgtgcagaagctttttagtttgatgtaatcccatttgtctatttttttgcttttgttgccagtgcttttgagatcacaatcattgcccagaccaatgtcatggaggttttcccttataatttctttcttttcttttctctttttaggcagcatcacatgagctagcccctgtattttcttctagttttgcagtttcatgtctaatgtttaagtctctaatccatttggaattgatttttgtatgtgagattgctwtttgtaagtgagataacaatctaatttcattcttctgcatgtggacatgtggtttttgcagcaccacttattgaagagactgtcctttccccattgtgtgtttttggcatctttgttgaaaatcaaatgactgtaaatgttggatttatttctgggctctctattctgttggtctatgcatctgttcttatgccagtaccatgctgttttacttacaatagctttttaatatagtttgaaatcagatagtgtgatgtctccctgctttcttctttttgctcaagatagctttgactatttggggtcttctgtggttctatacaaattttaggatttttttcctatatttgtgaagatgycattggaattttgatagagattccattgaatctgtagattgctgtgggtagtatgagcattttaccaatattaattattctgatccatgaacacggaatatctttccatttatttgtgtcatctgcaattttgttcatcaatgctttatacttttcaatgtatagatcttttacctccttgattaaatttattcctaagtattttttgtagctactgtaagtgagattgttttcttgattttttttttgatagttcattgttctcatggactttaaatgaatgaaagctggtgacaggcaatcagtgattagagaatggcactagaggaaaagaggacaacaagaggctgacatctgcttgtctcctctgaagatgggacctagtggggtctctgttgggcrgtggtgagagatgtggggtgtttagggcataagcaggttttaattatggcaagatgatcaatggaggataaaaaggggaaaataagatggaacacaagtgcctcagttaagagacaggagaattgtgaaagaagcatcaacaaaaaaagaggcaaaaggatacaaggaggaaagcctaagatttgagccctatagacctgggtttgaatctgcactccacttcttactagccatggcaactaggatcagtctgttttctcatctgcaaattgaraataacaagaatctaaggctttgcagtgttgtccttagaattagaaataatgtttgtgatatacctggcagatagttgatatttaatattcttaaaacagaaataagctgaataggtatgaaaattcaagtcagtaactcagaagaggatgatctgctccttcaatacccatcatgatgctacttgaccttccccgtcaagtatccactgagctcaggatgccctgaaagaccttgccaaaggtttttttctttttcttttccttttaattccctattcagaacagaccagaatagaggcatattccatctgcaggctacgttctagacctctcctttcaccattattttcattcatttgcatatatgtccaatggccttgccctctctccttcaattatattcaactggcaaactccaatgctgagtaaaatcaaaacaatttaatcccacttaaaattatggccactccttaggcagscccttagttactttgcaatattacatttccctaaaaattccttatgccactttccctgtccactctttcaaacttcytcctctctcctcaaaccctccaaacttcctggctctcagctgacaaccttcttttataacagtagcagataacagacacatgctgaatatatcagtcgtcctaccacttacctatctacttccctcaggattctatggatgacctttccaccctcctagctaaagtgaaaccttccctttgtgcactaaatccaagtgctatcattgactcaaggacattgtcctgcaattgtcccctcactcttctgcaccttgaatgtttgttctctttacgaaatcatttctggcaattagtgaacatgatgcattcagatccatcttaaaaaacatccttgacccaatccccccctacaaccacccattttttctgctcttcagtatagtaaatgaataatacatgaaagagtaatgatactacctcctgcacattctttcttcctattctcttgagccgcttcaaggtcaggtttcctctcccagcacgacactgaaattgcctctgccaaggttaacagtgacctccgttttgccatgctctgtgatttaacacctatgttactcattttttctttaagtacttcattcactggccttcaggacagcacttctcttggtttgcctcttactttactggctgctctttctcattctccctgctgacttttctcatttcactgatctctcagtaatggagtgtcccagacctttgctttatcaacatgcactctcatgaccttaaatattgtctgagtacttaaaattcctggcctggcactgtgggtcatgcctgtaatcccagcactttggaaggctaaggcaggaggatcacttgagctcaggagttcaagaccagccggggtaacattagtgggatcctgtctttacaaaaacataaaaataaaaaaaggagccaggcgtagtggctcatgcctgtagtcccagctactcaggaagctgaggctggaggatcagttgagctttggaggttgaggctgcagtgaggctgttattgtaccactgcactttagcctgggtgacagagtgagaaagagcgaaaagagagagagaagggagggagggagggagggaaggaaggaaggaagaaaggaaggaaggaagggagggagggaaggaattgtctttgtacttaaaatttgtgaactgaaatatctagccttgccatgacttatatatttgatatcttcttgaatatctaataaatatctcaaacttagcataaccaaaactaaaatgtttatcccactgcaaaaattatgcttctctgcagccttccccatctcattaaatgacagttccatccttccagtttttaagccaaaagccttggcgacattcttggttcttctctttcacaccccacgtttaatccatcagtgagccaaccctttcagttctacttccaagtatgaccataatctggccagttctcacctcctcctccacaggcctagtgtaagccactatcggtcttgcttggattactacagaatctcttaacaggccttcctactttcatcctggcagacagatcctgttatgagtgattcctctgcacagaacccttcaatgtttctctcactgtgaggagaagtcaagtccttgacatggtctcaaattatctgaacactaaattatccgaacactctatcctcattcctccttctctcatctcttgctatttccccctctcgcttactcttttcaagccacagtggtctccttgctgttccttgaacacgatgtgtacactctagtcttgcagcctttacattgcttgatctatcatcctggaattactgcccttccccacgagatctgcatggctcactgtcttccttcaggtctctccttatatatcaccttgtcagagaggcctttccaaccaccctgtatcaaattgcctgtacacacatgmacacacacacacacacaccactctttccccattacccagctttacttttctgtgtagcctctcaccccctggtgttttcaagttgtctgtgggtctcctgcactagactataaactccatgacagcaaggacttctgctcacctgtcacctacactggtggctggtacttagcaggtgctcagtgaatgaatgaatgaatcaatggggagtgaatgaatctatgtagctgcatttttagggaataccccacttyccagacaagctgcagaatctgaaggtaaacattggcaggggttctcagcaatggattcagaaacttagcccagcagcctcattgaaaacattgaaacactgaaaaagccaacaaggcccatagctcttggtgtcactaacagagcagttggtcagattttgagtgagcattttttaaagaaacatctgagcagttttaaaatgcaaaatattgagtgtctatttgggcactttgagttttttgtttgaccaaagtgtgttaaaattaaggtattaaaataaatatttgtttattggttgtgaattattgcaatccaaactcacctttccaaactgcaccttctgaagctttagttagcacgtatctaaacaccattaccaggctccaccagcccctctgctcctcagcttagaggagtttttaaaacctgttgagaattatcgcagatacgtttggccattatccagtcgtttcgattgtgcctttcctaartgtccgcggttggcagaacgtgggaggaagaggacccgcctaactcggggtaggtggggacgcgctgctcactgkggtgaggttgacacttgggccctgggtttcacttgcaggtgctgggcggcggagagccccgagaaggaggaggagagagagccagcagccaacccctacgacttcaggaggctcctgcgcaaaacctcccagcgccggcgcctcgtccagcagtcstaaccgttcaacgaggcagtcaccgccgtcggaaggcgctggagcctgcggggcagcaggggccaagcaggcactctggggctggcaccagcaggcactgaagctgcggccctgatctccgcagaggctgcctgctgcgctcggccctcaagtgcccgggccggccttcgtgctccgaaacaagagacctgggagccctcgggaaacctcccccgacgctctctctcggaactcccgcaccctcctttctcaccagcccgccagttgtggcaaccctgtccttgttcccctaatctatcactttgttctttttttttgtgactcctgtggactccactgcgcctgggatctcgccaacccctctctcatttggggtgactgaattcacagatttttttttttattggaaacggcttttcttggccaacagaacacttgctagcggttgaatcttagagaaaaaagcccgggaggggtggggagaatttcgaagatgtatttcatctcaagcttgctctttctcttcctttggttattaaggtcactaaataaaggaagtgccttggaaaacccgtggtttgcgtgactgatccctcattttcccctctagggcttctgaggggcttctgctataaggctgtgctggtgacgggcccaaggaggggcgttgaggtgccttcatcagcgaactcccagcaccacccagccacttcagacaaacacaatctaagctaaaaccccttgccacacaaacgcagaggcctccaatgtctaaatccccaacacaccacacgtgctcgcctgcacgatgccttcccaatctgcgtgactgtctttggccccatctataaagatgctagtgcccccactgggtggaactgtcagatttcaggttctcccggtctgcagatttggggccatctttgctactccgactttgtgtgtatttaaaatgggggaggctagtgggtggacagaagtttgcattcctgggttgactgcaccttattctaaaacccggtttaagctgttttatgaaactgacattcccatctaagcaacctggagagggtgaggacaggtgatgaggtcgttgcatggaattggaagaagggttctgatcacgatggggctcaccccttgtgtgggtgcccttggctcctgcacccacaagccggagtcaaaagactctggggaaatattcgaggagtgagtgagggcatgtgcagagggctcagagcgtttgttgcgccgctggtccacagggcatagtaatctcgccaactcaaagagttggcaccaaaaggtccccagagccaactcgtgtaatctcttcattttacagatgcaatgtggccaagggaaaacctgcagctatggcatggcagagtccaagtgccctccaggccttctttttccctgggttagcggcacagtcttgctggggttgcgactgaaagtaaggagtaaccctcagctgtgcgaatgcactgaggagctgagtatggcccagtacccaggaaaccagcacagcaggtcaccagagagaggggcttgggaggggcaggggtgtctaaagcccaaagtggcctggcccccttccacctctagctgcctgtccacttgcctccagaaggcctgggtttgtggggagggcggagcaggggccaggggtaaggagcagtaagctaagctcagcttttctgcctggccacccttcaatctaggcgtccttcttgggtggcccctgaagacaagagccctggcactcagccccttctgttatttctgttggtgtagggagaatttatggagggaggcaacagactccctccctaaatttttcctgcaccaatgttttaagtgagaatagaaaagagaatggcaaaggcttggtgaatgcttggttgcaatatttttgtgttcttccgtggttgtttcctctttttctttccatcttcccttctttctctgtcctttgacatttaagcacgggaaggacacaggaaaatgtgtgccagacactcttctttgggtcagcctgagacccatatgttggtaaaccagacacctaaggaaactgtccctacaagtcggaggattgggtctctcgcccctcatctgaggaagggccttccaaagcggccgccttcccttcccattcactggctgcctcctttgtgaactaatgactgtaattattacctcccagagctcttttgttatctccaaccccaagccccggagagggggaatgggctctttagtgaaatgaaagtcattacaaagcaaattaccgtctagggagggacagccttcaggaaagacaaatcagatctccatctgcatctgaagtagggtgtgtttaaataaaaaatgtaaatatcaccattagatccaaagtactccagagctgtgggatttaatggagtttaaacggtagcacttgaagccattgctttaccaaaaagaaaaaaaaatcagttaaattcaggtgttttaatccgtttcttctttgggggttttgtgtgatttaaacgcttgcttttaagaacctttatgttttcaaccactcatccatagtagaaaagttctgcaaccctagactgctggcttgaaggaaaacctttgcaggatttgatatggatttcaacaaagaaccagcctctgcgaggctggagagagctgcggagctgccatgcctgaagtgcagatggctgaaccacaagtctttaggtttccggagttgttattgtggtgacctagagtgtcagagccaggagagcaagaaagaggagccaaactgagccctgagttttcgaccacccgggctcccacagcctggaacagacttcacctagcacgctcagtgccagccttcggcaggacgctatcaacgcccgactggtttcctgctctcatcctggcgcctgggcccagttgccatagtgtggatcccatgactcctcagggaacccctggactcaggcacgcgagaagaagacagcgctttgtggagagaattgaccagggacagttatgctcgagcacacaggacttgggcctgtatgcgtccagcatgggccccaggatgtcccttctaagcgagggtcgaggggtgctcgcccagacgggatccccgggtctctgctttgttagcagctttggtggctggttcaggaggtcagagaaataaaacgacttgtgaacacaatggaaatgacaggcgctctggccaggcgcggggaaggcagccgcctcgggaagccgacctcagccctttcctctctctccctccctccgtctcccccagagccccggagctccgaggtgcacttgaagttcatctccactgccaggagaacgcagcgcaaactgtcaaagggctcccaatccttagggcgtcctccctgtctgcaatagctttttgtagaaaggaaatcatcagaacgattctgactttctcctcctttctttattagaaaaagagaaaccgcctcctaatacgcctcagagagaaccaatctcgcgcttccgggtcacccgctaccgcgaagattctctgggggcgagggggggcattggtttgaagccccttaaaacgagggccctgcaggcgatgccttctttcctactcggatttgtaaagccgagattgcttagttggaaaccctgttctcccctcccaggcgcacacagatcccccttacacgcaagcagcgggcgcttccacgcctccgcgggccaaggtcaccaaatgccctgattccatcccccacccgccatcaatcctgccgactctggccgctctgcctcattctcttccaagaagtttccattcgttttatttttttttccccagcccgaggtcctcagtagactccagcgtggattttaattgcctcaatcagcagtcattctccccagccgtcactcagagcctggacggtgggtcccgcgatctagcccttggctacgcaggaacggtgcgcccccgggtacggcgcggttcagcaggcaggcgtcaggttctaccaaggcgctgaaatgagcccatcagcgggtaggagcccttcccccgccgtcccctccccaggctcgtgaacggcgcctgatgcccgcccggggcgcgagctctcgaggtcgcagtgacctcagcacctgcttggaggaaaacggcgcgggaaccccgcttccttcccctcagctggagccagacctcaaacaaaaccccaatcgatgcacacagaaaactcctctgggccacgcttcccgcctcgccgaggtctccccagtctgcccctcgctgacgctggcgcgcagcggctgtggcagcacccgggacagcggccgcccgcacttcccgcctctggctcgcccgaggacgcgctggcacgcctcccaccccctcactctgactccagctggcgtgcatggtctgcctcgcatcctcacgactcagctccctccctctctcgtgtttttttcctccgccgccccctcattcatccccactgggctccctttccctcaaatgctctggggctctccgcgctttcctgagtccgggctccgaggacccttaggtagtcccggtctcttttaaagctccccggcttccaaagggttgccacgtccctaaaccctgtctccagctcgcatacacacacgcacagacacgcacgttttctgttcctgcgtgacacccgccctcgccgctcggccccgccggtccccgcgcggtgccctcctcccgccacacgggcacgcacgcgcgcgcagggccaagcccgaggcagctcgcccgcagctcgcactcgcaggcgacctgctccagtctccaaagccgatggcatctccgggctctggcttttggtctttcgggtcggaagatggctctggggattccgagaatcccggcacaggtaggaaggagaacgggggcctgcggcgggcgagttttgcggtggtctggggtttgcggaactacggagaagacgaaggaggtttttccacctgcaacaggaaacttcttcgggcgcttctccctgcttttgggctaagtccttgacggcccaagagctcaagacctctacagcctcttgtaccctgggaagacgcccaaatagtctcaggcccgttccacagaaggttggaagagccccccaaagaccgcggtgtctcggggacatggaattccgtggtcctggggcgctgctaagatccgggtgtctggaccctggggtgggacggagtgaccgtgaagatagaaaaaaaaaatgggaaaggtgagagatttctttatctagaaagacagtctgcgaaaaaatggatagcttcagtgtttaggaaaactcgtccaaggtaggcagggagaggaatttgcctgagccgattggcacctggaagggcagcggtgtgggcttctcctcgggaaacagataaaggaaatgagggctggcccgggccgccagcctcccgcttgccttctgcacctgccggcctcaccgagtcctgagcggcccccaggaggaaggcggcccctcctaggaccccggactgattgattttcacatagaacgaaatttcacacgtccgtctgttgttctctttctgcctcgctgtctgcctgcctattcttccttgcagcgcgagcctggtgccaagtggctcagaagttcacgggcggcatcggaaacaaactgtgcggtgagtgcccagggaccggggcggccaaggtcggcccgcggggtccaagcagtcttctcacctccgcatcccagtcagcggagtcggggtttcctggctgcgggtaggcgggagcgagggagccgggcccggcggaggattgacgaggcccgcgttcggtgtccttacccagccctgctctacggagacgccgagaagccggcggagagcggcgggagccaacccccgcgggccgccgcccggaaggccgcctgcgcctgcgaccagaagccctgcagctgctccaaagtggatgtcaacta

SEQ ID NO: 97805 - DNA, 18793 bp, Homo sapiens
ttctttttgagacagagtctctctatgttgcctaggctggtttccaactcttgggctcaagcaatccttccacctcaacctcccgagtagctcagactacaggtacacaccactgtacctggcttcttttaccaatctttttattgtgctacctttttcctccttattgtttgataagagttctttatacactctgggtataatacatatacaatattgaagataatagaaatatttcttgcctttcattctcttcattgtgtcttccaatgaacagaatgactacttttgttgcatttcttaatattttcctttatgattggtgttttttctatcttaagaaatctttgcttatcttaggaagccacttaatctcctacgttatcctctataaattttattgttttactgttcacacttaagagtttaaatctcctggacttgagcttttgtgtgtggtgtgaggtaacgatcaacagtcttttctttcagaaaaaggatcactgagggaaaaaaaaaaattttcttcccccataaggctactgagctgacttagcagtcctttcctcaccactctgtggtgctaccttgttataaatcaagtgtctatatcacatggcttgagaggaaaggaataaatacataaatataaatacacaaaattaagtatctctacatatgtgggtctgtttctggacatttaattctgttccatttgttcatccatgtcactactgtactgccttacttactgcagctttatgataaatcttgatatgtagtagtgtaactcttccaaatttattttccttatccaaaaataccttggttatttaaccctttgctttatttaattctcatgaaaagcctgtggtatgagatagttttgatttttatctccatttcacaggttggcaaactcagagaagtaatatgtccatggccacacagcaaccaagtgctagggagggattagaatccagatttgtctgcttctaggcctaagaactcaagtgctatatgtactacctccttaatcctaatgccaaatgaccccgtcagggtatttaatatgaatgcattacaattttaagaaattctcacgttctaaatcattcatttgcggtgaaaaaatcttgtttgggctgtgtgtggtggctcaggcctataatcctagcacttcgggaggttgagatgggaagatctcttgaggctaggagttccacaccagcctcaacatagtgagactccgtctctacaaaaaaatttaaaaacaggcaggcgtgttggtgtgcgcttgtattcccagctactttggaggctcaggcaggaggactgcttcagctcacgagttccaggtttcagtaagctatatgattgcactacagcactccagggtgggtaacagaatgagactatgtctctaaaaaaaataaaaaataaaaaaaaattgtttggcaattaccaaggccactttcctggtggaactcaggaaaacaatggaacaagagggaaaaacctctaggattccttcccatgtctacagaggatcagtcccgctcctcacctgggctccccgggcacggcccccctccacctctccagctttagcttctgctgccattcttcttccctttgactcttaggccacactcgactacttacattctcccactagtccaagtctttcacatagctgcacctttgcttacaacatcctctcccattcctggctatttcctcctttttctttaaaacctaggtatcacttctctagaaggccctccttgtcctctgtgtctcccatcctagcatgtcacactgtccaagagttcagctgtctaactagactgccagacactgggccagaataatcgctggattgtgcaacttgagtggaggctaacagagctataaagtcctgacagaaatcagagagactttttttttttttttactatattccataatttaaaactgactctggccaggtgtggtggctcatgcctgtaatcctagcactttgagaggctgaggctggaggatcacttgagcccaggagttcgagaccagccctggcaacacagtgagacccccatcactacaaaaaaaaaaaaagaaaagaaagaaagaaagaaagaaaaaaagatagttgggtgtggtggtgcatacctgcagtcctagctactcgggaggctgaggtggatggatcacttgagactgggaggttgaggctgcaatgagccatggttgccccattgcactctagcctgaacagagtgaaaccctgtcacaaaacaaaacagaacaaaacaaaacaggactctaagagaaggcctgagagaaaagacttctaataggttcaggacacattctttgatagaagtggcaaattagaaagctcagggaaaagatggaaatatcttctgtgatggacttggactttcagttgagacaggaatgggatggagtgctagaaaggcagatatgtggccgggcatgatgactcacacctgtaatcccagcactttgggaggccgaggcgggtggatcaacagatcaggagatcgagaccatcctggctaacatggtgaaaccctgcctgtactaaaaaatacaaaaaattagctgggcatggtggcaggtgcctgtagtcccagctacttgggaggctgaggcaggagaattggcgtgaacccgggaggcagagcttccagtgagccaagatcgtgccactgcactccagcctggacgacagagcaagactccgtctcaaaaaaaaaaaaaaaaaaaaaaaggcagatattcaacggctgtatagagtatggcaggctgtggttttttcaaagacttcagaagaagtgaaatattcctttgagatacacaattaaaactaacagcaaggcagcttcttctgagatgtattcattccacaagctgagagtgggcagcagtctctccaacggggcattttcaagcaaatgggatctgatgctcctctctggatagaaggagagaccacccctaggtgctcccctgccctgtgaccctcagactaccttggtgccagcccaaggcagtgcggcccaaacactgtgaagtcttttgagaacctccaggttgagtacaacctcactgacttttttcattaagaacaaaagcttaattttcataaacaccttttccaggagcaccaagctagccctctttcaacaccagcaaaatggagaaaaggaaaatctaaacagtatccaacctaggttttccagattttgtcagttaattcccatttttaaggtcactctgctcactgaaaggcagaagaaggatttaaaagcctctttcagagaaggcaataccattttagtcctccacatccttcatggttttctctactggcttagctgtgctcaaaacaaggacttctttttccttcatttagatattcagaatctaggacatcataaggttgtggatgttttagaaaatagataatcttctggcatgagaaatatccttaattagctatttttcctcaaaactggagggggggtgagtattgacatttgggtagcttatgcaattcaagagcttctgtcttctgtcttcaagtattgccttatgttagaaataagtttccagaaaataaatgtcaaagaccagacactcatgctaaaggctagatgcttccaatacaaacttacgaacctcctcctacctttcctaaaagggactgttacatggggtacaaatatgaatgattaatttattttctgcccacatataagaatcaattcataacactttcctgtttgggtgagctactgggaagaataaacaaaagctggctagaactccacaaagttccactgttcttttgtgctttctctgctgcactgttacatgagagttccaaggcagcagggtcacgtgggatgctatacatcagtggtccccaatctttttggcactagggactggtttcgtggaagacaatttttctatggaccagggtgggggtggggagatgggggatggttttgaggtaaaactgttccacctcagatcttcaggcagtacttagattctcacaaggagcacgcaacctagatccctcacatgtgcagttcacaacagggttcacactcctgtgaggatctaatgctgccaccgatctgacaggaggcagagctcaggcggtaatgctcactcacctgccactcacctcctgctgtatggccctattcctaacaggccatggacaagtacaggtctgcagcctggggattagggacccctgctatacatgactgtatggtacatagcacttctgtggcatgtggtttaagctcagtgtcatttgatggccaggagatccacttgaaaatccctatttttagcagaccttgtaggatgccaatatttggggccagagtctcgttactaaaatgaatgctatggagctaaggctgtggtgcccagctgggctagacatttgcaaaaagagagcagactggcagacagtgccaattctcaacagaatcttttgattagaatgccaagttgctataagggtatcagtaacatcctcaccctttagcaggcaaaggaggctgggtatgtgagaaaacaaactctgatccacctgatcctccactgctttttgattctgagaaaaaaaaaaattgttcagtaactccagctgcctgaacagaaattactttctgaggagctagaagccctgactggaaaagagctctgggggattatggcatgggaggagagctgtcaggcatcaggcttatgtgggaaggacccacgctgactacaacagtacaagtaactgcctgagtggctccataacatggaaacagcaatcgtatgttccaaagacagagttactgttttaaggacagaggaacctttgtatagattcttagtgaaaagcttattttaaggatgtttgctgaaactccatgtttttcacatttcttttcaaaagagcattgtccttcatatatagtacatgaaaaattacaatattcatgttttttagatacaaagtcatatacaaatagaggaggaataatttcaaattgcaaaccataccagcaaagaaagagggaaatgagactctagatatggatttattaggtgacagggattcttttctctatattttaatatattttccaagttttgaaccacgggctaaggatgggcctgttctctgtcctgcctagaaactgacagaagcatgggtgaccaatcccagacatgcttggcactgctgagttttcatctctgttgtaatcttctgacacctccttgcaaaatatcaagtgttatatgctaatactggccctctctttgttgaaggagaaagcatgtaaaaagacaactgtccaaaccctgtggctacaaagtctttttttggcttcctaagagatttactctattcttctatttctagaacttttctaagttggaagatttcaaatgtgagatagtgttagatccaggttgagtaaggattttataaaatactaaataatgatcagagatgggaataatcagcctagataaaagcatattcagcaggatgtcaaaatataccagatcctcatataaacagcatggattacattaacaggcctccctgggtgagtagcgtctctttcgcctaccttacgctcaccccatggttatataaccttttgaacggaatttggaaattcttctgaccctgtcctgcttgctgatagagttgagccagtggctggcaggggcataatctaataggcgaaactggaaacacacaaattcacagtcctcttgtcttagcccagagactgtacaggcaaggaaagaaagactcgccccatctccctcctcccctcctctggcctaagttgccgctgacttcacccaacaggcacctgaccctcccagatgagctgggaggggctaaagcctggtgcagccatggtaggggtggaggtacaggcagcaaacaatatttaagatgctgacttgtggagcattcgggcttggaaggaaagctataggctacccattcagctcccctgtcagagactcaagctttgagaaaggctagcaaagagcaaggaaagagagaaaacaacaaagtggcgaggccctcagagtgaaagcgtaaggttcagtcagcctgctgcagctttgcagacctcagctgggcatctccagactcccctgaaggaagagccttcctcacccaaacccacaaaagatgctgaaaaagcctctctcagctgtgacctggctctgcattttcatcgtggcctttgtcagccacccagcgtggctgcagaagctctctaagcacaagacaccagcacagccacagctcaaagcggccaactgctgtgaggaggtgaaggagctcaaggcccaagttgccaaccttagcagcctgctgagtgaactgaacaagaagcaggagagggactgggtcagcgtggtcatgcaggtgatggagctggagagcaacagcaagcgcatggagtcgcggctcacagatgctgagagcaagtactccgagatgaacaaccaaattgacatcatgcagctgcaggcagcacagacggtcactcagacctccgcaggtaaggagaccagtcccctgagggagcgtggagtgcctccccatctacagcactgcttctacatatcctggtcatcagaaccactactggggcctcttttgtgggtacactttccctttagtaaaggcttatgcagtatttcctttgacttctaatgctatgtaagtttacctaacaccttcacgggtctcttttatccacacagtgtttcagcctaccatcttggagtgctgagatactacatggtttgcccaaagtcacccagcaagtcttagaagcagggttcaagtcttcctgattggtgtagctctgctacttcctcaccaagagctgacaggctatatctcaagaaattccaaggaagcaccaaactgtaacagctgttcctctggaagcaaagttttgccagaaacagttctctggtgttcctaagatttaccaggaatgagcattaatggaattttgtgtcctctctctgtaaacgtaactcttctcattggctcagagttaagtgtagagacacataaccatgtgaagagtccctttgtgttcaggaaggatgcggctccttaaggttcctcaattgtgatacgtctatttttttccatggtcttaaatgaatttctccgaatacaggattttttaaatgcaatgctgaaatatagacttaataggccaaaaataagataaatttaatctttcttttgcaaaataacttttatttctggttagctcagctcaggtgggccaacatgaatttacggtttagagataaaaatttggttttctgaaattatcaggaaaatattagttgtaaggagcatatcctatagacatgtcatttcttgctgatataaaaaccattggtcccattataaactacatgaagaacaaagacatgatcagcttctactgactaagtcaatggttaacctcagctcaaattaagaaaaagttttaacatgaaaccaagcttgaaaattctgttacctgaaccaacatgtatcaatcactttctaagcatggacttccgggccctcagtttgggattagaaaggtattctcaggccattttccagacaagtgagtcctgatttggtctgtgagatgaaaccagacatgcggaagaccaggycagacagaggaatctgaccgtgccacttcctgctcatccaaacaggaggctttctcaccatcctgcaaggaggttcttggggtcaagtgcagctctcccaccaggtctcttgctcttcttgcccaggacatcattccttatttttcttctctatgaccaagtgctcagttacccttatattctataagtaggtagtcccttagaggaagcagtaagttggtgctttcaccactaagacgaaatgaagaatagtgatggcgaaggcacacgtactctacctccctttcccaaggtgctctgcaagagaacctatgtgcctcagacaactcccatctgccatcttggtgctcctctctaaggtcccagtgcagtggtcaccaagaaaagcaccccgagacatagcaggcaggaagcttctcttggatagtaagggccgcagtctctgaatcctatcagaaaaggctgtctcttccactatgctctttgatatttagaatacagagcttaaatcctgcataaagtagcagctccatggccctagagtaaaaaaactggccagtctgatgctctcatttcattgttttaacaaaacttctgggaggaaggcctcaaaggttcttctgagtgttttgaggtgctagctggatggaaggggaaaatatgtgataataaaatctatctcccttaattatggtctcaggtggcagtagccaccatctctgaacaacaacaaaaacaaccaaccaggaaacatcaacaaaaccagactctatgagatattcacgactgatttgttatagtggcggctgtctaagaagtctgaatctatctgacaggagtatctgttacgtggccctcatacactgtaacatttctagaattcatggcccagctatagcagaataatttatttcagagttaacctgaaaccacctgttggaacgtcccactaatgctatccaggtgaagggcttccctacccctctgctccaccgctagtaaagccaaaatacaccccctctggatctccccatatccacctctcccaaatgcagacactgatgggtaattaacaccactgagaatcccagggtagaaataaaggctcagtctctaaacactcaactcagatggagccactgggtctaaatgctcaccctgtggtttgttctcttgtagatgccatctacgactgctcttccctctaccagaagaactaccgcatctctggagtgtataagcttcctcctgatgacttcctgggcagccctgaactggaggtgaggtcattacagtcactggccatgccctaatacctgtccttcaccccctcaaggggactacaacaacagggccattcacagtttaaagaaaggaaaattcggctgggcgcagtggctcacacctgtaatcccagcactatgggaggccgaggcaggtggatcacttcaggtcaggagtttaagaccagcctggccaacatggtgaaaccctgtctctactaaaaatacaaaaaaattagccaggcatggtggtgggcacctgtaatccctgctacacaggaggatygcttgaactcaggaggcagaggttgcagtgagccgagatcacgccactgcactataatctgggagacaaagtgagactccatttcaattaaaaaaaaaaaaaaaaaaaggaaaactcaaacacaagcaaacacaccaaacaccacagagctatgcaaacactcagtttatgccctgcactccaaacccaggcatctgtttggccccttcaaatcattatcagtcaaacaacaagccttctaacatagatcagatcattcttataaccaccacataacttagtttaaatctcttgccatgtcctagaacagctattccttgggggaggagaaaagaaaacacgaaggcagcatcaaattatctggattttcacccaggcatggtggctcacacctgtaatcccaagttttttgggaggtgaggtgggcggaacaatcacctgaggtcaggactttgagaccagcctggccaacatgctgaaacccagtctctactaaaaatacaaaaattagcccagtgtggtgacaggcactctggtcccagctactaggaaggcaggagaatcactggaactcaggaggtggaggttgcagtgagccgagattgcaccactgtactctagcctgggcaacaagagtgaaattctgcttcaaaaaaaaaaaaagtatctggatttttccctccaagcttcatgtgcactcacccccgggcccaatttgcatcgttcttccagagcaatgcaccacccaccccagctcaccagcagtggggcagcatcactgcccgagtgagccagtgtgactgcgggagtgcacacatctactggctctgcagggacaggaacaggttgggaagcctgccctcttgctcctgccttctgcccctgcaagtccctcaccagagtatcccctctgcttcaggtgttctgygacatggagacttcaggcggaggctggaccatcatccagagacgaaaaagtggccttgtctccttctaccgggactggaagcagtacaagcagggctttggcagcatccgtggggacttctggctggggaacgaacacatccaccggctctccagacagccaacccggctgcgtgtagagatggaggtaagcacaaggycaggggccccatgactggaccagtgccaccacacatgaccgcgtacaactccgggggtgccattcctattctgattcaagacaaatctgtatattcattgtgatggttttcctgcaagttgtaatggagttgaggaaaaataggtatttttcctttctgcaaccccccaaccccccgacaaaagtggggctgcaggtgggacaggaagaggccagacccaggccagagtagagcaaattcaacagtcagctgtgccgaacactagtctctgctctggccgagcatgaggtcctttaggtgcaaatcttactgatactgtttggggacccttgctgaaggtctgaaagcactcactatatcctcatgtttctcttacagcagctctgtgtgggattcagcaaaaacatagctgcaccttataagcaggaaagtgaggaatatagaaagagagactaatcaaggccatatggtgaatcaggaaagaagttcgagccttgttttctgattcccaggttaacacagtaaactggaggtaaacaagtaataaagtcttattagattcacacctataaaaagatgtttggctatgggactgtcaggagagaaggggtatagagacagcatgaaatggagcctgctgcactttctttaaggctctgctcctcctgacaggactgggagggcaacctgcgctacgctgagtatagccactttgttttgggcaatgaactcaacagctatcgcctcttcctggggaactacactggcaatgtggggaacgacgccctccagtatcataacaacacagccttcagcaccaaggacaaggacaatgacaactgcttggacaagtgtgcacagctccgcaaaggtgagatttggggggaccggaaaggagaagttcaggtacaagctcataatcccacttgaggagaaagagtgaattataactgtacagttgatattccggttttggtattctttctgaccctggctctaactccttacctgatgtctggtctatcacagtcaacttactagcactgggtctgtttctcatgccaggtggctactggtacaactgctgcacagactccaacctcaatggagtgtactaccgcctgggtgagcacaataagcacctggatggcatcacctggtayggctggcatggatctacctactccctcaaacgggtggagatgaaaatccgcccagaagacttcaagccttaaaaggaggctgccgtggagcacggatacagaaactgagacacgtggagactggatgagggcagatgaggacaggaagagagtgttagaaagggtaggactgagaaacagcctataatctccaaagaaagaataagtctccaaggagcacaaaaaaatcatatgtaccaaggatgttacagtaaacaggatgaactatttaaacccactgggtcctgccacatccttctcaaggtggtagactgagtggggtctctctgcccaagatccctgacatagcagtagcttgtcttttccacatgatttgtctgtgaaagaaaataattttgagatcgttttatctattttctctacggcttaggctatgtgagggcaaaacacaaatccctttgctaaaaagamccatattattttgattctcaaaggataggcctttgagtgttagagaaaggagtgaaggaggcaggtgggaaatggtatttctatttttaaatccagtgaaattatcttgagtctacacattatttttaaaacacaaaaattgttcggctggaactgacccaggctggacttgcggggaggaaactccagggcactgcatctggcgatcagactctgagcactgcccctgctcgccttggtcatgtacagcactgaaaggaatgaagcaccagcaggaggtggacagagtctctcatggatgccggcacaaaactgccttaaaatattcatagttaatacaggtatatctatttttatttactttgtaagaaacaagctcaaggagcttccttttaaattttgtctgtaggaaatggttgaaaactgaaggtagatggtgttatagttaataataaatgctgtaaataagcatctcactttgtaaaaataaaatattgtggttttgttttaaacattcaacgtttcttttccttctacaataaacactttcaaaatgtgagtatcttctttttaaattcttaccattaccacttacagcaggataaaaagttaaagttaaatcagagggtgagcagtgacagaggcccggggtttgttttggtgttcagggcaaccaagcggggagcagaagccaaaagggaacaggtaagggacaaaagggcagcaaccaggacaattcttcataaaggggattacacgtctggggctgggcagtgaaggcatccagccttatcagaccctctattctacttaggatagagaagcaaaaacaggccagcagaccttaccctaatgctcggggctaaccaagtaaaagtggtgtgtgtgcgctttctaacaaataaccactcaatcctctgtccccaagaaagcaaatatatttactgatatgtgagctttaaggagatgggggtagtttatactatctcagtgttagccctgatttgggattacatctcggatttaatttgccctgtagcagataggttaaaaaagtcaataggttgcaagacggattgaactagtagcaagagaacaatactgtcaacagaacacagttttttaaagcaaagacaaaaaaataagaaatagctgcacgcggtggctcacgcctgtaatcccagcactttaggaggccgaggcgggtggatcacgaggtcaagagagtgagaccatcctggccaacatggtgaaacccctttctactaaaaatacaaaaattagctgggcatggtggcatgcgcctgtagtcccagctacttaggaagctgaggcaggagaatcgcttgcatctaggaggtggaggttgcagtgagccaagattgtgccactgcactccagcctggagacagagcgcgactccatctaaaaaaaaaaaaaagaaaagaaaagaaaagaaatagctgaacaaagatgtttttgtgtagggctaccctaattgtttcaaaaagaatttagggaagttgactcaaatgtatatactaaaataagctctgaaaaagcagacaacttggtgaagggaaaataagagtaggaaaaataaaacaaagcctgtgggggttgggggagggttagtagtaaaaacaggtaagatgtctggaatttgttggaggtagaccaggaatttagcttcaagctctctagcagccactgtgaggaaggaattcaatcccttactgcaaagcgatgtctccaaggccagatccaagtagtggctcagggacataaaaccaacagtgggaaaagacccctgagaagaatttccatgaggctcacccacagaactaggggtagtgctatgagcaactttgtctaaggctgtttcttaaaacttccttcagtaaagacgacagtataccaccacaaccgggcttaggaaaagcagctttacaaaatcagaagtaaaaactgcaattggaagcaaaaaaagaaaggtgatgggaagacacaggagaccagcagaagggaggcagaaatgcaagctgagctgacttagctgaggacacccaaagagccgagcacactggctttccccagtaacagcattcattcattcactcattcattcacttttttattgagacagaatctcgctgtcatccaggctagagtacagtgacgcaatcttggctcattgcaacctccacctcccaggttcaagcaattctcctgccttagcctctcaaggagctgggaatacagatgtgcgccaccacacccagctaatttttgtatttttagtagagatgggtgtttcaccatgttggccaggctggtctcgaactcctgacatcaagtgatccacccaccttggcctcccagagtgctgggattacaggtgtgaactaccccgcccggcctggaacagcgttttaaacaaaggacaagatcaatctccagggaattctgaggatttactttcaattatatttgcttacaaagctaaataaccttctagagcacttttccaggcctctgactatatttttctgctacaaatctgcataactttaagtttttatgattgtatcaaatatgcggaaaaattaagggtggaattgggaaggtttcaaataggtctcaaacaggtgagcaaggaaattaatatgcaaaatgagttatctgaccttaaagtgatcatacttagttaccgtattttctatgagctatcaagtgacagcacattacctaagccagagatggaaggaagaaagtggattttcacatttactgtgcctgatgtgaaactgaagcatgcctcagaggacggcatgtttttaattattcctacatggtatttcagaaatcaacattttctccaagtccaatttatttgggcaaaaacaggattctatttctatcttttcgctaactttttaaagtgttaaaggaactcttttaaatatcttctcaaaagcacagctaggaaaggacttggctatttgattaccctctcaaacaaaggaggctctatcctcctttgatagagccacacagcaggctctatcagccacggtgaaggaacttactagccagatgattttttctaaactatctgcagtgaaatgaccgaccatttagcattcacatgaagataatgagatcccgaagttgatattctctgataatcattaggggaagtgaatggttttttaggagctggagctaatgtttcatgctgcttgtaatttcctaacagcagaaaatttattaaacgaactattttttccatacccagaagactgaaaactgtcttaacagaggagcgaacataaccacatcagagaaaagaccattagatttcagattatgctctgccttttatattcacaaaacaccagaggaggaagatgcaggcatcaatagatttagttgataaaaccccactgtgcccttgagtaccctctgaagcccaggaaccagcacattctactccagctctagacagcgctatctaacccagacataaaacctatcttcctaggctgccatggccacagaattgcttctcaactaaatttcactggaacaagaaaggacaggttggaaaacaacaggagcccaggtgataagggtcaacagaaatgacaatcatggctagattcctggggagagccatctgcaacaacatgtcatttaaacatgctggccagacccagaggcagatttcacagagcagaagtcttcaagtgactccagtgaagtggcaccaggcagtgggagaagagaggtcattttgcatgaaggcagcaattaaaaagggtttatggcctacctgatgagagattctagaatggcaggggtggggcctttctggaactccagttctttgtagtgtagtgctttggcatatgctcggcacttggcagctctctcacccagcagaacaatgccattgtcatctctcagtggcagggggccctggagaagagcaaaacctcacagcacaggaaaatggcagatggggcacaaacaagagaaggctgtgtggatgcttctctcctcccaccagctggttccctgtcagcctccatctggacaatggggaaaagtctcaccttgtcactgtgttccatgaattcagccaagtttaagagggtctgtgtgacttcagcgatgtcttgtgaggtgagggccaactcgatgcttctgatgagctcatcctgttgatcttcattcagttcagaccagcaggacacaaatgcagcattgaagagatccctgaaggcagagaaggtggaaaatggagagacctcccgtgcctctgcctgctgcctcaaagtcacacctatcaattcgcttttggcatcactgattttggttatacaaaccagtgctatacagaccagtgctgtccaagagaattttcctgtccaatatggtagccagtgatcactaaagcacttgaactgtggcaagtgtggccaaggaactgaattttacattttatttatttttaattaaccacatatggctagtgtctactgaattttacactgcaggtacagacattgtgatattcagggacttggggggcgagtggcagggcggggagaagagcagagcaaagtgacttttctccaaaggaatatttcttggcagtttttgcattatttctcttcactggaggaaatgggaaatgaacagtatagggacttctaacatagaagttggcattaacaaatgcagaaaataataatcattaaatgattcttgggatgtttctgggacaatgtctaaattcttaaggtcagaaatgtcaaaggcagcatctgcaattgctttcaaaatataaccagaatccttagttggatggtcataaaaaatgacaacaggactagaagcattagcaaataggatccaaatccttaagttctaaaagattttctaagccaacagttggggcctcacaaagacatggaaccagaggttccatttcaaagattactatgaccactttacattaccacagtaccacatgatggacacatttgccatcccttacatctaacattaattctgtcctccccactgttctggtgactgtgcggggaaggaaatgggaaaaaacaggatatacctacaatggatagatttagcatttgatgcctctatacctattttctgttacatattaacaggttaagttagaccaatgtgtataattttggaatttgatagaaaaaacaaaatttgaaatccaaaggatcaaatgaagaccaaaaaaagtctgttataaatttaaaaataaggccaggcgtggtggctcacgcctgtaatcccagtactttggggggctgaggcgggcggatcacaaggtcaggagatcgagaccatcctggctaacatggtgaaaccccgtctctactaaaaatacaaaaaattagccgggcgcggtggtggtggcctgtagtcccagcttctcaggaggctgaggcaggagaatggcttgaacctgggaggcagagtttgcagtgagccaagatcacaccactgcactccagcctgggcaacagagcgagactctgtttcaaaaaaaaaaaaaaaattaaaagtaagttttcggagccaggtaattacagtcgctggtcatcctggtgacttgggaggctgaggcaggaggatctcttgagattagcagttcaagaccagccagggcaataaccaagaccttcatctctaaaatcataaaaaaagttttcctgatctaggtcagaggccacattggatcttgaatgaacgtatttgggactaaggggataaaaacattgtgtatatcacaagcctctcatggataacactgtgctcagaggtgactggagagaaaagaggaataataaatacatcagctgagtacatgatatctccacactacggaaacagggaagtcctagaaactattttaaagcattaaaaaatacttgaaagaaattagaggatgcaaatcatggcatcaaaccaacagtctcaggggccatcactactgctaaatatatatcataacagcaaaccagctgctgacaaaaatgaagtgaaatgccttgctttctgcttcttgccaatgcgaagggctgcttattaattaaatcaccattttatgcctcattataaataattaatatccaatgcagaaaaatttaagaaataaagaagagaataaaaaagaaaataatcactccttaagccttccctaaagataaccattgctatattactttctaatctttatcctattcacatttattttaattttcaattttgtattccattttatttacttacattatattataaatctttcacatgcattagaagttttataaaccaaaaaaaaatttttttgagatgcagtcttgctctgccatctaggctggaatgcaggggcacgattgtggctctctgcagcctctaaactcctggactcaagtaatccccccgccttagcctcctgagtagctaggattacagcttcatgccaccacgcttggctaatttttcatttttgtagagatagagtctcgctaggttgcccaggctggtcttgaactcttggcctcaagtgatcctcctgtctcagcctcctagagtgctgagattataggcaggagccacaatgcccag

SEQ ID NO: 97806 - DNA, 32140 bp, Homo sapiens
ttcatgggcccaagcagtaatgttctgctctgtttaaactgagatgaaattatataaagcaccaaagcaaagaatcatgctcaactccacaaacatttcatgccttccttgtgtcaggtgttggaaataagcacataagatacatagattacatggagtacatagttcctatcctcaagatgctcagaatttggtggtgggggtaggggtggtagaataaatataggtaaccataaaagacaacaacaacaacaaaatcagacgcttatttatttccaggcacgtctacctctttggggattgttaaatctacttataccatagaaatatagtgtctattaatgatgctttaaagacttcaaaatgtacttaagttcagcgtaaagatcttttgacagatcttgtataggaagatgaggcttgtttacggacagatgcacatcagtaaacttaaagaccaaactcaacacaaaaaggaatgcagaacaactttaagaaccaaacaagtgagaagaaatagactgatggtatagttgacagcttatatagttgtaaatataatgaacagaactggattatacattacacggtcaggagatactattccacaatagtctcatgctctgcattaaactcttatttggaactattccctagtttgggttgccggacatttagttacacctggagaaccagaatgggtctagagcagcctaacaaaatgtgagtaaaggaaattctgtgagaaaaactaaagaatttttttcttcaggagtgagaagcttggaggggctatttgatttttgtcttccacataaggaagataatgtcaatcacttctcacttcagtgacataatgagtaagactacaatggcctacagtaccatttggaaaatttaattcataagagcttttaagcatatcatgatatatattaaaatattataatggcaaactgccatggtttgaatgttccctccaaaattcagatgttgccgatgtgataggattaagaggtagggcctttaagaggtgattaggcctttggagctgttcccttgtcaatgggattaaaacccctttaaacgaggcttcttgtggcatttagctagggttccccacctctggaggatccagccctcaccagaaaacctaccaaacctgcttgtgccatgatcttggtcttcccatcctccagagcagtgagaaaacacatttctgttctttaaaaattatcttgtcttaggtattctgtcacagtagcacagaatgggctagaacagcaactctgctggtaggtttacattttcacttgtttggctatataggtaatctaatgatttgcaatttgattctgggaaaatggtaaacaagaagaggtctttcccacagtgtcattaaggttcacaacaaggttttaaagcctgcttgggcatagaaacaactaggagtagtaaaaaatagttcaggaaaagtttcaggagtaaagtatgagacattttctttttttcttgacacagagtctcgcactgtcacccgggctggagtgcaatggtgtgatctcggctcactgcaacctccacctcccaggttcaagcgattctcctgcctcagcctccggagtagctgggattacaggtgcctgccaccacacccggctaatttttttgtatttttagtagagacggagtttcagtatgttggccaggctagtctcaaactcctgacctcgtgatctgcctgccttggcctcccaaagtgctgggattacaggcatgagccacggcatccggccaagacatcattttcatacccactcctagttcttcatcaagaaacatttttaggtgtcttgagttacagaaagtgttaaagaatcaatacaccatttctgcttctgaatttttaaagctttgtatcctaaagccttaattagggtctgacatgaaaatgtgtctgttgcctactcagagaagatatctgggcctctcagccaaatccgaataaaatcttagcaaatacgaggtaagttcactgttttggagaggccattttagattgaacacacaaaaactagcacataaaacctgaatcagtgagaaatatatgtaagaaatagccatgttttccaataaccactaaaagattttttttttccctagaccagtggactgttattatatgagaaacaaagaggtagaatctaaaaatgagtttcctcaatggtcatacctatgtgctattctatcagggttcatatcccataatggtattttttttctgtctcctcagtaagtttatcttgtttgcatttacattttcctctacccactcagttggctttggcttcttattttgtaacctgagataagttctaggggtaggggtggaggtggtgggagcaggtggggagttagtgtcattttctattctttataaatcttttctgtgatttgcgttacctctctctagcgtacgtgaattctctagcctccatgtgaatgaacactcgcaaactatgccatccccctctccagtcctcaccacttcattatcagaaaaccaactgagacatttgactctctgatatgcttgtaagagccccagtggcagacaagtgaatcccagggcccggatccttcctgacaaggccacatcatctcactgcttagagtacttttagaaaggaggtcccttctgcctcgccggcataacctcccttgcttctcccagaggtgcaagctctgactggtctgcctgaggcaaaaatggaagttaaaggtgctcgtttaagtagagaaaccagtggcgggagtcagctatgtacctctgtggtctgtctgtctgacgtggaagttttatggggctggggatggaaatgggagttctttacagagcaaagagtatgtgagtgccttgatttgattctgctaactgcaagtttactatttaaaatgcaatcctcaatccagctcagtatttgtttcctgtcaacagcatggaccctagggtgagattgcttatgttcaaattccaggattttatcattgctgtttttatgagttttacttctatgaactctggagaaaacaaaaccactaaacacttgctacggcccctcaccctaaccacattcacctcaggccatcgctgggtccttcgtcacccctttcacttcattccccagcttttaaaaagttatctcagcactttcaaaatcctgcagtttgtctctgccaccaccagtttgaggagttcttggttcctgttgcctctatccttgttcaagcccaggtgaggacagaggggcagaaatgctatgccctgactcccagttctaggctgggcagctgggaggagagccagctttcccgaatcccaggggcagagggcgccaagttccctcgacgcatcttccctccaagtcttacatggcaccatcttgaccagaagcatggcctgcagtcctgaggagagaagtcaaggctattttccaggcccaacctgcaagtacctgttcacactggcctggacctgagagaggccccacagagaggagagcagagagggccactcacagaagggtggtggtgcggtctccccaccagccccaggcttgtccctcctgctctactctctccagtgcacacccatgagggcagccgggcagatggcagaggccacgggctaggtcctcccttagtcatccctgccagacctgacctgggtctcccccaccagcttggccagccctatgatggcgaaggaagggtcaggctccagcctggcaggagcagcttggctcggtgtgtaggcctcgctccctcatggcccgcttcatctgtagaccaaaggctggtccaatttgttctcaaactgagtgaaagaaattttcaagtttatgggtttctcttctgatggaggccagagactctcacccactttttctttccttctgacctggtaactgggaagtaaaaaacacaaatttctaagtgtctcctctgcctagatcacatcaagaactgacgccatcccctcagtgtggaacccaggggtctcctaaggatgattccagcactaggttgatagaagtttaaagctggggaaggaagagcacaagaaaattacataacttaagtgaagaactaggcctaaaagtggaaccttgcatttgagcataattatttagcatggtgtgcctgaaatatgtagaactgaataatttgttttatgtaagtataatcaatttgtatacattaaaattgatactggctgggtgcggtggctcacacctgtaatcccagcactttgggaagccaaggcggatggatcacctgaggtctggggttcgggatcagcctggcaaacatggtgaaaccctgtctctactaaaaatacaaaaattagcctggcatggtggcaggcgcctgtaatctcagccactcaggagctgaggcaggagaatcgcttgaacctgggaggtgggggttgcagtgagccaagattgcgccattgcactccagcctgggcgacaagagcaagactccatctcaaaaaaaagaaaaaaaaaatgatacttatcagaaaaatcaattaatataggtatacttacattctatgattgtcaggatgtaccaactccaatcccattaatcatactagcatgaagaaaaattacatttctgggccactgggtttgtatataaccttagctaatttaagcctggataaaaataagaatgcttgattcatttaaaatctgagattctgggatagatttttgtgtaacttaaacttctcaactcttctgcaatctaggtttattttttactataatgtaccttcaaagagctaagtctcagtttatagattgttagttttttaagttccactctctttcgttgtactgctgaactctgggcctctgtgtcctcatctgtaatgtggagtcaaaattatcactaaggtcccttcaagcatgaatttcgcattgactaatccgttgtagaacacaaggaaaataatggttcttttgtagttctcttgggacttttactattgctagaaatcatgctgggcagatgcaggcatcacatggactgtgcggggaagtgtaactcaataatggccatgttttgaggcagtggtattcaatgctttaaagagtgagaaaatggcctttagagatactttgtttgaaagagaaacacgcttggaaaatgttcttgagtatttctgtatggaaaagtataaaatggatatgtcctttaaatgtttaagtacttccaacacttttgctctgcatactcatggtgcaaacgaggtgggaagggcggaatccctggcctagctctgcgagagtggggtttcaggtcaaagcaggtctggcagctctgcccggcccaagcgcagaacccttagctgggaaggccgcggccaggctgcggggccccctgcaggcgggctcagtgccccggcccagcacctgttgtcccaaggcaggccccgcgggggagaggccttggagggcagcgccccctctcaccagggcggagctcaggagagttcgcagcccagggggccgagaccaggggcagggccagcgaaatgcctcgctggctcttactttcattgacctctgcgatgcctcgctggcttctgctttcattgacctttgcgggtctgttcccgctgcggcgccggcagctgcttggtagttgcggggggcgtgagggcggtggcccagaccaaccggctggcagcccagctccgctccgcccgcccctgcctcggaccctgcgcctgaggaagtatcgaggcaaccctctgccacccgaagttcgtgggtcgctcccagagggcgcgccctggagccgagcgcccttgggcggccatctggaggccaggtgcgggccgcgaacccgcgaggagcgcgcggcgggcgcggcggcgacggcaggaggaggggccgggagcccgggcgccgccgaaggacgccccgtcctccacatgctgccacttggctgagccgggcgccggcgagaaggcggcgccgctgccctggcagctggactgcactttgcccccgcccggcctcagctgccgcccgcccagacgccagcaagcccccctcccacgacagggctgctccgggagcttcggagacccgccccgggcctgagcgcaggctgcctccgggaccccacggctgtccggacgtgccatgggcgcgcagctgccgggcaacgtgttgtgtaagtgaacatctgggaggtgggtgactggtgaagggcgggtgtctgtcggtctttgcttgtcagctgtgccttttagatttttcaatggcagaaacccatgagttacaggaggctttaattaaacgagacckttctcagccagctgccgtggatagagcctcacatctccgtcccctaatcgagaagagttagcccctaccccttcaattttgttctgggcttcccagtgaaaggtatctcattatgagttgcaattccaccctgctkcctacctgaagagtgagtgaagattttcaggtaagagatttgcccgtgaacattgcattgatatgccaagctgtcaggcttgtgctctgaatggcatatcatgagcaaagtattagctctcgtgctctttggagctgtgggaggctgaatattgaggtgaaatgatgcaaataagaaattaagaggagtagacgggtaagatcctttagccatgagttaaggggtcaaagaagcaaagcggaacaattggagttgtctctcttgtctctggtctgacaccagcccttcccctatcctttagggaattaggttaacataaaattgtaaactagtaaatgttcttatcaaagaccatctttttaggatctagtgtatgtggcagctctctcagggaaatttttagataagaattcggaggaatagggaatctacttttattatgacaaagtataaatcaaaccaagatcaacagttggctattcctttttccctttggatgaggctgttttcaaacacctaacatggctatcataaatagatggcaaataacattatttaggcattctgctttcaagcagaatggtctggaagaataatttcagtttttaattttgttttgccattaaacaaaaattataatcattacttatttaggtccacacaatgttgtaacaaaaggatgctttaaaattgtagaccaacctccaatccattttattatctcctctgtagcactcctgacaggccagccacattttgattgaacacttcagtgacaggaagctcattacattttgacgggttcctccttttctgttgttagcaaggccttgtttacgctgaactgacaatcacttaggaagcagtacctgtttctcattagtcctacctggccaatagcgctccaactgtgaacttagaaacaagatttttctgcaaaaaggatctgaaactttagtcagtctgaaaagggtccatgacccaaaaatagttaagaaatgaaaggtctaaagtgatacaaaataatatttttgtctcctttgcttgacagcctttcagatccctgagcctcagtttctcatctgtaaaatgggaataatatactttgtctaaccctagggttactgtgaggattaaattaataatattaataaagtacttagtagaggtgcctaggagtcagtaaatgttagttatcttcaataaatactagtttttatgtttccttccttacctaagacccctctctgtgctaaagatccttagcccaaaattgaattcaataagtcagtttaacccaaacagtgcagggtgcaatgagctgccatcttcaaataaaataatctattgcttaattggcatttgtagtaaatactcagaagttgactaaaaacctcacctccataccccgtgtgctttgctgtcaagcaaaggagacaaaaataaaggtaggctttattaatttttaaattatgcagttaagcatttcttgaatctgaatttcttttttctcttggcttgtattacttaaagcctctgtatggtttgcagtttgttagatagacgttttaatcttatgtcattcatcatgttaattctacttttcagttttgtgtcacctacacatttgctgagtttattcaccagacattcaagtcactgataatagataggacaagtccttttactgtgaccgtggtacctctagaaacctgtggcacagtaggaatggtcctggatttttggaggctggttttggagtctggccctgatacctattagctttgtgaccttgagaaacttcagtatcaataaaatgaggtaacatctgcctttcagggtggttgttaaaattcaaagtattgaaagtgccaagtacgataatggctggaaatctagttggccttcagtagattttgcttgaactaatgaattcgctggactcagccctttcttatcaaactattctagtccatagagcagtcttctccataaggacattatgagaaaaatgtcttgctgaaaagtaaagatcttgcatattccctgatctaccacaaaagtaaataacattagtttaaaaatgaatgattcttagcaaattgttagttcctagaaatcygcagtcttttcctccacccctcatttttccttgtttaatgtttaagtttcgaattttgccagagatagatgtcaaactwttagtctgtaaagtctaggaattctaattctttcttttaattttgaatattaaaaataaaaacactgggggaaaaaagttctgtttgaatctctagtctcttgagactgcccttcttctccatgtttttatagaggttgtcagaatagttctgtgctgacatctgcaggttcttttggtaccctggaatataattcaccagaatgtgaaggcatggactattttaaaatgacctcttctgcttgcaccttagttctctcttagtgaggtttccatactttccagcttgaaaatcatttgcttttaagggagcaaaatgttgctgagcagttttgttttctttctcattagaatacgctatctatccttggatttgagaattttaaaatgagcctttcttactatactttccatatagtaagtatactatgcacaacatgcactaagtcggtggttgagaagtagaaccactcatggtgttataatgttaaaagttttggcagtagtaaataactctaatcagtatctcacatgggaagagccttgtattttaagaatgaatttattccttgtaagttaaaagttgtgaaattaagagtgtttcacaaggggctgaaggtaacataaattagtgaagctgaatgggagggagtaacagatatgtgacccaaagagtgaatgcctagcttagaaatattctaattcagaacagtttcaacactgcattggcccaacaaaacactggcccaaacactactgcaagtttgtagtctttgcatgtaaacagcctgcaagaggcagaactatgtaaatttcactgtgttcttcccaacatctaacatactataggcacatggatagttgataaataggaaaactttagtaagcattcattaatcgccttgatgtagagaactgttctgtacaaaataaagaamaaaataactcctgcccttgaggaatatctaatctcatttggggagacagcatttataaattaaagactagacttcagttcaagaacagaattctgaggaagggygggaggaggactaggaagtctgcaataaggagatacggcttcccctatcctcaaagatagtacttgggtttaagtaaggaacaggggaaagggtgctgggtggagayaaaggcgaggtggtgtgtttcaacttaaaggaggactaggagtaggaaatgagaatgggtgagccaaggagactcacttgatgggagaggaaatttccttgtattagtgagaaattaagtccattgggtaaaaacagggctttaaaaaatggttacattaaatgtacctctcttcccccaagacactgtactgttaggccacagaaaataggaaccatacagtaactctttaggtaaagatgtggagtatatggatcatgaaagaactatgaaactttaaatggcaaaattttctgaatttcttggtcctctgacctagagtcctagtgaatttgaacactgttcttccatgtctctataccagagtaatgattcttttcagtgctcaaaattacatatactgctgcctagaatttaattcagtgcacagcacttaacactcttttattaatttatgcctcctacttgttctaaaatgaagtggttttactacataaagactaatagaaattgaatttgtaggggaggaaaaaagctgtcctctaccctcttaggtttgtgaccaaggcctgtgaatcaaactgataaaagagtaatggcataaatagaacagwtttaaacacacgtatgcacaggagtttgcaaaagaaatgtgactggaggaggtggttagaatttggggcttatctaccaacttaacaaaatgataaagcgggaagaggttctagatcagattttctttactagttggtcagagctccttttcatttttctgtgaggatttatattatggtgctggaggaattgctgcagattgaaggtcaacattcatggccataaataggagtggccagatgaagccacctggtagccagagtgaagcccagaagggcttagggaaatacctgcttgtgtatgtgtgtggtttttttcctctacctggaggacctggtaaatgagatgaagtattgatacctggacttaagacatctatcgcctgttcaacagttagtctatcatctaattgttcaaaatcctaaattactgttgtcattcttagattataattctctttcctcaattataatctggagatataatacaacacttaataattagatgttagtagctttaggagacaatctggagagataagaaatggaaataacacagaacatgttccacgttccaagggaagttctagatgctttacatatagattcacaatttttatttttttgagacagagtcttcactctgtcgcccaggctggagtgcagtggtgcgatcttggctctctgcaacttctgcctcccaggttcaaacgattctgctgcctcagcctccctagtagctgggattacaggcatatgccaccacacctggctgatttttttagttttagtagagatggggtttcaccatgttggccaggctggtcatgaactcctgacctcaggtgatccacccactttggcctcccaaagcactgggattacaggcgtgagccaccatgcccaaccaaaatcacaatttttagatgactgaggtagagcccagttcacagataaaatcataccataccgctttattcaggtttattagaatctcaaacattgtctcatttcttaacaatgttattttctctgcctctctattgagaaattttggccccaagtgtgaccacatggagtcatcctgagcccatcctgtcagtgaccagctgtacagtgtgtgtgctctaagtgcctaaggatgaaaccgacttctcagtttytaaggtccctacagtagtgttctttcggtgaccttcatactgaccaaagtcatatatacagtattttgtagcttttcctttttggtgaaagacaaagaacactacatttaaattatgtccatttctgtttgcctgtttaaccaatgtcatttgatcctgttgtgaatttatagtccaagtgaatgattctcaatactcccagtacaaagacctccacttactgtccagttttcacggagccctacaagaaagtatattcttagtatccattattagagaacatataatgacaaatatgttactaggaactgagatatatgtattttttataaacttattttttattttttttgagactgagtctcactctatcgcccaggctggagtgcagtggcgtgaccatggctcactgcaacttccgcctcccaggttcaagtgattcttgtgcctstgtctcctgagtagctggaattacaggcacctgctacyatgcccagctgatttttgtatctttagtagagatggcwtttcaccatgttggccaggctggtcttgaactcctgacctcaggtgatctgcccacctcgagttatgttttaatgaattggtatttttattaatcacatctacactgaaatttgaaagacattttatatatatatkcataaaactttttcaaagaccacaacatggtttttwtatatatttacattaattcagggtgagaccaattttaagcaataacttgagatataaggcatcttagaaacctgtgtaaaggcttaagaatatgacataaaatgggacaatggtaaaataaaccatccctgttaatccagtgtttaagatggacttctggggagttagcagcctattcgtttacacrgcagattttagaagttactttttttttttttttttgctggttttgtgtttgggtccaactcatgtccaaattatggcctttttgtgataccttccactggcatattcccaaggaatttactccttttgatgacactgcacccagaatggaggaacacagctacaaaatgaactataaagaagggctaggcaggcatggtggctcacacctatcatcccagcactttgagaggccaaggcagaaggatcacttgacgccaggagttcacaaccagcctgggcaatatggctgtctctacaaacaatataaaaaataacgtgggcatggtggcacgtgcctatagtcgcaggtactcaggaggctgaagccagagaatagtttgaacccaggagttcgaggctgctgtgagccacaactggccactgtactccagcccaggcgatggactgagaccctggctctaggagaaaaaaggtgggtagctgcagtaaatcacattttttctttgacrgacccaacagaaggcccagttgttgctagatctcttcctgaggatagtgtcagggctcattctatatttttagagctttgagccttcaaataacattgaaacatgtaaaggggctttcttttcctcatgtatgactgtcatgtgtatatatgtgtctgtgcattgtgatttgaggggtaggagacagagggagagggagtggtgggtggaagggcactgttagattttaatacttatagcctgaataaattatattctctttctccttttgattttgttaattttggaagcacttacattctatgggcgcaggttctaaacacatagtagacactcaatatagactggttggatggttaagggatgctctgatagttcttttgtgtatcttgagaactaaggtataaaagattgatttaaatatttttgagaaactgtgttttttaaacattttatatttctgtaattagccagttaaaatgacaagaaggccaaaacacttcctggttgatatgcagcatttaatgtatcacaccttcaactgatgaccatagtcacttcccaacctgacaaatgaataacagactaaaaattaattcaggacagctgatcacacctgctatcttaaggctaatcatagctgcctaaccactgacttgcattaatggctaacattgttgaaactttatttcctccttatgaatcaactatcttattaggagtgattgaaattatacgaagtttgttcttcactggtgtgcaggcttatactgtaattgccttttaagtatttaaagtactgtattgtaactgccttttaagtatttaaaagtatttaaacagctgctattatgaacagtagatgcttcacatgaacttttttttccctcttggctcttactttaaggatgatgcttttttattcatgataaatcttgaggcttctgtgggatggaaactatagcatgaaaatctgattaacaaatatgtgggggcagtttactaatccattcaattagggcaactgcaccttctcagcatgccatgagcaattccattagatagctagttactggaccagatgattacctaattacatgaatatatcagtgtcatttttcccaacacaggacttgaaggccagatttgagaactagtcctggggtagtagtacccagagacctgtttgggagactgggaaggtctgggccatcacgttcttgctgatagcccagagatcaggtcaaggacaggggcaatgagaagaaagaaacagagaccctgggaaggagctatcttggtctttaccggcaagaattaacttcaaagatgggacagaggttctataagttcaagaaagggagaaagttaacacttaaaaacataggctggattggataaagtaccgttggagcacttttattccaagaagaagctggaattcggagtgacagctccattcttatttgccatgtgaactctgggtcagcaagtggaagagccagacctatctgcctgtttcatctattagatgggaagagatgataaacataacataaattagtaagcagatgtgataagtaactgaagaacagttgttttctatccttaatagatacggctaaaccagctgaaggttaacaacataaatattttaatatctaggtatttttgatgtcctatactctagaaatatgtgcaaattaaagtgtggtggggatgaagtattactaatctatttccttggataaggttatatatccctctctctactctaccctccttagctacaagttcaggaacaacacaataaaggacaaaagactctcacatccaatttcaaattggtttctcatttattgccatcattctaaatcaaagcactctacctgttcccaaaggaagtgacarataaagcccttgaactggcaactggaagaactagaagtaggcttttgctcttcggtaggcccagaagattatgaccactgagttgggctggtttcaggccaatgtagaaaggaagcagcaggcctcacactggagtcctccagcacagggagctggtccgctctggatgctgcccataggcggtctttttcagataaaatacatcagtcccctggatttaggtgccccagaatgttctcaaaaactgttcttatatcttattaaagtaaaaattacagtgaaatacagtaaacagatgttaaaggtacaatctaacatgttttaacatatacctcatgtaactaacataccaattaagatatagaattttttaatagcctagaaagttatttcagggcctcttccaaacagtccttacttcttcccacccaaagggaatcactactatgatttctattcatagggtcactattgtccaatcttgaaattcatataaatatgatccatcttttttatctggctcaacatgtctgagattcatccatgtggtttgacataccaatagttcatccttttttaattgtcaagttatattccattttraggatatccctaatttgtttatccatttgatttgcctactgatggacatttgggttgtttccagctttgactattgtgaataaagaggctatggatattggtatacagatttttaaaatacctrtgtttccatttgtcttagataaatatctagaaatgaaatggctggttcacagggtaagtgtgtggttaactttttaagaaacagccaaggaattctttaaaatggttgtaccattttacattccttccagcaatatatgcgttgcatgtcctcaccaacactaagcactggggttttttaaattttagcaatcttagtgtgggtaattatattgtggttttaaaaaatacctttttaaaatttttaacatacagtaaagctgacttcattttggtgaacaagtctatgaattttaacgcatgtttagatttgttacagccaccaccacaatcgggataaagaatagttacatcactccaaaaaaggtccctcctgctgcccttttggtcacagtctacccccaacctcctgtcaaccactaatctatcatctgtccctatagttttgcctttttccagaatgtcatataaataagtaaccttttgagactagcttgttcaatcagcatgcctttgagtcatccatattggtgtacattaacatctttgttgtcaacttttggcaattataaagctgtgacagacatttgcatacaattttttttctttattttttgagatggagtctcactctgtcacccaggctggagtgcagttgcgtgatctcagctcactgcaacctctgttctgcctcctggattcaggtgattctcatgcctcagcctcccaagcagctgggactacaggtgtgcaccactatgccctgctaactttcttgtattttcagtagagacagagtttcaccatgttggccaggctggtctcaaactcctgacctcaggtgatcyacccaccaaggcctcccaaaatactgggattacaggcatgcgccaccgtccccagccagcatacaatttttttatgtgaacacaaattttcatgtatctagggtaaatttctaggagtgggattgctgggtcttctatgtggttattccaactttgtgagaaactgccaaacttttccagaggccatgtcattttgcattcccaccagcaatgtatgagagtgcagttgctctgtatatgcaccagcacttggtattatttttacccattctaacagctacatagtggtttcttatcatggctgtaatttgcatttccctaatggctaatgatattgagcatctttcatgtacttatatttgctatctataggtggtaccaagtgaactgcctaaatctttcaaatctcgttttctaaactgggttgttgtcttgctattgagttttgatacttatatattctggattcaagtcatttattggctagatgatgacttgcaaatattttttatatttgctgtttttttttcaatcttttaactgtgtttttttttccagagcaaatctttttcattttgattcagtctagtttaccagtttttttctttcatggttcatgcttttggtatcacatctaagaactcttttcctaacccaagatcgcaaatgttttgtcttcttgttttatagttttacattttacatttaaaactatgatcccttttgagttaatttttctataaagtataaggtataagtagattttggtggggggagagtatgtgaatgtccaattgttccaatcccatttgttgaaaagattatcctttttgcattcattgtttttggacatgtcaagtatcagtttaccatatttttatgggtgtatctctggacttgtttctgtttcataggtttgtggctagccttttgtcaatatagcactaattactgtagctttatagtcattcttaacattagataataggagtactccaaattattgttctttctcaaaattgttttggccattctagtttgtgtttccatgtataattcagaatctgtgtgtgtgtgtgtgtgtgtgtgtgtgtgtgtgtgtgtatctatatatctatatatataaaacaaatcctgctgggattttgactggacttttagaatccatttgtcaatgtctacagaaaagcctgctggaattttgccgaatatacatgttaatttggggaggactaagaatattgtctttcagatcatgaacagcatttgtctgtttgtttaggttctttactttttctcagtaacattttgtattttycacgtacaacgtacacaatacaaaatgcagttttccttcatatgctttgttaaatttatccctaagtgttcatgtttttgatgctattgcaaatggcattaatttcatcttctgctaagtttgtagaaattactttttatatgtcacttttatatgttaagaccttgctacaattattccagtaaattttttttggggggaggccatataatctttaaaattttctctatacaattttgtcatctgcaaataatggcagttttctccttctctcaatctttatgctttgtatgtcttcccttcctcatactcagtgggacttccggtaaaatatcaaacagaaatcatgagaatgactattgctgccttgctcctgtcatagggaaaaagtgttgtctttcaccactaacattacttttgaggaaggccttcctattaatactttgctgggattttaaaaataaaaaatggtattttatcaaaattttttttctgtttctactgaggtgatcatctgattttttttatgttaatatagtgaattatatctattgtctttggaatatccttgaatttctggtataaatccactcagtcatcatgttttatccattttacacgttagattcaatttgccaacttctgggtctatgttcatgagggatattggcctgtggagttttgtcttcttggtaatactggcctcatatagaataattcgggaaatctttctttcctctttctctcttttctgaagagtttagataagactggtattacttcctcgtaatggccttggtaagagttctctagtgtagccattagggcctggaggtttctttttggaaagatttacaatttctttaattgatgtagggctatcatttttttcttgtgccaattttggtaatttgatattggcataaaattgtttatattattcctgtttgccttttaaacgtatatagatgtcataatgcccattacacatcttaatatgtgacttttcttgatcagtctgtatagagatgtatctattagatctttttaaagaaccagcattcattctgttgtctctatcgtatgcttcactgatttctgttcttacctacttctgtctacttattttgggtttaatttgcttttctttttttagcttaaggtgaaagcttatatcactgatttaaacttttcttcttttctattataagcatttaagtatataaatttccttctaagctctaaaactaatgcatttcaaaattttgatgttttggcttttgtttagttgaaactatattttaatttctcctgtgattttcttctttgtcccatgggttatttagaaatatgtttagtttccaaatatatgaggcttttctagatattttactctctggggtggttagaaattgtactgtgtaatgttttaagcctttgaaatctgctgagactaccaatagtctatcttggtgaatgttccatatgcacttgataagaatatgtaatagttgttgggtgtagtgttctgtgaatatcaactcaagttggagcataatgttgttcagaacacgtattttttctttgactattctagtaatgttttaagtctccagctatgcttgtgggtttgtcagttttaagttgtgtatcttttatagatagcatatagtgggtgtattttttaaaaaaataatagactgtttttcagagcagttttaagttaacagaaaaatggagcaggaagtagtgttcccacgtatcctgtgtatwmwcmyryrcacacacacacacacacacacacacacacacacgcagcatctcccactagacacatcgcaatcacctgaaatccacgttattttagggttcattcctggtgttgtacaacctatggtttttgacaaatgtatgacagaaatccattattagtatcatatagaatagtttcattgccttaaaaattgtctgttccacctattcatctcagcctcttccataacccttggcaaccactggtctttttactgtctccagagtcttgccatttctagaatgtcatatagttgtaatcatacagcatgtacccctttcagattggcttaacttagtaataagtatttgaggttcctccttttcttcccatggctggattattattttttgaggtggggtcttgctcagtcacccaggctggagtgcagtggtgcaatcaatcttaacttaccacaaccttcaattccaactcctgggcccaagcgacctcggcttcctgagtagttaaaactgtaggtgtgcaccaccatgcctggctartttttttcatatttaatttttttgtagagacggggtcttgctatgttgcctaggctggtcttgaactcctgggctcaaatgatactcgcctcagcctcccaaagtgctgggattgtaggcgtgactatgcccagcctaactcatttatttttaatgctgaatatgttccattgtttagatgtgccacagtttacccattcaccaagaaggacatcttgcttgcttctaagttttcaaagttatgaataaagctgctacagacatccatatgcagatttttgcatggatttaagcgttcaacttattgggtaaataccaagaagcagaactgctggatcatacagtaagaatgtttcactttctaagaaactgccagactgtcctcccaaggtaaccgtaccattttgcattctcaccaacagtgaatgagagttctgttgcttttgccattatctcactgtttaaatttacaattcctgaatgacatgatgttgaacacttttccatacgtttatgtgccayctatatgtaagaagacttccgtgaggtgtctgtccagatcttttgcccatttttcaattagcttgttcatatttgtattgttgacttttaaaagttctttgtatactttagataacaatcttttatcaaatatgcttttgcaatattttctcccagtctgtggcttgtcttctcattttcttgaccatgtcttaaacagagcagttttttagtgaagtccaacttatcaattatttctttaacacatcatgcctttggcactgaatctaaaaggttgtcgccaaacccaaggttatctrgattgtctcctatgttatcttctaggagtcctattttatatttaggtctatgatccatttcaaattaattttgtgaagggtttaagaactgtgtccagctttttttttttttttttttttggcatatggatgatttgtttgttccagcactcgttgaaaagactatgtatgtgtggtttggatttttaaactagtctgatcatctctrcctttcaattgttwtttttagtccattttctttcaggtaatttttcacatggaaggctttttcatatgttggttttctaattgtccctccccaacccccaatgttcttcctttcctgtcttcttctgggttaaacgtatctaattcctttcctcataagtcatacttgcattatctctttagtggctgctctatgttttaaatcttttccctccatttttcagattggacacatctatagatttatgttcaagttcactaatcctatcttttccaacattcagtagtccacacaatgaatttttcatttcacatcttgtacatttcagttactgattttccatttttattttacaatttccatttctctgagattctttttttgttcactagtttttcctttattttcttgggtatacttaaatagctactttaaagttctattattaatttctattaagaaatgctgggtcttttttttttttttcccttgattatgggtcagattttcctgcctctttgtatggctagtaattttttaattgaatggtaggcattgtgaataataccttgtaaggcatctggcttatgttatcttcctttaaatggtattgttttatttcttgttaaagaggattatttctgtttgaacttagtcaaatgtggtccataggctggctatttttgtaaatgaagctttattggatatagccatgcccatttgtttaatattaatatattatctggcttcttttgtgctataatagcagagctgagtagttgtaacatagaccctatgtgtcttagtccattcaggatggtataacaaaataccagagactagtatggagtatttakaagactgggtgtttatcaatcagtcacacagatttatttctcatggttctggaggctgggaagtccaagtttaaggcatgagcatatatggtgtcttgtgaaggcctgctttgtggtttacagcttttcactgtggcctcacatgtcagtaggggcaagggaactctctggggtctcttttatgagagcactaatactctaatatcatcacccaaaggccccacctccaaataccatcacgttggggattaggtttcaatatatgaatttggagaagccacaaacatcctagctcacaagcctaagtcatagccctttaagaaaacacttgccaaaccttgtttagggtatactactgattcctaaggtgtcgcatttcttgagtagtaactaaataygaaagtgttcaatgagattgctccactcaggctgcaattccaaggattctaagtactgtataacttctggtgtcactgttcaactcttaagtcctagaggaagtaatcgtttgctaacactttgcagatccttatcctggacatgcacatcccagtacccttgmcaagtctcatgcagatttctgcctctcttcccaatcttgaactctatcttataaattccagctgttttagtaaccctaacctctgttgcatcagagttgccactctctgactctcctggggctcaactcccacggtaatgctgggagatacccccaggtagaatcccacaatgaccatctgtgggatttaacatcttgtgtttttcttctctcagggatcacaatccagtgttgcttgttgctctatgcctgaaaataatggcaacatatattttgtctggttttaaaactggttttggcaaatgcacaaatctggcactactttgttagggtaagaaaaagctgcttttgcaaaacaaaaggtcttaaaaaacagaatattctgatggttccactgatggttccactcacagccttttatttwtctgacactcattgagttctccaagtaatttttttcaggttaaccatgtccaattcccttaaccatccctcacagtaaaaactagacactatgaaaaatcataacatgctgatgattaacaaccaagacagtccccatcttcagttcaggctagtaaacaagacagacaccacacataacttgtttcccttttaaaattaacatctctgaagtatgcagcgtgaagcagggcatacagaactaaaggtaattaaaagcagaagactgcctttcctttcttaccctcatatcactcttattaggggtaggaacagatgtagtattatgagaarctgggtagaatttatagaataatatatggtggtagacctggcaaacatcacctcctctggacatccttaattacaaactattaaaaaatgaattagatgcacgcaagcttttgccttaagatcagtggtttcaggccaggcacagtggctcacgccagtaatccaagcactttgggaggctgaggtgggcagatcacttgaccccgggagttcaagaccagcctgggcaaaatggcaaaaccctgtctctacaaaaacttaggtaggcatggtgacttgtgcctgcaggccagctactcagtgggctgaggtggaaggatcacttgaacccaggaggtccaggctacagtgagycgtgattgcatcctttactccagactgagttaacagagtaagaccctgtctcaaaaaaaaaaaaaaaaaaaaaaaaggtgttttcagaaacagattttatgaatttttagagctatgtttttagtcccaaaactaagatacaatchgggaccattaatctcattcatagagattacctgtgcttcttacactcagtcctctttaaaatgaagctgtcttgtattgttttagttatccttaagtcccttaagaggagttcattctgtgataacacacacttgggaggcttagaaggcacatcacaagcattgtcatctatttattgaccaaacatcaaacaagggtaggaatgagacatttaggaggaaaaacctttaaccttaatctgagcttctgtacaatttcacagggaacagtcaataggtggctttgctatatgtaacctatattgtttagacgtggcactagagtaaagccaacattgtttactactctttgagttgtaaatatgtgaccaggggataaagccagactctaacagtagtccaagatctgtaggttcatgaggtttggggaggaacaaaattttgatgtgcttgttttgcttgacagtatagatcaggactcagcaaacattttttgtaaagggtcagatagtacatattttaagctttgtgggccacatggtctgtcacagttattcagttctgctgttgtagtatgaacgcagccatggacacatgtaaacacgtgagcatggctgtacaaaaataggtagctggaatttggcccaatggtttgctagcccttggtatagataaatctaagctagcaaaaattgaattgttttggtatagataaatctaagctagcaaaaattgaattgttttcagttttataaaatatgcaagatcttgaaaaaaagttttcctattttgcaagttgccatttttattgagtgattatctttttcttctactgataagataaagctgtttgtttttacctcagatttcttccatgtgaccaaagtgatgaaaggatttttacatgccactcaatcatacactattttgcattctgtaacttcaaaatgaaacctaccttctcttgacargtaaacactacacgtgaagagtggtgaaagggaacattgattactgaagtgccctggagagggaaagcactggtcaacatcacatggacaaatttcattgttttctaaagatggcctggaagtagtctttgccactgcttcctccacaaacagctcttcataacatgggctgcatgaaatcaaagcaaactttcccatttcctaccatatatgaaggtgagaagcagcatgagagtgaagaaccctttatgccagaagagagatgtctacctaggatggcttctccagttaatgtcaaagaggaagtgaaggaacctccagggaccaataytgtgatcttggaatatgcacaccgcctgtctcaggatatcttgtgtgatgccttgcagcaatgggcatgcaataacatcaagtaccatgacattccatacattgagagtgaggggccttgaggctgtaggatgacaacactttgactgtggaggtgctagtttgaataaatgtgacaaaagcaaaaactggtgtgaaaaagtacaaataactatctggatttaaaaatgtgtctacgataatgtcactattataagaacaactaggatgaamtgcattttaagtacttctatgttaacagcaatttctgtttagtcttagattttagtcatctgaagggctgaacagaggtcctgtgacacccaataatcagctgaatgtcacagcacttcttcctaagtaatggcatcaccaaagaaaatgctaaggaataaaaactgccccaaattccaatggttgaagtttatcctttaaaataacaatttttgtttgtttatacccaaaaaaagtccagatatgaaaagggcttttctaaaatttcttggcgagggaatggcactcaaatcatagtgattaacagtaagtyttgtttgtttgtcaaggatctctacttcttgacacaaatgaaccctgtctttaataagataagatatttatttttgtagatgagaagtgtaactaccaccttggacctcagggccctaactaattacagctgttactggacgactcagactttgtgcctaaagccatcttagagataacagtttatagaagccatgacattagtgtttattgcattgaattaagcccagtgatataactatacaagaaaacaagtakgggtaccttttacaaagagcaatccaataaatcttaaaaataacagaaacttagtctgcaaggtagaaagtttcagttttaattctgtattaagctttactatctcagaggtacagagggctggaatatgggcatttatttccagttttttcttgactagtaaggcggtcaccattaaaatagaccagataatgcatgaagatttacagttgtattgcaaaacggaaaagataaaactgtcctttgaggagagtactcgttttctgggtttttgttattttttagtggtaacacaagcctatagggcatttatagccacctattatactgtttccataagcctggctaccttttagggaagctattttttctctttcatttttactgtcacagcacatacacacacacctttttgttttaaaggattaagtactgtttgaagatcagtggtaacagaaaatttgggagggagaagaagaaattaagacatgacttgttagaaaattaagacttcagtttctagaattatcttttcatcaagatttggtagacattgagtttaaatggaaaggaaattatttaagcctgtgtatgttagatccacaatacaccattggtattgaaatataaaggttaaaaaaaaggcttatgacctctttaatgagataaatatgtatttgtcttgtaagcaggcagaaaatctacctctaattttaacactaatactttgaaacccacaatcaaatagagtgaattctccaagttacataagcaaggaaaacattatttgaaatatgccatgttttcgttgcctttggacacctcatcattcaactctaattttaccgagtcccgggatttgtactgtcccattgtacttgcaatctacaatttatataatagaaaaacaaccaaacccattcatacaaggatctgaagttataaggttaagggcagaaagtttcccataagtataaaacatttccaggtcatgaagagtagtttaggttgagtgacaaaagcctaggtgtggttgtttttcattcattttgcatctcacaccaagacatttttgctgcaaggtcatttgctgcttaaaatgtacaattaggtatataaaataagtacaatggtgaaaacacaaagccaggtaaagcagcatgccccactaaacttttcagtatacatagggacagacaagtgagttttggttgtatctaaatattttaatttcaggttccttctgtgccctgggccactatttcccaggggtgtgacagagatgcctgccagatccatatcaactagaagtctgatttctgttgctgccgttcctcagcaactatggcagtatacttttatcaccaagcaccactcccttgtccctgaatcacattttaatagagtacaatatcttctgtacaatatttctgaaacacttatgtctgaaatatatgctgtattgtatgttaacccatgacatatatgaactacaaggcttgcataatcagtgagctagtggataaatcaagacaggagcaaatgggagaaagatgaataaacaaatgaaaaaagatgaataaatgaataagagagatgaataaacaaatttacattacatgtgatagttatcatggtatggccttcatgacaagatggatgagaatatcactgataggatattagccttctttcatatctttatattgaaatatgggctttacttcaatttgaaggtctttcatgaacaataaaagagagtagaaggactgtctgagaaggcaggagacatataaaacagatgactgaaagactgactagctcctggaaagggaaacatttggaacatccagagtaagggcaaatgggcttctaccagcacaacaaagagcctccaggtggcaacatggaagcaggttatcagagaaaataaatgtgcaaattccttatttacaatgactcacttaaccccacaaacatgtttcactgctgccttccccagttgtcgcttatgtactgttgttacctttcagttacatgcctttgatcctaaaattctctacttttgttgccttatcagttctttgcaatctgcctgtggttatcagcacttaaagcacaattttgaaggggaaaaaaatgataatcaccttagtcccaaagaaataatttgtcaaactgccttattagtattaaaaacagacacactgaatgaagtagcatgatacgcatatatcctactcagtatcattggccttttatcaaatggggaaactatacttttgtattacatagttttagaaatcgaaagttagagactctttataagtaatgtcaaggaacagtaatttaaaaacaaagttctaacaaatatattgtttgcttaatcacaatgccctcaacttgtatttgaataactaaataggacatgtcttccttggagctgtgggcattagttcagaagcactacctgcatcttaattttcaaaacttaagttttattagcaaatcctcttctctgtaagacttagctatgaagtggtatattttttccaaatatttttctgaaaacatttgttgttgtaactgcacaataaaagtccagttgcaattaactagtgtgagctcttatttaactgaagcaaatgctttctgacagtgtgtactttgaattttttaacaatataaaagacaacattttctgcattgttaacaaatatagagaacaaaaatccatttatacaaataatttcttggatcattcaggtccaatttaggacctttaagagtataaatgtaaatgtatccgatatcatggcatctttattccagatctgttactgaattatttgaaagaaaaatgcttcacataaaacagattaagaactgagaaaacataaagcaataccttctgggctgccatttcctcatctatgagaagggtgcaggacatgatctttaatgtctttttcagttccgttggctttttattcttacaaacctgaagttcacttagtttctaaagagtatgggatgaaggagaaactataacaagttacaaaaaatttattttgtttataaacaaaaattacaaacaaaaaattataaattttgtttgttaatttataaacttacctttaaaattaaacaaaaattacaaacaaaaaacaaaatcataaattttgtttactttgttaatttataaacttacctttagtttaaaaattattcttgcctagaactttaaggttctgagtctggaataccttttagttctttcataccttaaaaagtacttacttcattaacaatatcaattattgaatatatcttttgaacaaaagtcttcttgctttcaattaatttttttctcctgacttgaaccttgtttgtaaggataattatcacacaaaagtcttacgtaaattataaaaaaacagagtgtctctatctaagagattggagtttcctaatttctcattctaccagattaacaaatatcacaaataacaagaaaataatcctttcagtttcaccatgggatggtattctgattattttagggaagaccaagtctgagttaatactgaagagggacgttaataaaaatcttttctctctgcccaaggtttctaatgtttataaaaggagctcttctgctacagtaactcagttactttaaaacacactcatatatggagaaaattctatgaggcattaacacagtatccaaaacaaaaattctatgaggcattaacacagtatccaaaacaattttcagggtctttattttttatattgtatacctaagttgatttcatcaacatacaagccaaacgaagatcccatttcaattagatataccactcaagagaatctccaaagatcttcacatttttccatcttctaaaacaaggattgacaaacttttttctgacaaaaaccagacagtaaataattaggctttgtaggctttaccatctctattgcaactactcatttcaaagcagccacagataatatataaacagatgagtatagctagttccaataaagctttatttgtgaattctgataattttcacgtcatgaattattagtctttgatttcttttcccaaccatttaaaaatgcggaaaccattcttagcttacagggtatataaaaacaggcagcaggctggatttggcccacatgctgtagattgccaacccatgctacaaaatataccttaaaagcctgtcacctcaaaatttcaaatcactgcttcccaaagacttaaagtgattattcaaatcttcctcagtaacttcttttagatcagctggtttccattttggactctggtctttatcaattaaaactgtcaagagaagatacaaatgttaataccattatttttgtctaatattgctagattttacttactgaattgacagaaattcttatactaggcacatttttctatcatacttttttcctgcaaaatttttatatgtattctatttttcttttaaattaaatctccagggatggacagcaatatacttttgatgactggggtggatattttctaacttcctaagcctcatgtcttagctttaataaagcctactgaattaatccagtggtttaaacattagaattctttttttcttcttgaaataaaattgccagtgaaacctccacattacaaaacaggtaaaaccagtggtttaaagtaaaggcaggggagggcagagggaccagatgtgccttctaacctcctccacattgaattttgggaggaaattaattgcttaaggtagagaaaaggggacttcatgcataattaaatgtggatactgttgttctgctgaatcctccagttcagacagctctggatttaaaaaaatcaggttatcatgaaaccgtctagttctcctatttcagtgtagtcatcactcatcatagccacatagtatccccacaggattatgaggcaatctgtaacttctccgaaaaaaaagggggaggaatgtccagtatactgtagttacacacacgttatcatttgggagactgggtggaaggtatgcaagatctctatattatttcttacaaccgcatgaatctacaatgatctccaaattttaatgttatggttgtggcagcaaatttcaaccatgcttaaaatgcacataattcttgtgaagaatggaaatatttaaatgtgcaaactatagtgaactagaaaaacctaatttagcatttaaaggctaaaatagttaaagaagcagtatgggaaccaaggaagaagactgccttggtaggtggagggaagcttttacatacaattaaatgcagatacgggaggtttgtttttaagatttaactgcctactatgagattctggtatcagatcagtggcgatattaaatactgatgttctgatccctactatttgaaagttttatattccgtggacagtgtaaacaaagaacaaccccggcacattttttccacaagaatctctctcactctaagtcttctggtcaatactacctgtctccttgagatcccactgaaggacaagagcaaagagactattaatcaaatttgttattttatttcaagctaacaatttttttactagaatacatacaagttcgtgccatgtaggcagctcaggttttgcaagtctcctgagatagccactacatggagtttgagtgggtatccagctccactaagatggtctttttttcttcttctataaccacaaagtagtaatttgttctagatgttaacagtaagaatttttaacaactgttaaatttgctaacttactttaacttgctaatatgtttttattattagcaaactgcagcaaacatttgactatgtaaagaacacaacagttttcaatctcagaacagacgctgctttctgaaagaggcggcaatatactttctcttcattaaaaagtagcataggccaggcgcggtggctcaggcctataatcccagcactttgggaggctgaggtaggcggattacgaggtcaggagatcgagaccatcctggctaacactgtgaaaccccgtctctactaaaaatacaaaaaaattaggcgtggtggca

SEQ ID NO: 97807 - DNA, 66419 bp, Homo sapiens
aaagatacatgtacacgatgttgagtgttctacaattttttttttttttttgagacagagtcttgccttgtcgcccaggctggagtgcagtggcgcgatctccactcactgcaagctccgcctcctgggttcatgccattctcctgcctcagcctcccaagtagctgggattacaggtacctgccaccatgcctgattaattttttgtatttttaggagagacggggtttcaccgtgttaggatggtctcgatctcctgacctcgtgatccacccgcctcggcctgccaaagtgctggaattacaggcgtgagtcaccgcgccggcgagtgttctacaatttcatttatgattttccttagtctttaaagtcacaagctgttttaattctcataaatcgttttaactcagttcagtttgaacactgaaggtctaggatgtgttggatgtgtaattctccagagcataaaaaaaacactagtgaggggaaatgctgtaagatttttagacgtcttgcacagtggcaggctaactagcagtctctaactagcttcgagagcaccagcagtggaaacgtctgtgtatatactcagtgcacactgaccactatgcttgcccttgagcacgttacagtttagcaagcacatctggggcaaagacctgcctcagagacaccaccataccaggatgttttaaaggagggacacacacatccccttgggaggcagtgaggaaaatgataaagccttttttttttttttttttttgagactgaatctcgctgcaacacccaggctggagtgcaatggcatgatctcggctcactgcaacctccacctcccaggttgaagcaattctcctgcctcagcctcctgaacagctgggattacaggcctgtaccaccacacccggctgatttttgcatttttagtagagacggggtttcaccatattggccaggctggtttcgaactcctgacctcaagtgatccacccacctcggcctcccacagcactgggattacaggggtgagccatcacacccagccaagatttttaaaagatagtttgatgtgaagacatggtttagagaccaagagtgcagagaaagcattccaactagaagacaccacatgaacaaaggcagagacaccggggcaagggtgagaaattctgagtgtatggcgagctctgtggttctcaagctcctcctccactttctcctttaaaaaacaaaggaaaggccgggcacagtggctcatgcctataatcccagcacttggggaggccgaggcgggtggatcacgaggtcaggagatcgagaccatcctggctaacatggtgaaaccccatctctactaaaaatacaaaaaaattagccaggcttggtggtgggcgctgtagtccgggctactcaggaggctgaggcaggagaatggcatgaacccgggaggtggagcttgcagtgagccaagattgcgccactgcactccagcctaggcgacagagcaagactccgtctcaaaaacaaaaacaaaacaaaacaaaaaaaaccacaaaggaaaaaccaccaccaccacaaaactcccaaaacaactccacatataatgatgatttgcgaacacatttctaaggccatacacagatttggctggatctctgcccccaaaactgcaggccaacaaagcacacaaagctaactggcatggcacaaattactgttgtgatatgaggtagttttgggggccagtgccatgcactgcatgtgcctatagtcccggctacttgtggaggctgaggtgggaggatcgcttgagctgaggaattcatgatgaccctaggaaacatagtgagatcctatgtaaaaaatgaaaaaacaaacaccaaaataaactaattttggggttaggcagcaagtacagccctctacagaaagggaggaagtgattaatttttcaccaacttcagtatgccagtattagtaacaacagctgcataaagagttaagtgggagtttagattccagaagttaaactatgaactcaaaagcctggttctgcagttggcactgaggctcattactcaatcaccgtacccgaatcccggccatctgctgaggctgcaaagtgaagcaaaaaatcctaacaagaaattgtatgttggctaggtctctcctgataaaagatgaatattgttaatatcaacaatactcaaccaaatacaagatgcaggagcccacatcataagtagagcctctgactgacaaaagagggtcaggcacttggaacagtttaataattgaatagggaaatcaacaaggcactttgaaagaaattaagtggggagctgaggcaggagaatcgcttgaacgagggaggtggaggttgcagtgagccgagatcatgccactacactccagcatggtgacagagtgagactctgtctccaaaaaaaaaaagaaaagaaaagaaaagaaattaagtgggagagaggatcaattttttttgcagtaataacttactttatgattgtcttgttaaagtcaggcatcaaattgggcatgtctaaagtggcaatctacattctggcagaataattacaaagaaaagtcacttgatttagaaggaacaaagaatcaaataatttgcagttatatttaataattttggtcatagttaaaaatttttaaattctatttttaaaagataatattctggccgggctcggtggctcatgcctgtaatcccagcgctttcggaggccaaggcaggtggatcacttgaggtcaggagttcgagcctaaccaacatagtgaaacccccatctctgctaaaaatacaaaaaattagctgggtgaggtggcacacgccagtagtcccagctacttgggagactgaggcacgagaaaagcctgaacctaggaggcagcagttgcagtgagccaagattgcaccactgcattccagcctgggcgacagagcgagactctgtctcaaaagaaaaaaaaaggataatattctgatgtatccttcttttgtgccatttatggtaaaaaatttgggtacccacaattgaattcacttatgggtttttttttcattctcttcaggtgtggcagttgggtgggcagggagtaattaacgtttactgaaattatgctacttggtgatctccaggaatcatttagcaggtggtttaaaatcctcacatttaatgctggttgagcaagagtgaactgactgtaatgacccttgggaaggtgaattggttacagacgtatagtaacgacactgtaaagatagtccaggcaggagatgacaggtctggagtagagtggtagccgtggcaaagtgacatttaatttccacgaagacagttttaagggagactgggacatcggaagaaaaaaggggtgatgcagagctcaaatctgtacacgcttgtttgaggtgatagcagacatccagatgaagaaaaccagcagacaggtgaaaatcttaatctaggatgattagtcatgctatggattcagagaaagaaatgtgttttttcattacttcattaggaattgcacaataaatctcctcccccataatcacatgactactgacttttcagcatgcaggagaaaaagcaaatatttccactgttgaaaggttttattggagaaacttgatgaatacaatgacttcatggcttagtgaagacaaccacggtggttaaaatacagtgaaccctcatttagctgtatccattcaaagtatttgagcatctcctatgtataatgtcaatttatttgatgctggttaaatgtgtaacaagttacttaaaaccaactgtaataccaaaaagtcattgaacacacttctaaagtatactgcctgaataaaaggtatctataaaaattccttccctgtagtatctatatatttaagcttacaaacttagctgcttttctacacacaactgcaattctatattaaagctttgcaactgccttaatctctacactcttttttttttttttcccgagacggaaaaaaaagagtctcgctctgttgccaggctggagtgcagtggcgcgatctcggctcatcgcaacctccgcctcccggattcaagcgattctcctgcctcagcctcccgagtagctgggactacaggcatgcgccaacacgcccggctaatttttgatattttagtagggacggggtttcgccatgttggacaggctggtcaaactcctgacctcaggtgatgcgcccgcctcggcctcccagagtgctgggatcacaggcatgaggcaccgcgcccggcctatgctcaaatgtttcttgggctgttaaagtactgctcctcgcagaagggctatgttcccgggatctattctcttccgtacattcattcctatcttcattagaaaacatctgacctaaataaatcccccatcgatgctaacatctccttccgcgcaattttttactttctaagtcaaatcaaaacaattatttgagcgactgctcctgtctgccattaagtctttctggcaccaccctccagacatatatacaatattgcttctttccctcaaatcagaaaggactgcatagttccggatcaaggcataaatgatgaatcatgactgtccatccccaccaacatactctgcaacattataatctatttacctctgctttgaaaatgtattctttaaagcactgcttccaactagccacttagccagtaacatttttgagaaaaacaaaacacaacccaaaacaatgtatatattcctggggggaagagtttctaactcaaaatacgcagataattgtttattattctaaggaacacccttctgaagaggcctgcagtcggtggggctgtttctaatttaaaactacttaggtgaaccaggaagaatgtacatttaaggagatacttttagacgcagatgcctcgcgcaagcctaaagctcgtgtggtaagcgacacgactaggggttaaaagcggctggttggtaggcccggggccgtggctcacgcctgtaaacccagcactttgggaggctgaggcgggcagatcacctaaggttaggagttcgagaccagcctggcaaatatggtgaaacgccgtctctactaaaaacacaaaaattagccggcgtagtggcgcgcgcgcgctctcagctactcgagaagctaaggcaggagaatcacttaaacccaggaggcggaggttgcagtgagccaagattgcgccactgcactccaatctgggcacagagtgagactccgtctcaaataaataaataaaagcagctagttacttctcattcttttaacgaaacaaacaaaactgaactttgctgggtgacaggagtgaagcaaaggaaaaaacgatagtacaagttcgattcgaattcttccagtcttatgattcgatcatcgcaggaatactgataaaaatctgcgttttttccaggttgacaacttttgcgaggccagactaaacgaattcagcgctccaaggagactcctctttcctctgctttctcacatttacctctcgccttttacctcccaaagtcgaaccctccaggatcgtacaggcggtattccctctaccaagcattctactcctctgcagatgctgcaatctttacactggaactaacacttagctgtggtgttccccgctttctttactcggagtagcccaggctcttcctctccaatccacaatttccctccaatccccagtttccctcttgggcgcctggacgcgtgcccagccgcagcctgggagacaccgcgcggctgcacgcaccatgcagatgtggtccctttccccttcttcttctcctccccaaagaggttttgtgctgtgactggcttgccccggttacttactccaaggtgtaggggtgaagaacggaagaggacgaaataactagctggaggcagcagtgtcagccgatgccggtgccacggctcgaaacaccggcgcctctcgcggtgctaaaaggatgggcgcgcaccctccttccggcatccgtagaacccccgcctttgacctagcttcaggagattactttccgggtcagcgtgcgtttagggcgaagacggagttgtaaacttcttaaaattcctctctcgacacttcggtaattcctctttcgagactaaagctctttttgtatgcgtgtgtgtcaagcgtatgccccgggattctcctccgcttccttttctcggtcttccttcttgctttagggaccggaagagtccttgaaccaaaatagctcggcgggcacttccggggccggcgcccagagttccgggagggtgcaggcaggagagggaaaggcagcagcggcggcagctggaggatgaagaaggagcatgtgcttcactgccagttctccgcgtggtacccgttcttccgaggcgttaccatcaagaggtgagatgggagggggttcgcccggtcgaccggcaaaagggaactgcgacttctgagcsaatcttactgctatccaaaaaaatgcaggccttctagcgactgcatgggagggagtgtgtcgagagggaagtacatcagcaattgtctgcgtcctgttgcgagccagcgagtgtgctggctaggagggtcagttgtggttttcagtgagggtcggaggcgggaggaatagtggattaacctagtttaggcttgggagttcaccaccactacttttagaatggccccaggcgcaaggtgatcactgcctaagtgcactcggagaattaattgcttttcgccatcaccccagaggatggagattgggaaggtgaaaggatacgtaattacagttagatacgagaacaagttcacagatatgtcgtacagcatggaggctatagttaatgacgatatacgtattcttgaaaaacggagagtggatgttagtgttctcaccacaaaaataactatgttaggcaatgcatttgttagctaaatttattccacagtgtatatatacttaaaaacatcaggtaggcggcaagtattaatatatacaatttcatctctcagtttttttaaaggcgttgatagaaaatctgggctttgcacttaactgattttctgagccaacatttcagtaattgctgattcattatatgatggtttcattcaataaagatcggatatgtacttgaaaatgtgtaactggcttagaatggttaaaatgtataagaaaagtttcaagttcttaaatagtrttggaatgtgtggtagaaccttagattcattgtacttaacaatttcgcttgttagctttgtaagagtaaaatacttaggaaggcttatttgtaatcagcaaatagacatattaagaaagaaaattgagtggtttatgaatagaatttaaaattttaaagagacttttaagttgcaaagtttcgcttgaaattgtttaaaatttagtagattttcaaacgtaataagatttgttagaagaaattaaaagcctgaagaactagrttttttttttttgagacagagttttgttctgtcgcccaagctggagtgcagtggcagcgatcttggctcactgcaagcttcccttcccgagttcacgccattctcctgcctcagcttcctgagtagctgggactacaggcgcccgccaccacccccggctaattttttgtatttttagtagaggcggggttttcaccgtgttagccaggatggtctcgattgcctgacctcgtgatccgcccgcctcggcctcccaaagtgctgggattacaggtgtgagccaccgcgcccggccagaactagatttttgaatgtgaaattgtacctttgataaatcaaatatttatttttaaaaccgaagtttttgctctgtcgcccaagctggagtgcagtggcagtgatcttttatttatttaaaaataaataaaaatacttatttttaaaaccgaagtagcccatgaatactcttttttgtgcaaaaaaaccatttgtaatgtgccaaaaaaaacttcttccataaataaatgagacatgttataagtcattgatgttctgttaacttcgggaaagcaggctgtaatcttttccactttttgaagatgtatatgcctcaaaatcaaaataataccagcactcttagggatctgtggtagggctttttgataatttattatttcaaggtaaaaaacaaattatcccataagtttttaagagacttsaggtatggctttgccatccttaattatgattacctgaaacaaattaagctaaagcatgcctagtttaagcagctttatatctctggtgatcagttgaatagaaagccagcaagacacatccaaaagtatcatgaattcttagcggtaggtgctcactgccaacccaagaatggtttccagatcttgactctacttctgccctctatctttagaaggtgaccaaatgctagtcatcttctagttgggtttgctgcatttcctgtgttgcagcaaatatctgctggtctctgatttcttaaagacacataaatgttgtgctcactcagaatccttttgagcttgttgctttcatactgtgatttccatctggtggtttggatttggctggtttttgtttactacaaagaccattgtggcaataagatgaaccgcagtaatcttattattctgatttcttgtctactgctaccaaatgtacatcattaacattttctactttatattaaaagaaagacaattccaaaattaatcaagtgtagasatttttctctctgcttatagttggtcttttaaaatgatgccttttttggtgttttttttttagtgtcattcttccacttcctcagaatgtgaaggattatttactcgatgatggaactctggtggtttcaggaaggtaaagtattttagaaaaaaatttcttaaactttatcataaagaaacacataaaatgaatgaattagcttaggcaccattctttccctttagctctttttctctcctagccaaaatgatgtgctgatctttgtctcatattccttctcaatgttcacttaatattttcaacattaagtacttttccctctrataattacaagttgtgaaattgagcagttcctttcatctctgtctttagaaaacagttatgatgacaacttttccttctgacggtagcagggtgggggaagtacatattaaaattctttgagatccttcagttttgacgattaaaaattcactgttgcaaacaggctttatcatctaattcctcaacattttcttccccacgattgaactaccgtggccccccctccactttctagaagctgttcaggtagtttccctatttatagaataaagggaagaagttactgtgtttcagtcttttggatgcaaacttgaaaacgttgaagaatcataggatttagtgaagttctcattttttaattcgagtctgctcagaagtcacgttatgagtgttcagccctcaccagcctttctaaaatagcctgacagtaaccctatgccctgacctcccttcatttttctgcataacacttacttccacctgacaattgttaattgttccattagaatgcagtttcatgaaaacagggacttggcccatttgttcaccccagctcatggaacagtgcctgatatagcagaagtgcttgataaacatttgttggatgaaggaactatagaaatacagtaagaattgtgtgttttcagtactactaactggaccccatatttttgcctgttgggtttttagtgtggttttctggattatatttctgtttttggtattcacagagcctcaataacctgaaaattattaatgtagcgcctcattaactttgaataatttgaggctgaggaaacagtaggaaagtcagataagtctcaactttaggatatttacagatatarttttttttgttttgtttttcttttgagacagagtctcgctctgtcacccaggctggagtgcagtggcgtgatctcagctcacttcaaggtctgcctcccgggttcacgctattctcctgcctcagcctccaagtagctgggactacaggcgcccaccaccacgcctggctaattttttttatttttagtagagatggggttttactgtcttagccaggatggtcttgatctcctgacctcgtgatctggctgcctcggcctcccaaagtgctgggattataggcctgagccaccgcactcggcatttttttttttttttttttttttaaagatggagtcttgctctgtcagccaggctggagtgcagtggctcaatctcagctcactgcaatctctgcctcccaggttcaagtgattttcttgctacagcctcccaactagctgggacaacaggtgtgcgccaccacatccagctaatttttgtatttttagtagggatggggtttcaccatgttggccgggctgtcttgaactcctgacctcaggtgatccacctgcttcagcctcccaaagtgttgggattacaggcgtgagccactgtgcccagtcagttttattctcaaatacgtgtacctatttgctttataaatgagcttatatataataagcttatgtaaatgagactataagtaaaatagcttttaatattagaaaataattggtaaatctcagtagtgtaaacatgttgaagagctcctatgatgattctccctggccagatgtttgcatggcctgtggcttaggcaagcactgatgttaaatactgttaaacagggctgggcgcggtggctcatgcctgtaatcccagcactttgggaggccgagttgggtggatcacctgaggtcaggagttcaagaccagcctgaccaacatggtgaaacctcatctctactaaaaacacaaaaattagccgggcatggtggtgggcacctctgattcctactactcgggaagccgaggcaggagaattacttgaacgcaggaggtggaggttgcagtgagccgagatcatgccattgcgctccagcctggacaacaagagctaaacttcgtctcaaaaaaaaaaaaagtactgttaaacaacacgatacggtgctttacagtaacccacaaatcacatagggaccctgcccttttggagttgacagttcagcttcatatttgtgaaagccagcatggcatggtgctgtttctttagtcagattgcgtaattttaagtaatatctttgctattttctagcccttccctctgtgcctcagtttccttgtctgaatattgggcaaatgacagtatagaacttactttgtagggtcattgcaaagatacaaagtgataatacataaaatgttcagtctaatgccmactatattgtatgctcttaaaacatggaactacttttattatcattgatctaagatgaacatagcaaacacacaagagaatatataatgaaaattgggataagtgctatgcagaaagtggggtggtcattacccttaaattgctgggagagctgaggatcgcgaggagggtcggggaatgctccgaagaaggatctttggagcctctgagatgtgaagattggaggaatgtagtcagttgaaggstgaagggaagaatcttccaggtggggggaacagcattaatgaaggctctaggcctggaagatcttgacatacaagaagcttgggaaaggtcatgtagctagagtatggggagtgagagaagggtaagtggcatgagattcacagttgatgacatgggggaggacagttaagattaggggtgtgtgtgggagtcatgttaaagatgctgcaatttattctgagaacgtcaggaaggcattgaagggctctgagcaagagaatgactcgatcagatttcagtttgcagctgtggcaggtgactgtggaaatggaagacgggttaggaggatattgcattkgactgggtgagacctgctagtggcttgaactaagatggtgacagtggggttgagggaggaagtgggtttcagaagattgggagcttgcaccttcagaacttgatgacaggaatgtgtcaagaattcctctcagattactaatagaacaactagatgaatgaagatggtcatttgctcaggttgagagaagcattgtctgtggagcctttttgaaacctcacaatctgttgagaattttgaaaagttagtgattttagrttaggttacttctacagataaaaacttgaaaattttaagtataatttaaatgaggtacatttaygataaaatgtataggtcttaagtgtacaacttggcgaatgttgctaaatggttacacctgtttcaccgtcactccattcaaaacatggaacactttcattccccagaaaggtttctcttgtccctttcttagttcagtttcgtcagttctagaatttcgtataagtggagttatatagtatgtattcttttatgtctgtgtaagtggaaaaaatgcaaaccgtttttcctctgctctcacaccacaacaatcaacacagaagacctctgtgaccacatgtgtggggttttcttcccaccaagaagcaatcggttctgcagcagacaccagctaagggtcctccagtccaattcagttgacactgtctaccyggaggagcatcagatcccacaggttgaggctcagtctcacaaagactgccccccactctgatgtcagctgcaagccccaggtgcctctacctgtgcarctgaccaggcggctagaaatgagggtccctccttgggtttgattcatttgctagagcagctcgcagaactgagggaaacatttacttcggtttaccggtttatcataaaggatgttacagccctggtgtggtggctcacgcctgtaatcccagcactttgggagcccaaggcgggcggatcacttgaggttaggaatttgagaccggcttggccaacatggcgaaaccacatctctactaaaaatacagaacttagccagacgtggtggcgcactcctgtaatcccagctactcaggaagcttaggtaggagaatcacttaaacctgggaagtggaggttgcagtgagctgagatcgcaccattgcaccccagcctgggcgacagagcgagactccgtctcaaaaaaccaaacaaacaaaaataaaggatattaataatggatacagatgaagagatgcgtagggtgaggtgtaggggaagggatgcagatcttccatgccctacctacacgtgccaccytccagaagctccatgtgttcagctatccggaagctctttgtacttcacaagaaagtgggagatggctgtggaggtctgccatggaccctaattcttcatgcctcatcctccattacttccacatatagtacatgcctttctttccagactctataaggtatagtcttgtttacagttagaakttagcacatagtctgggttcaataaatattggttgaatgagtgaatgaacatgcttatcctactttctctccatggtaacctctactgagttcagtgaatagaataggccaagtatgatgactagtttaccttgtttgccgactcagatctaatggtaatggtttcctggagtgatatgtagaggattctgaggctgcatccaggrttcggtgagaaagcatgcttggtttgattctcgttgcctgctgtgggtgtaggaaaggaggctggcaatgtgcttttctgrtagagacagtgattcaatttcactgaacagttattgcatgcctagtatgagatgggcaccaaggaaacgggcaccaagcttgatactagcgtaacaagatgagcagggcatcctaccgtaggagtctaggcttattagcaagtcaaacataaataaataaataaatgtcttgagttgtgttgcgaaaaatgtttttgaataaaagcatcaaccagctgtggtggctcatgcctgtaatctagcactttaggaggcggaggtaagaggatcacttgaggccaggagatggagaccagtctggccaacatagtggggccccatctctacaaaaaaataagaaattagctgggcgtgttggcacacacctgtagtcccagctgctcaggaggctgacacacaaggatggcttgaacccaggaattggaggctgcagtgagctatgatcatgcctctgcactccagcctgggcaacagagcaagaccttgtctcaaaaaaaaaaaaawaaaagtatcaggtattctgataagtaatgtatttggggtttaattaatcactgtgagctggggtcatccagaaagtgtttacagtaaggtgatacttgaactgagcccacacactgggtctgacgcaggtggtacctcccttccaggcactaatcctcattgtttcttcttggtcacgagttctttcctgaccttgtctcccttaaggctgaatagtaaaatgagttgagcatccctaattggaaaatctgaaatctgtccagatgggtgctgagatagtgacatttttgctttctgaatattgtataaaattacctttgagccatgtgtataagatgtatgtgacactgacacataaatgatttttttwaattttttaatttttagtttttgtgggtacatagtgtacatatttatggggaacaagagatgttttgatccaggaatgcaatgtgacattagcacatcgtggagaaaggggtgtccatcccctcaagcatttattcattaagttgcaaacaatccaattacagtctttatttttagatgtacagttattattgactatagtcactctattgttctgtcaagtagtaggtctgtggtcgggtgctgtggctcatgcctgtaattccagcacttttggaggctcaggtgggyagatcacctgaggtcaggagttcaagaccagcctggcccaacatggtgaaaccccgtctcaactaaaactacaaaaattagctgggcatggtggcaggcgcctgtaatctcagctgctcaggaggctgaggcaagagaatcacctgaacctggaagatggaggctgcagtgagccgagatcgtgccactgcactccagcctggatgacagagtgagactccatatcaaaaaaaaaaaaaaaaaaaaaggtcttattcattctttctactttttttggtactcattaacccccacctcctcacagtcccctactacccttcacagcctttgctaaccatctttctactctctatatccatgagttcaattagtttttagatcccacagataagtgaaaacgtggtgtttgtcttcctgtgcctggcttacttcacttaacataatgatctccagtttcatccattttgttgcaaacgactggatctcattcttttttaatgactgaatagtactccattgtgtatatgtaccacattttctttatccatcatcagttggtgagcacttaggtggcttccaaatcttagctattgtaaacagtgctgcaacaaacaggagtttacgtttagacttgggtcccatccctaagatatctcatatatatgcaaatactccaaaatcccaaacacttttgaccccaagcattttggatataggatcctcaaccagtagatgccaattataaaatacattaggcatattcatattttgattcttcacaattctgtgaagtagttgctattttcccagttttatagatggcatattgatgcaaagttcttggctgacagtggcagaactgagatatttaaactctgtctgcctgcctctagagccactgctctggtgtgccagctctgtgtaagttgtaatatagaaaatatagcatcctaaatattagcaccatactttatccatttagttctctgcatgcagagggttaccttagaaagccaagtctaataaactttcactttttttttttttttgaggcagagtctcactgtgtcacctaggctggagtgcaggggcacgatcttggcccactgcaacctctgcctaccgggttcaagcgattcccttgcctcagcctcctgagtagctgggactacaggtgcctgcgaccacgcccagctaattttttttgtatttttagtagagatggggtttcactattttggccaggctagtcttgaactcctgacctcatgatccacccgccttggcctcccaaagtgctgggattacaggcgtgagccaccgtacttggccaaacttgcatatttttatacattgtcaccttttacagtgaataaaatttgtcatactttacagtaggcactgcaataatttctgaagaactatatgaataccttgataacaagtatgttttttaaaatgtatgttgttatactaacaaatatggtaagtgatttttagagtggtagaatacattttcatatttcatcttatattgtaagattaggtaagcagccatgttaaagataatgttgcatttgaaaatattatgtggcatttaaagagagacgtaagagagaaaggctggccccttgggcagggattcacacgctgacagtgtgttagtatttccactatagaacagttcttagctttgactggttcttagctttgtgaatctggaaaagcaagaattacaaagagttgattaaaacttggggaaggccgggtgyagtggctcatgcctgtaatcccagcactttgggaggccaaggcggttcgattatctgaggccagcagtttgagaccagactgaccaacatggcgaaaccccatctctagtaaaaatacaaaaattatctgggcatgaggtcagatgcggtggcttatgcctgtaatcccagtgctttaggaggccaaggagggcggatcacaaggtcaggagatcgagaccatcctggccaacacggtgaaaccccatctctactaaaaatrcaaaaaaattagccgggtgtggtggcgggcgcctggagtcccagctactcgggaggctgaggcaggagaatggcctgaacccgggaggtagaccttgcaatgagctgaaatcacgccactgcactccagcgtgggcaacagagcgagactccatctcaaaaaaaaaaaaaaaaaaagattggaagcattattgtatccatttttrmccatttaaggtattttttctccatttattgtgttaagtacttggtgagccctttcattctaaagactttaattttcctgtttcaggatattaaaaaagaatctttgataatttcctctaatttcttgcttctctttctggatctcctattattttggtgtttgatcttttggcttaattctctgaattttattatttcttctctattttctctttccktgtcttttttgttctactttgtaggtaattatttttccattctattgaattttaaaatttcaacyatcatgttttcagtgtctacaagttcctctgttccttttttatagcctcctgttcttccttaatggatgtgacatcttttatattcgaggatattaatgatttttaaaaatatctttcatctggtccctttattgtctttttttcttccatgtccsttttttctctcctttttgaaaacgtttttcatcttggagttttttgtctgttttctaatcattgtaggccttccttcatatttaagagtgaggaggacacacacagatatttgcaaactttgtgtacctgggtggagcttgatgcctgaggatgccagcaggcagcaaacattgatggaagattcccagataatggtgtgtcctctggggttgctcagtttctgcccagaagaatcctttaatctgtctgtgttgtgggagcagggtgggaggaaggggactaggggtcgcagtgttcagtttgactttcacataacttgtcatcatagtccaggtccagcatttcaccccyatattcatttgggccattatgtacctcaaccctcttgagttcattttttccagagaataaatctgcttaccaaaggggctgaggagaattagttgctaggatgtgcaaggtaaggagatggatatgtctcgctgctccctggatggacttcagagcttcctttccatgttccaggataactcttaagttctaacctgttgctccttggcttattcctccccttgactttctgttttccaaacttttgttgccctctttcttctatggttgattccttttcactcagcattgtccttgggatcttttttttagtagagtttccagagggaacacagagataaaagcacatgtttaaccagaatcttccttttccttttctttctttagtctttgcatagctgctatgctagtttttatgattatttttctcaatgatatgagttattcctaggctagttatttgtagttgtgtgttgaggaggggccagagtggtgttctgagtcttccctctgagttctttcagcctctgattccctctaggcaatgaagatgggctgctgggtggcccttttcagcccttgtgttgcaggtgagcagtgactatttggggccaatggtgtgggtggtaagaagaatttaccatgacagttggaggcagagaaaggcaaatttattagagaaagtgtgaaaatatgttgcaagggtacaatgggcaggtcagcaagaaaggagctgactgcagggagacaaaggcttgctggggattttataagatggtacttgtgctgtgtcctgaagagggctttgtgcagcgctgataatgccaaggttgcagtgagctcacttgcatttttctgtcaattgagggtgcggtaatagctgggcatggaaagatagtgagttacttgcgcaggagggctgtgtgtcctggaccatgaagaaaggcagacttacagcttatctgccttgtctttttgctttcttctgctcccgccagtccaactcctcttccctaatgaggactgcacacctcgctttgcttctgccttcttcaaagacagcrtgcctgtttattttcccctctctctctcaccctttgctgtggttcagtctagatgcagaatgaatttctgacaccagcccgcacaccctgttttcactgtgcaaagaaaagattcttggttttgcccccacagtagttccatcatctgtgtagacaggtcttcagacattcgcttctggtgtcttcctttatcctattccatctttcctttcttgagagaactttctcatatactgaggttcagagtctagatgattctcagtattatcagcaatggagtctttttttccctttcccttgtttttaatgatatctgagaacaggacagaaaggttttattctgtcatctcttcatgcaactgtactctcatttatttmtttcttctttttttgagacggggtctcactctcttgcccaggctatagtgcagcggtgtgatcttaggtcattgtagcctcaaactcttgggctcaagggatccttctgtgtcagcttcctgaatagctgtgaccacaggtgttctccttcacacctggataatttttaatttttttgtaaagacagagtctctgtgttacccaggctggtctcaaactcctgggctcaagcaatcctcccatctcagcctctcaaagtgctgaaattacaggtgtgagccaccatgactggccttgttcttcaattttaaggcttttatttttatttatttatttttgagacagtgttttacgttgtcacccaggctggagtgcagtggcacgatcttaactcactgcagcctcgacctcccatgttcaagtgatcagtcctcccacctcagccccccaaatagctgggactacaggcgcatgccacctcgcccagctaatttctgtgtattttgtagagacagggttttgccatgtagtccaagctgatctctacctcctgacctcaagcgatccactcactcagcctgccagagtgctaggattacaggtgtgagccaccacacctagcctaattttaaggctatttaaaaacatatactcagtacccctgaaattaggagcatgcggtgcccaagtccttttctttcttgatgtttgtttgtgtttttttagggatgatccaccaacacattctcagccagacagtgatgatgaagcagaagaaatacaggttggtaccaaataaaataatctgttctgtagactgttgtaatttaaatgatctctgagatggttctgacttgtagatcttatcttacatctgataaaatgagaaattacgtgagaatcttactttgacatatattttcacatatgctgtattccggaaaagatgtctcctgtttgatttataatttttagatrgagcactgctttttgaagcccagtgcagtatttaaatttaatgttttatttttttcctctttttcatgcagtggtctgatgatgagaacacagccacgcttacggtaagagcacagcagactcagcgtggggacagcctcacactgtcacacaagggttagcgtcaaggtttaagtgcatacctctcttaaattcctagtcagtcaccatctcatatattattttccctgtgggctgtcgtttttattttgaaaaataacttgaagcatcatttagcaggcaaacatgatttgccctttttccctttgattgcaaaggaaatatttcgagtgcgtatttgatgccttgacttctgttaagctctgactctctgcaagaaggaattacgcctaacattaaactctgagattcctaaatctctggaacataaagtgaaaatctgtatttccttattcaagtatatttatttagttagttagttgttttgtgtatttatttttgagacagattcttgctctgtcgcccaggcaggagtgcagtggtgtgatcttggctcactgcaacctccgcctcccaggttcaagctattctcctgcctcagcctcctgagtagctgggattacagtcacctgacaccatgcccggctaatttttgtatttttagtagtgacagggtttcaccatgttagccatggtagtctcgaactcctgacctcatgtgataacacccgcctcggcctcccaaagtcctgagattacagttctgagccacagcacctggcctcaagcgtatttaaatggcataaaaattactgtttctttcaagcgagagtagagaggtatgtgacttttaccagtgttttacataaaaatgtagaagttatcaagcatattacagtgtttcaggataagagtgctgttgtgaaagttaacctaaaattttttaaatgaaggtatttttaaaggagtgagtgaagcaaatgatctatttctaaaaataggtgaatgaaactcctcataccttgagttgacgggaaagtttttagtgaaactccttacaagtaaatgtaaaggcagaaatacagaaaactagttttgtgggagggtctgttctaatccagctctagataagaagatacttgtttattttaatgaacaagatatgattgccaggatagaagaaaaaaaaagaagtggagctgctcaaaactgacatatttctttagatttaaaaagggaagcctgccagcaggtgcctaagtggaaagtttgcgtgtttcatttactccagatgccattcagatcactctccttttatgaaaattccattcagtgtcatgtaaatgttacttatctgccatactcagggcactaaactarattccgtgagatgaacaaagatgaatatgatttcatttccaccattaggggtttgtaaaccagtgggaaaggtgacacaggcagggggagatgacagtgctgtcagatcagagacagcagttacagctgagggcaccagaatgcctgacaggacaagtggtatctgacctggattttaatagtggtggggagtatcagtatcaactcatttttaaatatgtatagatgggcctggcgcggtggccgatgcctgtaattccagcactttgggaggccaaggtgggtggattacttgaggaccaacatggtgaaaccccgtctctactaaaaacacaaaaagctagccaggcatggtggtagacgcctgtaataccggctacttgggaggctgaggcaggagaattgcttgaacccaggaggtggaggttgcagtgaaccaagattgcgccactgcactccagcctgggtgacagagagagactccgtctcaaaaaataaaataaaataaaataaatatgtatagatgatagatacagcaattaataatataaaggtgtgtgtgtgtatttaccaaactctgctcactaagaagttttagaatcaatgacatgtaacatcctggtagcagtgagcacgcctgatgccttgatcttggtttctaaataccattctccactaaacaaaattgaagcttcttggagatattctggactgggattgggaaagtaaaaatgagcctgcaacaacttgtgccagaaactgtggaagtgctgaaacaatgatgtgacatgacaaaaagatgccagaagctagctttgggctctcactgtctaaaaatatgagcatcataacaaatagagtttgagtattcttaatccccaaattcaaaattgaaaatgctccaaattccaaaactttttaaaaagactgactatcactgtgttgcccaggctgcactcaaacttctgggctcaagtgatccttctgcttcagcttcctgagtagcaggtactgcaggtgtgtgccagcatgcttagctcccaaaactttacgagcactaacatgacaccacaagtggaaaattccacacctgacctcatgtgacaggtacagccacaatgcaggtgcacaacccagctcattcagcctccccaagggaaaaatgaaattaccttcaggccgtgtgcataaggtgtatatgaaacgtaaatgacttttgtgtttagatttgggtcccatccccattatgtatatgcaaatattctgaaatccaaaacacttctggtcttacccattttggataagggatactctatgtgaagtataagaataggttatgacctattgactaaaataagaattgctgatcccatagtgacatacataagtgattaaataagtggggaaaaaaggaagcttgtctttatagtactaaaggcactaactaatacatgtagtaggaatgatggaattaggaattactatttggcaaccattgtaataatatttgattgaatagatgctaaaattagtgggtgaatatacagtgagaaagaggatagttccatcttttctaastatcttcacccaaattacttactgtttgcgcaaagaaaaatagtaatgttacaatgcaaagacctggcagccaagtgatcagtattaaccttgtcagtgatgggacagacctgtcatgtgtgcctcctgatacgatgcatgggaaggacaccacctgtcacagctgcgcagcctgagtctgcttgggaggagacatccaacagactcaacttttagaaattgtatagagtagttgccctgaacttttcaaaaacgtcaaggtcataaatggtaagaacaacagagagaggaactgccacagattgaagaagattaaagggacctgacaactagatttagtccatgattctggctagactggatgcctggaccagaaaaaaagtttcagttttttttttttctgtagaagacgttactaggacacttggcaaattttgaataagatctgtattgtgtcagtgttagttccgtgattttgatagataatttatagaaaatggtaaaatcatgactcatataaaactctttaatgcgtgttgaagatgttatttaactcatgagggaaccagacagattgttagaactggttcaaaagagaatccaaagaaaagatatatttttagatcaggaatattgaaatgagtatgtaaatgaggcaaaactggttttgcctccctgcagtatgggagaaaagacaattggacctcttccagatgagatagaaattgcctgtccgtaagaattagttcatgtcactatcacttacctagaatttgccaagttgtaaagtagctcacagacctggctaaaaacagataacctagaaggttgtgctgtatgtaaacagtacatagtcttccacttaagactgtgcataaactttttataatttaaatttgttttaggattcttatggcaggttatcctaaagttgaataattttgaggatttgaggggactgatcacatcttttaaaaggcatacatgaaaagtaatccttagatgtcaagctttatgggataggaaaattaaattgctttgtctttgaaagttgaattctttcccgttgtaaagtttgtgcaacaatgccgttcataggaaatactgccagtgcccatctcacagaagtggggtttatggctagagcggtaggggagccaagtcagccgcttcaggcaattataaggaaatgccctcacataaatcataattgctttggatggggagagatgaatggaaaataaaggactcagtgctgctgttcattttgaaaacctctctaaattactctagtctcatttcatgtatctaagctgaagtcgtctagtggaagatagatagttattaaccagtctagaggtcagatttatctgtaacagaaagraaggcagcctaattggaccttaagctctcgtttttattccctagccttttgctcaaagctgtttcttgttttgggggatatatgaccatgttttaaaactcatttctttggtcttttctcagactcttgtcacagttttttctctcgcatagctgggttagatcttggggatccacataactatttgatgtcatcttggaatgtgtagtttagttaattcaagatgtagtctgtcttttttttttcctagggaagaagttgattactggattttttcagaacttatagttgcccgatagggggcagcaatcctctttacagggtataaatgaaaattaatgactgcgtggagaatctgttaatgtttttgtttttttatgtctcttgagggccctacttccccctctcttacttacctttttttctttcttatgtccataagctcctgtgatagtgacctaggctcaaggcaggacataatgacatcaggcttaagttcctgtttaacagcagtatttctattcacttccgggtcgaaacaaacacagaacgttttggtcactagcttatataaaatatgcattttaaaaatcatccaaacaggaaagaacgttttaccttgactaaggttcacattttgagttttgcttgttttaaaacttgtctggaaatagcagtgtttaaatacagtttgccacatcatttatttttcattctctccgtggctttggggaataccatatggctaagactcttcctgcaagtggaagggcttctagctcttcaagtagggatgttatttctgacaactagagtattgctacaggtgatattccacctgtctattttctcttgatgaatgctggttttatgtcggtgtacagagaaccattcactccttcctcacatcctcagaagcctagtgacttgtgtcatttcagctttgcaggctttgattgtctggaaaatgccatttaagcagctgattattttatttctctttttggtaaatgtactttatcactgattttatttagctgggttcagaaattctgatagtaatttgtattctaaattctgtttttaacaccctaaactataaccttgagattttgatcttgttttmwatatatactgtgatgatattgacgtgcccaatgatttcttctctctctgtaggcaccagaatttcctgagtttgccactaaagtccaggaagctatcaattccctcgggggcagtgtctttcctaagcttaattggagtgccccaagggtaggaacacataagtaattctcttactgtttgaatattctttgttttgctgtttatttcatttcatatccctacagagggtctaattatattcctaattctaggaaaaatactgtggaatttattattaatttccctctactgttttactttccggattttgctatacacttgcytgggtctgtgaaatactgtatattctgccaaaaggtagtttccacgtcttgtgttgctgattgtttttgaattctgaggaaattcatactctgcccttttcaaaacttcagctgttcagtttaacagagaaatttttctttgttgaaaagtaataaaaataaaaaaagtaatagtgtcataggctatagaaatagagtggttggagaagtcaactgatcttttcttaaattgtgtcttattattttaatactgcattgacaagatttttataaaagttaaggcctgtggaaaaatccgttagttgttttaatccaatagaaaacagttttgtattagcaaagcttatttaaggaatcagagacctatttgtaatttcaaaagttatctcatgccttttttattctaaaatgaatgataatttgtacttaatctaagttttgtttttacttttattattttttcttttttgtttttacttctaaaaattaattatactctacatgtacagaatttaaaatttcaaatagatttggaagcttgccatgaaaatcagcaggtcttgacacctattttacttcaccatttcctactccccagaggtagctgttttcaaatattttagtacttttcttccatgtagtgtggataactggatagtggtttgcaactgttagttttctcaaaattctgttatatcctgtgtctgatctgtctgtgggagagttgtattttttaaatgacttaattattctgtaatttttaggcatgttccactgagctttgtgcctgctttgcatttgccttcccatcttttgttcttatgtatgagacattcaccatttaaagttgtagtggttcagaatagctcacctccttctctttcagatttgatagacgtggggtgtaactgctccagccgccaaagttcaagtgtttggctgccactccccagaaacgggaagagtggaaattgatctctcttttcttggagagtagctggtcaggctatttctttactaccttaatcttgtagccaaaatgtcgatgtttctgatacctcattttcttctcttctattatcagtaagaaaaacactgggaagtacttaggcctgggctgaaatgtgaggaccctgacatctcagtgttcataaccaagtgtctgaaatgcagtggtgacgctttttgttgttaagcataatttaacatttgacagtactgcttaaatttacttgactttcttccttaaacccttgaagtgatatgcattattgattttgttataggcctgagcattcatagcagccaacatggaatatggactaaatagcatgtgcttcattctttaggatgcgtattggatagcaatgaatagttctctgaaatgtaaaaccctcagcgacatctttctgcttttcaagagttccgatttcatcactcgtgacttcactcagccgtaagtatctcttattctctcatgtcaatagtttcagtatttgtgcaaatttctctatagatgaaattccattacttatagtactattataaatcatagctcyatataacaaagctatttcatattgccaaaatgacctgttaaagcaaatctttcttttccctttatagaaaatggtgtataatgaatatctgaaaatgttaaggacttcctgcgtctctgcccattaaacatttcagtaattttttttctattataaaactgataaatatttatcatagaaaagcaaaattagggattacagctaaataaaaacaggaaatataaaagctctcatggccgggcgcggtggctcacgcctgggattcccagcactttgggaggccaagacaggtggatcacctgaggtcaggagttcaagaccagcctggccaatatagtgaatccccgtctctactaaaaatacaaaaaattagccgggcgtggtggcacgtgcctatagtctcagctactcgggaggctgaggcaggagaacggcttgaacccgggaggtggagtttgtagtgagccgagattgcgtgccactgcactgtagcctgggcgacagagcgagactccatctcaaaacaaacaaaaacaaaagcactcatgatcttgccacaattggttattatatttctagaattctatctatagataaatataatataaatacatctatctctacctatatacagatttttttaatgggatcctatagtttgtatttctttttttttctttttttttttttttttgaggcagggtctcactctgtctcccaggctggagtgcagtggcacgatctcagctcagtgcaacctctgggttcaagcgattctcttgcctcagcctcccaagtagccgggactacaggcatgcaccaccacacccggctaattttttatatttttagtagaggcagggtttcaccatattggccaggctggtctcgaactcctgaccttgtgatctgcctgccttggcctcccaacgtgttaggcttacaggtgtgagccaccacgccaagcctrtggtttatatttcttagtgggctgcttttgcacttaccagtgtgacatcattgcgtgtctaaattcattattttccattcccttagtgctgcgcctctggagagctgtaccatgacatatttgacctaccctctgttcttccagagctgcaatgaatatccttgagctaactctttgtgcactcccctaattttctccttaggataagtttctagaagtggaattgctgtatttctttccttttgccagtcactctatagctaaagaatttgacagtgcagtcagcgttgtaggtggacggaatacctgccctgctgagccgcaggtgctctctttatgcttcttttgttgtcttcaaatagcagctatttttctaggtttttcttcctgttgcatcttaaacagaccagttatctcaggtaaactcatctttaaactggtctttaaagcatatcccagaacctagaagcaggagcatgagagtgaaaatcttgcataagcatgccacttccgccctgtccagttgagtttgtcctgccagttcgttccatgtcagactcaaatcctttttttgaagtggatcgtggcatgaataacttaagttcactacgtgtcggtcgtgcatcaactctggcgtgtgagctctgcagcttggacataaggttgtagtattatattaattcaagaaagggaagttaagtaatcagtgagtgtggttgtgttacatcgtattacatgtttattgtataaggattttacttgtattggtatttctagttttatagaaaaaagtgtgtgtgtgtggtgtgtgtctgtgtgtctgtgtctgtgtgtgtgtgtttaatagagatggggtctcactatgttgcccaagctggtctcaaactcctggtctcaagtgatccttctgtgcctgagcaagtattgttttgacatttaattgtcaaccctctggttgtgttggcacaggtgttggtagcctgttttagtaaccagtagtattttcattctaggagataccctctgaaaaatagaacaaagttgtggctcttttttccattgtaaagctttttgacatctaatgctttaagaggtcttaaaatatgttacactgaaaatgctgtctacttgataattcaactgataatggtttttttttttttttgacggagtctcactctgtcgcccaggctggagtgcagtggtgcaatcttggctcactgcaacctccgcctcctgggttgaagcagttcttctgcctcagcctcccawgtagctgggattacaggcgcatggctaccacgcccagctaawttttttttgtatttttagtaaagacggtgtttcaccacgttagccaggatggtctccatctcctcacctcgtgatccgcctgcctaggcctcccaaagtgctggaattacaggcgtgggccaccgcacccggccatgcccaactaatttttgtatttttagtagagaagcggattcaccttgttggtcaggctggtcttgaactcctgatctcgtgatccgcccgccttggcttcctgaagtgctgggattacaagcgtgagccactgtgcctggcccttataaggatttttatatgcctttagtgtcagttgcagtgagtgtgggaagacacttttgcctttccagaactaactataaattgcttttaattctgaggctgatgttttttttaaatcagctttgcaatttaatgatcagctgcctcctcttaagctacgtcttgctttttatcttcgtttaactgatgttccagtggatggtatgaataatagtctgttgttttgcattttgtactttttgacttttgcatggcaaggaagttaaatcagcaagtgagtttgaggtcttggatttagagtgtttacccacaaaatgccatccttctgctattataaataattgggaattggcaggagcaaatgccaagcactgggctttcagccttttagctgggcgctactaacgtgtcactttgtctagaagtaactgttggtagttgcttagcaattaatcggttgcataacaggaagtgttgccatcacataaaaattccttattgatagaactcagtaaagatgaatgtttgtcacaaaggccttgaagagctcttaaaagattaaatgctgggtgtggtggctcatgcctgtaatcccagcactttgggaggccgaggtgggcggatcatgaggtcaggagatccagatcatcctggctaacacggtgaaaccccgtctctactgaaaatacaaaaaattagccgggcgtggtggcgggcgcctgcagtcctagctactcgggaggctgaggcaggagaatggcgtgaacccgggaggcggagcttgcagtgagctgagatcgcgccactgcacttcagcctgggcgacagagcgagactttgtctcaaaaaaaaaaaaaagttatagattcattctttccaaaatacttcccattaaaatattatataatagaacatttaatataatacagttatatataatatgtataaatttatataacataaaaatgagattatgttgtttatactattttgaggcttgacttgacaaaaaaaaaatgttacagtcagaattgcaagttaacagaagccgaaaatagcttacacatgggatttaaaaaatacattatttaacgaggagcctggagattgggtatttttaggaatgctcagtggctcaccaaggtcgccagggctctttcaggccctttccttccaccatccttgacttagtggctcggtctttgggtttctcacctaatggttaaaagattgctgctacagttccaagtatctgtcatatgaagacatgaccatatctcaaccagaaacaggagggataggttgtttcctcttgttcttttctgtatgtgaacgagtaaagcattcctggaggcctcctgggagacttcctctcagccctcattggtcacagttacccagcctaatccagtagttggcaaagggagcagaattgctgtgattcgtttagatcaagcttgtccaagctgcagcagcccgtgggccatggcccgggatggctttgaatgtgccacaacacaaattcataaactttcaaacatcgtaagattttttttgagatttttatttttttaatttgtatttatttatttattaaaatttcatttattaaatttattttttaaataaattttattaaaatttatttatttatttattttttatttacttattttttagctcwtcagctatcattagtgttagtgtattttatatgtggcccaagacaattcttcctctaatgtttcccagggaagctaaaagtttggacacccctggttagaccaaggttctcgacacaagcatgcgtcagggttatccagagagttagatgaaacacaggttcctgggctccagggtttctggtccagcaggcctggagggggcctaagcagatcatttctaacctgttcccaggcaatgtggatccgctggtccaggcccacgccttggtggctgcttagatgagtcagcacatgcatctcaatgattagagagggaaccaggaagcacaaatgctcccagcatctgaacaatccaggttccattggacaggctgaagatgggaatcctggagggtagacagctagtgctgtctccctgcctataatgtactctagaaaatactgcttttttctttcctgttcttcaaatggttactgtagacaaaaagctttaaaaagtggaggttgacatatgacatgtggccgggcgcggtggctcacgcctgtaatcccagcactttgggaggctgaggtgggtggatcacgaggtcaggagttcgagaccagcctggccaacatggtgaaaccctgactctactaaaaatacaaaaaagagagaaagaaagaaatatgacacacataaatttgctgactgtgttatttgccaagatataaacattctatgttattaaacttgctgagtcacaggctgctttcattattttattgtcacttcagtgggctgagtagacaagaaaacattttgatactcaattggcatttagaaaaaagggctgagtgaaaaaataaatttgttaattgtttctctgaggggctcatgatgaaggagaaatacatttgactgcaggtcagggaatttgatttgtcttagtaatttttttttaaaattttttcaagatagagtctcactctgtcacccaggctgaaatgcaatgatgcgatcttggctcactgcaccctctgcctcccacagtcccagaccgacatgctcatcactggatatgttacatttgtcctcttttttttttttttgagacggagtctcgctctgttgcccaggctggagtgcagtggcgtgatcgtggctcactgcaagctccgcctcccgggttcacgccattctcctgcctcagcctcccgagtagctgggactacaggcgcctgccaccatgcctggctaatttttttttgtatttttagtagagacggggtttcaccgtattagccaggatggtctcaatctcctgacctcatgatccgcccaccttggtctcccgaagtgctgggattacaggcttgagccagtgtgcctggcccatttgtcatctttcagtgtgcaaaatatttggaacagcacgagagaaacggtgtgttgattataattattattcgtttatgtattttattttatttttatttttttcttgagacagagtctcgctctgtcacccaggctggagtccaatggcatgatcttggctcactgcaaccgctgcctcccaggttcaagcagttgtcctgcctcagcctcccaagtagctgggactgtaggcgcacgccaccacgcctggataatttttgtatttttagtagagacagggtctcaccatgttggccaggctggtcttgaactcctgacctcaagtgatccacctgcctcggcctcccagagtgctgggattataggcatgagccactacaccgggcctaattataattatgaagtccacaaaaaatagcatgtcagtcccaaggcatgtttagggcataataaatatacctatttatagtaaggccatttggctggcagaaaagctaagtcttctttgagctgaggatgatttgggtagtaataaaataaaaaaatgtggcactccttttatttttttttggtaaaattatttcagtgtttattttgcttctgagtaaagacaagggatgtgtaattatctgtcattgacgtacactatgtatttccccctgtatttttatttttttatttcagtaggtttgggggaacaggtggtgtttggttacatgggtacattctttagtggtgatttctgagcttttggtgcacccatcacctgagcagtgtacactgtacccaacgtgtagtcttttatccctcgccaaccctcaccctttcccctgagtcccagaagtccagtgtatcatttttatgcctttgcgtcttcatagcttagctcccacttacaagtgagaacatacgatgtttggttttccgttcctgcgttacttcacttggaataatagtctccagttccatccaggttgctgcaaatgccattattttgttccttaaaaaaaaaaaaaagacatctgattagtcatcagtactagttaagcatatttctttagtttggggatagaatattttttcttttcctttctttttttttttctttcctttctaaaaatttgtgtctataacattgctttccaaaattcctgttaactggcaaatattaaagtgtagtaaaaatatgctggcataatttcatagtagctttcatcaaagtaggcctttgggattttgctttttttttctttggaataaaatctttgctattattatacctgagaattcttttagtttgccacttacattgtaaataatgtaacatttattacttaatcacatttgtgtttattttagaattttcatagcttgctagagggactataattattctgccaagaatttgaactttgaattcaacataagagcctcctttcagcttagactacaaattagtgactgtagttgaataccacgttcttttggtactttgttgaaaatttcagttgaagaaatcttccaaattaatgttaaatagtaacccaggaaaaaaatttggggaatattttgtggtggtggtggtttttttgtttttgtttttgttttttcttgagacggagcctttttgtcgtgggaaatgtgctgagtcctccagtgaccttggtgggatttagggtagccagactgagttttctagctgaagctgcggccctgaaggctatgcttggggtccgagctgctccagtttgatgcttccttccttttccctatttcttcctttccccaagaatggtgcagacttcctgctgaggcctgtagttggtggacaggcatatcctggcgcttttcccaagaaccccttacagagcttgaactgcagctactcctcagaataatgatttctaaaatatgggctgggtgcggtggctcacatctgtaatcccagcactttgggaggccgaggcaggtggattacctaaggtcgggagtttgagaccagcctgaccaactcgatgaaaccccatctctactaaaaatacaaaaattagctgggcttggtggcacacgcctgtaatcccagctacttgggaggctgaggcaggagaattgcttgagcccgggagacggaggttgcagtgagccaagatcgtgccactgcgctccagcctggccacggagtgagactctgtctcaaaaaaataaataaatgaataaaagaaaagaaaatatgtgtctagtccccatcttggacactttggattggaatctctggggargtattttgaaaaatcatctcattccactctctcattttcaaacctgtgttytagaagctytgacacaccctgaggttcagcgtgcagtaagtagttaactgaatataaagacagggaagaaaaagcgggcctgacaagttgtctacagatttgattgcataatgaactttagaaatcacccaataccatctgccatttactgctgaggcaactatgagccagtcccaaaaaataattgacttttctcttttttttttctagcttctctctttttttttttttttttttttttttttagtatttattgatcattcttgggtgtttctcagagagggggatttggcagggtcataggacaatagtggagggaaggtaagcagataaacatgtgaacaagggtctctggttttcctaggcagaggaccctgcggccttctgcagtgtttgtgtccctgggtacttgagattagggagtggtgatgactcttaaggagcatgctgccttcaagcatctgtttaacaaagcacatcttgcaccgcccttaatccatttaacccttcgtggacacagcacatgtttcagagagcacggggttgggggtaaggttatagattaacagcatcccaaggcagaagaatttttcttagtacagaacaaaatggagtctcccatgtctacttctttctacacagacacagcaacaatctgatttctctttcctttccccacacttcccccccttccactcaacaaaaccgccatcgtcatcatggcccgttctcaatgagctgttgggtacacctcccagacggcgtggcggctgggcagaggcgccccccacctccctcctggacggggcggctggccgggcgggggctgccccccacctccctcccagatggggcggctggccgggtgggggctctcccccacctcctggagggggcagctgctgggtggagacgctcctcacttcccagacggggcggctgctgggcggaggggctcctcacttctcagacggggcggccgggcagagaggctcctcacctcccagacrgggtggaggttgggcagagacactcctcagttcccagacagcgtcgcggctgggcagaggcgctcctcacatcccagacggggcggcggggcagaggcgctcctcacatcccagacgatgggctgcggggcagaggcgctccccacatctcagacgatgggtggctgggcagagacgctccccatttcctagacgggatggcggccgggaagaggtgctcctcacttcccagactgggcggccaggcagaggggctcctcacatcccagacgatgggcggccaggcagagacgctccttgcttcccagacggggtggcggctgggcagaggctgcaatctcggcactttgggaggcgaaggcaggcggctgggaggtggaggttgtagcgagccgagatcacaccactgcactccagcctgggcaacattgagcactgagtgagcgagactccgtctgcaatcccggcactttgggaggccgaggctagcagatcactcgcggttaggagctggagaccagccccaccaacacggcaaaaccctgtctccaccaaaaaaatacgaaaaccagtcaggcgtggcggcgtgcgcctgcaatcccaggcactcggcaggctgaagcaggagaatcaggcagggaggttgcagtgagccgagatggcggcactacagtccagcctctgctcggcatcagagggagaccgtggagagagagggagagggagagatagaccatggggagagggggagggggagggggaggggaggaataattgacttttctaagaccataaaatactagtacggagcccaaggtcctgattgtgatttttaacctctggtctattgttctcttacattcattggaacgttttccttttctccttatgtagattatctaatctaaaatattcatttggctctatactggatatgtgtacaaaagtaattttctgtcttttttttttttctttatgagacagagtctcactctattgcccaggctggagtgcagtgtcacgatctcagatcactgcaaccttcaactcctgggttcaagggattctcgtgcctcagcctcccaagtagctgagcttacaggcatgtgccaccatgcccagctaatttttgtatttttggtagagatggggtttcatcatgtcggccaagctggtctcaaactcctgacctcgtgatccgcccacctcagcctcccaaagtgctgggattacaggcgtgagtcaccgcacccagtccaaaaataattttcttaaataatagaaaacgtatagaggaaagctctagatacatgtagtacttatcaatatgctgatccttgggggcgaaagggcagttttttaaaggataaaaataattagttaatttttattaacttgtgagagttcatgaccttaatttttgaggcaggatctcactctgggctagagtgcaatggtgtgatcatagcttactgcagcctcaaactccggagctcaagtgatcttcccgcctcagcctcctgagtagctgggatgacaggcttgagcctccgtaccggctaatttttatattttttttagaggcgggacctagctttgttgcccaggctggtctcaaactcctggctttaggcagtcttcccacctcagccttccaaagtgttgggattacaggtgtgagccctgtgcccagtccttaatttttattgacgtaaaataactgttaagcttaattattattaaaataatttttaatcgaaakctagttttctagttttagattattagtcctcaagataatgtactgttaagttagtttgatttgaaataagagatttttgctttacagagaaaaactaggttgtttttagttttttttttttttgaaacggtgtcttactcggtcacccaggctggagtgcagtggcgcaatctcggctcactgcaacctccgcctcctggattcaagcagttctcctatctcagcctcctgagtagctgggactacaggtgtacaccaccaggcctggctaatgtttttctttttttgagatggagttttactcttgttgcccaggctggagtgcaacggcgcgatcttggcttaccacaacctctgcctcccaggttcaagcgattctcctgcctcagcctcccatgtagctgggattacaggcatgcaccaccacacccagctaattttgtatttttagtagagatgagttttctccatgttggttaggctggtctcgaactcccaacctcaggtgatctgcccgcctcggcctcccaaagtgctgggattataggcgtgagccactgcgcctggccacgcctggctaatttttgtattttttgtagagacagggttttgccatgttgctcagactggtctcgagttcctgaactcaagcaatcggcccgcctcagcctcccagagtgctgggagtacaggcgtgagccaccgtgccaggtctgccccctccctttcagtgagtcaccaagtgatcttgcctccgcctctacgcttctcctttctgtgtccactcccattcccttagttagaccctcatctccccgaggctattgcagcaagccttctaccaggcttctctgcctcccaggttgctgcccttcccctaaactgtccaacaccattgtgccatagtgatatagatgcgttttttaaacccctggtacctgtgaacacagtgatattcttaacgcctaaatggaatgatctcccttgcgtagttggagactttagggctcccctttgtccttataatgaagtccaagtcccctgggtgggcacacgaggcctctcatgacctggatacttctctttgtccagagtttctgtccagctccatctgtcgcagttcccccttgagtcctgcactccatcagagctgatcttctctagttatttgaatgctctgtgagatctctcactgccctccctgccttagcacgtttctccgtgctttaaatgcgggccccttcttgactaccactcccctccgacacacagcagccagctaatcagttcttccttggtgctgcagagtattttttctctagtgtttttaaaattgtgtctattttttagctttctccaccagactaagctcaaccagaacaaaggagtcttcatcattttaacattcccaatgcctagcccaagctttggcatagatgggcatttaataagcgatatgaaacattgttgatgaaagtgaggatttttcgaggaggaagcagtatacttaatggagggctgaatggatctatctgagttttaaaatggcacgtgggagaaggattcagttaactgtgtgactttcgatggccaacgttacgttgagagagaagtaggctgctggctccactgtaagatgcacacaacaagaacgtggacaatgacagtgccttcctgccctcgttgagaatcaggggttagacagtttgagtcttgttgtggccactaaatttggtcttttctgggtgttagtttctttgccttttgacagaaaaatggacattatgctatctctatggttataatagcccataacattgtttattttaatttttgtgggtacatagtaagtgtatatattcatgcggtacataagatgggttttttttgttttttgggtttttttttttgagatggagtctcgctctgtcacccaggctggagttcagtggcactgtctcggctcactgcatcctccgcctcacggttttaggtgattcccctgcctcagcctctcgagtagctgggatttcaggcgtccaccaccacagccggctaatttttgtatttttactagagacagggtatcaccatgttggccaggctggtgtcaaactcctgacctcaagtgatccacctgccttggcctcccaaagtggtgggattacaggcatgaaccactgcacccatcctggggtacatggcatgttttgatacaaacaggccatgcctaattatcacatcatgtaaagtggggtatctgttccactcaaacatgtatccatcctttgtgttacaaatgatccagttacactctagttattttaaaatgtacaattaaatcgttgttgactgtagtcaccctgttgtgctgtcaaatactagaccagctatagaaatgatcctggaaggtacagtcttgctcataacattgtttcgatgattaaatgagttcatatctcaggctgcctaggctaatgcaaagcattgaatacggctcagtaagtgttcrtcgaatttgagttagtctcctgtttctggatgcttttagtaaaacgttactctcatgttaaatatatgttaagtgtgtgcataaacyggcaccagtaacaaaaagatwcagttgccttttcttcttcttccaaaggtttattcattgtactgatgattctccagatccatgtatagaatatgaggtaagaagcttattttctttgataattgtagatgaagatgtgttgagaattgctatttattcttaagtgaaatgaaatgaatgaagtttcttggattaatttcttcgggaacctaaagccactgaaattttaaatttatgaaatatacacataaaaggatatatattatatatagagtgtatataccaaatacatgtatgcagtatacacttgctacaggatatacgcagacacctttaatagaacaaacacctttatacgcctcacaggtgcacctaattgtttcagcattttaccatttttatattgttcactcaccttacaaataacttaataagaggataggccgggcgtggtggctcacgcctgtaatcccagcactttgagaggccgaggtgggtggatcatctgagatcaggagtgcgagaccagcctggccatcatggcgaaaccccgcatctctactaaaaatacaaaaattagctgggtgtggtagtggtggcctgtaatcccagctactcaggagattgaggctgaagaatcgcttgaacccgggaggtggaggttgcagtgagctgagatggcgccattgcactccagcctgggccacaaaagtgaaactccgtctcaaaaaaaaaaaaaaaaaaagaataagaggatagtgaaaaaacaacttcattagaaattttgatgagtttaaacatagtaagcctcaatttttattccagattttcctagttttgaaagtatacacacaacacacacgcacataccctgatctggaccaggttcttagctacaactaactgctcatcaactgtcatgaatggatctgaaacataacttttttttctttttttcttttttgagatacagttttgctctgttgcccaggctggaatgcagtggcgcgatctcagctcactgaaacctctgcctcctggactaaagcaattctcctgcctcagcctcccgagtagctgggattacaggtgtgcacaaccaccatccagctaatttttgtatttttagtagagactgggtttcaccatgttggccaggctggtctcgaactcctgacctcaagtgaaacgcctgcctcagcctcccaaaatgctgggattacaggcgtgaaccactgcgccctgcctttttttaaatgcagactccacgtttcaactccgattcctggtccttcttccacttgcactgtcaaaatgcaaacttttagaaactttgacggctcatagtttgttgcaaagaggatggccatctttgctccataattgcatttttacatttatgtgaaaattacattttcatttttggtcatataacaccaattcgaattagtgcagtaattttaaaatctgtctttagtgtctgtttgcttctagctacttttttatatatgtacacatgctttcaaaatttgtctgttgactcactgcattgagtaatttttaatgtgttgactgtagatattgatgtatcttttaggattataccatatacatggaacagttaatttactagttaagttactccttaccaagccaccaattactagatcttagagtgcttgtaggtgagattcttatatacaacttgtgagattttttcccctcacttaatagcatagtgtgagcattttcccagcttattaaacactcctataactttatataatatagtcacagctattgcttcacgcaacgaacatctgtctattaagtacctggctgtggtgctttctgccaggtrtgagaaagagatcatttccttacctttctttttttttttctgagacagagtcttgctctgtcacccaggctggagtgcagtggcgccatctccggttcacgccattctcctgcctcagcctcccaaggagctgggattacaggcacccgccactccgcctggctaattttttgtatttttagtggagacggggtttcactgtgttagccaggatggtctcgttctcctgacctcgtgatccgtccgcctcagcctcccaaagtgctgggattacaggatttccttagcctttctctgaggcacagtctttcttaagaagtcatcatctacctccaagatttatttaccagcagtttgctctcttattgccgttttgaaagacaccattatcatgtatataagatttaaaacctagttttaaaattgtaggaaagtgatactcttcaagtaattcaaatgaaaaaagttgcaagtagaatcctttgtatcattttctcctgtctgtgtgtatttaaaatacacacacacacacacacacacacacacacacacacactctctgtctctttatagatacttacatattcataggataaatctggaaagatgcacaagaaacctatagcactggttgcctctcaggaaaaagacagagggacagagttcgggagagacactccctatccccttctgtgttttgtgaaaatcaaccacagtgtatgtattacatgcacaaaatagtattttgataaacattatgcaaattttccaataaattgtgtgctacaattgcttatttatttgttgctaagtaaaaccactgtagcctatatatatatataaaatgtataaaattatgtatgtatatgcctgtatgggcttttaatagataagaactgtgtagtattttagtttcagattcatttaataattacgtatttttttaaaaagcagataataaggcttgactaagagcttataataaatgaaaaatgaaatcagtgcatttaaaatttctaaggcatactttaaatgtgtttttttaatacattgagagtgcccacctgaaattttcctgatttttaagatgagaaacttattagtatatgagagtttatatctattaaataattattaattacagtaataagacccatttgtgatttaggccaagggtagaattgatcgactaaaatattgagaaaatagtgagagagttattttggtgattcattgtgacaaacctcaataataattatatcaaagtaagcattacctcatggtacttaaggtagacaactttagaattatattattttattttactatrttttattttattttattttttagatggagttttgctctgtcgcccaggctggagtgcagtgtggcgcaatctcggctcactgcaacctccgcttcctgggttcaagcgattctcctgcctcagcctccttagtagctggggctacaggtgcctgccaccacacctggctaattttttgtgtttttagtagaggaggtttcacatgttggagcgcartggcgcgatctgggctcactacaacctctgcctcctgagtagctgggattacaggcacccgccaccatgcctggctcatttttttgtacttttagtagagacggggttttaccatgttggccaggctgatcttgaactcctgacctcaggtgatcgcccgcctcagtctccgaaagtgctggggttataggcgtgagcctccgcacctggctggaattactttattatttgatattcctcaaggggtgcagaacatatgaatgaacgtatggcactgtggtgaaaagttgtgactacattcttggtggtgtgcttgtatgtcagaactctcaaaatggcagttatgtgacaaggatgcattttgtcatagaattttagcacaattttcctgtggttatcagaataatagatcacaactctattccctacatctcatgtgaagaattttttttttttttttttttgagatggagttttgctcttgtttcccaggctgaagtgcaatggcgtgatcttggctctctgcaacctccacctcccgggttcaagtgattctcctgcctcagccttctgagtagctgacaggcatgtgccatcatgcccggccaagaatgtcatatgcctctttttttaaaaccatttgataatggcaatcattaagatacagtgttgacctaaaattgcctagtagaccttaccacataggtgtgttatattaaatattttttcttttgtttacagctcgttctccgaaaatggtgtgaattgattcctggggctgagtttcgatgttttgtcaaggaaaacaagcttattggtgagtttttgtttgtttgtttgttttatccttcaaagtcatctttaaaagaaaacaagcttttgttggaagtaaatttccagtaattaggacagggatgtcaatctgttttcatctcagatgccacctctaaccagttgatactgactctctggaatgctgtgttgacaggaatcctgagcccagagtcacttgccgcaggaaacggtattgtcagataatcatggctgtctggattccagagataaaaatggtggttgtcactgttcctgatttaggaatcaggaactctgtgtatggaattttcctaagcagtacttagcaatagtctgcttatttcaagcgtcataaaaagccaagttttggaacctttatttctattattggggcactgtttattattctagcaagagaaaatatgtggacaagtaagtgtattcttctaagtcacccattttctttcctctcaggttactgttctgtttgctatgattgatttaacttaaatattgaagataatttgttctttattttgttaatgcatattttccatgaagtaaaatttatcttcaacctagaaaagtgtaatttgaatacaatcacatcagcactattgatgcattgaatgtgatgttgaaatgtatgaacccacctgaaagaaagttggggtgttcacatttctcatattgctcgatattcttgaagaagctgcagtgtaagtactctaaagcggggggtcctgttggcacaagattcaggaataggaagcccgtatttcagagcagagaacttttccctaggactggagcaaattcagggagtttgtgtaatagtccagttagtgtgtttggaatcttgtcagcaagtcactctgaaaaaaggaatgtttacttttccatggcttgaacgagagcaggctgtgaaggccaagtagcatgtatgaacaagaaaaatagactgcttctatgcaatacagtatgaatatggcaggcatctcttgaagaatatttgatattttcccaaagaaagtggaagagaataccaatttgcagagactctttggaagaaagcaaagcagcagcagttgattatgtgtgcaggtttagaattgctgctttaattttttacataacaagactttttgtgactttgaattccttccattttactaaatgaaaataactgtttccatgggcaaggtgctgtggctcacacctgtaatcccaacagtttgagaggccaaggctggaggattgcttgaggccaggagttcaagaccagcctgcgcaatgtactgagaccccgtctctacaaaaaataaaacgatgagccaggcatggtggcacatgcctgtagtcccggctactcgggagactgaggtgggagggtcacttgagctcagaaagtggaggttgtaataagctatgattgtgccactgtaccccagcctgggcaacagaatgagacactgtctctaaaaaaaaaaaaaggccaggtgcggtggcttacacctgtaatcccagcattttgggaggctgaggtgggtggatcatgagatcagttcaagaccagcctggccaagatggtgaaaccccatctctgctaaaaatacaaaaaaaaatttgctgggtgtggtggcaggcgcccgtaatccttgctacttgggaggctgaggcaggagaatcgcttctcgggcagcagaggttgcagtgagccgagatcgtgccactgcactccagcctgggcaatagagtgagactccgtctcaaaacaaaacaaaacaaaacaaaacaaaaagtaaattcttccagaagtaagaagacatggcaatgtaggacttcaggattcacctgttcatatgaatccttacagctgggtcgtgtgtaatgccgtacccatcagggtgatcttctaatctactttaatggttctttccacaaaatgtttaaatcacgtattgatgtttttgaaaagaatattgtataataacaggatgtaaaatattttcttgtcaggtatttctcaaagagactacacacaatactatgatcatatttctaaacaaaaggaagaaattcgcagatgcatacaagactttttcaagaaacacatacagtacaaattcttagatgaagactgtgagtatttttttattgatccagtaaaatgaaatgaaatatacattgttactggaccttatttactatggtgtgtatcctaataactagatttgaaatactgtattgtaagcattttactatattattatttgttatttttgatagtttgtatgttaatttctttttattattattatttttatttggagacagtcttactctgtcagccaggctggagtgcagtggtgcgatcgcggctcgtgcagcttccacctcccgggttcaggtgattctcctgcctcagcctcccaagtagctggggctacaggtgcacgtcaccacacccggctaattttttgtatgtttagtagagatggagtttcgccatgttggccaggctggtcttgaactcctggcctaagtgatccgcccacttcagcctcacagtgtgctgggattacagatgtgagccaccgcaccagccatgttaatttcatcttatttaactaaaatctatttttactgctaagtcagttccctgtcttgttttagatgtttgattgtgtatttcaaaggggctatctacagagaacaaagtctatctacctttctagcttctttgaatgatcaaagacagcaccagttacaaagtaaacatttgtgggttgtttttaggaattgaaagtatattgtgtaagagttttcatacatctgaaaattatatctgctatgatttacaatttctctacttgccaagactgggctctgtggcagatttgacttaaaataagatgaatcatgcttcaaggctcattagattttatgctttctattataagctttactcattgcattctaccagatcagtgattgatgcccgtttcactagtactttgctcagtgactcccatctttcccatagaaccagtctataacggggaactggttgagatgatattggcgtttggtttgaatttttaaatataggggcttatggttggggaacagagaacagtaaagcaaagttatataaataaaacattgcaggrtgcctttttmtgtttgaagttttgaggtttagaagcatgaagtcctcagggtcatttatattctgctgtctttgattaaaatgtactttaattttcaaaaggagatttacattgtgaaatattagttcattaataactgactttttttctcctttacagttgtgttcgatatatacagagacagtagggtaagtaaaaactctttctgatatgctttaatataagagctggttttataagcaggcagagcatgcctttgttatgtgtgtgaaggatccatgctcaaaaaatattttgtctgggtgcagcagctcatgcctgtattcccagcactttgggaggcttaggcagggagatcatttgagctcaggagttcgagactagcctgggcaacatagtgagccctcatctctactaaaaattaaaaaaaaattagcccaggccaggcacagtggctcacacctgtaaccccagcactttgggaggccgaggtgggaggatcacttgaggtcaggagttcaagatcagcctcggcaacatggtgaaactccgtctctactaaaaatacaaaaaaatgagccaggcatggtggtgggtgcctgaaaycccagctactcaggaggcagagattgcagtgagcggagatcacgccattgtgctgcagcctgggcaacagagcgagactctgcctcaaaagagaaaaaaaaaatatccgggcctggtggtgtttgcctgtagtcccagttatgcaagaggctgagctgggaggatcacttgagcccgggaatgcaaggctgcagtgagccttgattgcrccactgctctccagccagggtgacagagtgagaccccatcccctcctcaaatttttttttttttctcacatcaactaaggtgattgaaattcaccatggtcaaaaatctccccttaaaatatacctaacattagaggacttaatagctgaaatcattgtgtaccatggtttagggattctttattgaacaggtaggtaaatgagcacttacgtcctatgtctcatttgtgtcagaggtcagggcctgcttaaaatagttcagtttgcacacttaaatttggccaggagtttgtcacttgatatttatataattattttggccgggtgcagtggctcacgcccgtaatcccagcactttgggaggctgaggcgggcagatcacctgaggtcgggagttcgaaacccacctgaccaacatggagaaaccctgtctctactaaaaatacaaaattagccgggcatggtggcgcatgccacctagctacgtgggaagctgaggcacaggagaatcacttgaaccaggaggtggaggttgcagtgagttgagattgtgctattgcattccagcctgggcaacaagagcgaaactctgttttttaaaaaaaaaaaaaaggggccgggcgcggtggctcacacctgtaatcccagcactttgggaggccgagacgggcagatcacgaggtcaggagatcgagaccatcctggctaaaacggtgaaaccctgtctctactaaaaatacaaaaaattagccgggtgtgttggcgggcacttgtagtcccagctactctggaggctgaggcgggagaatggcgtgaacccgggaggcggagcttgcagtgagccgagatcgcgccactgcactccagcctgggctacagagcgagactccstctcaaaaaaaaaaaaaaaaaaattattattattatttttagtcaactaaaagtgactcaaagtttgagttacttttatctttagacagaagaggattagtttattttttaaatcttaaaagtgatgaaaacttctgtaaggaaaaagttaaagtgacttactagtaaagttacttactgctgacttaatgaagaattactagagcagagatttcactgtccaagacatgtcatctttattaagaagtttaggtcactaaatgctgtttggtgctgagtgctctttgacattgtgaagaagctagcagatgcgttttcccgtgtcacctacacacaagcagaatatttctcattctctctccgtgcttagatcagcctcattgtaagtgagacagtcatttgaatctgaatcacctttggacatcttcgaatcatctttggacaaaaagatatggcccrtatgatcatgtcccagaataactgttaactgttcatttaactcttacgtcaaaagacatcactatattttcacctctttgtcttcaaagatgatggtgtctgttaagagttactagaaagaggggctttaggccattgttgtggctcacgcctgtattttcagcattttgggaggctgaggtgggaggatggcttgagcccaggagtttgagatcagcctgggcttaacataatgagacctcgtctctacataaaaattagccaggtgtggtggtttgtgcctgtagccccagctactcccgggagctgagttgggaggatcgcttgagactgggaggttgaggctgcagtgagccatgatcatacgtgtcatgcctagcagtgaacaccaggttgtgtctggtcttctgcagtctgccatggtgaataatcccgtacgtgtgtcatttcacacgctgcaggtgaatctacagggtgaattcctagaagcgggattgctggctcaaaagtgaaatgtattttaatgttgcagtttaccctcggtagaggttacacctgaccagatccccccaggaatgcatcacagtacctgcaggcttcctcagagcttgcctttacaatatagggttacactcttcagggtttttggggtttcgtagagaaatgatgtttcagtataatttctacttctatttttcttagtaagtgaggatgaagtttatcttttcatatatttaagggtcgtttctgtgaaccattgcttcatgtctttttcacttttttctattgtctcattttcctcaaaatagaggcactgtttatgtattacagagattaggcctttgtcattagtcttttcctgtgaacgagatcacatagattatttgtttcttttctggcttttgaatttcagccatcattttaaaaaatacttccccatggtttttgtccagttcttttgtaacttcttgttctccatttcaatattggatgtttggcttttgttcctttgcgtgtttggtatgcgatatggatcccccttagtctttttgtctagcatcaatatatttattttatactgtccttcagattgatgatgatttccagagttcttggggctttaatgcctgttgcgtttacagactctcatccgggttggttgtttcttttttgttttgtaaatcagtttatttatttactttgagttcatcttcagtgagcttgttctttttgtttgttcttttgtttgtgagaatcccaaagatccaaaattttgggtttttcatttgcttctaccatgttcctcaaaactcattcagagaagaacagtcattgtgtcctgccctgtcattagaactgtctcctcacactccctttcctgagactgtcgccttctggagtttgtgtctgagttctgattcccttcctgtggccaggctgctaggagaccctcccacgggttcccacagcactagagttgataggcttagttctgttcttcgggttcttgtttctggccccgggggatttcccggtctttctcataatctcaattacacttttaaacggcttgtcgtagcatgtgtttcatcctgtttggaacagcaagccttgagagttacatagctggctgtatttcaggagccctcacatatctcacactccagccaaaataacctattcccgcaacaggcggtcgtggcgtggcctctgtacgtgagagccgtcgttcttgttaagtggtccgcttttcctgccaacaccaccctcctcccagggcatctctgttatccctcaggtgcccaggtcctttgggaagcatttccagccttccctcgcacatgtaggcaggctctcctgtgtgcctctccgctctcacagttccctgttcttgcctctcttgaagcaaaataccctgcacattgccattrttggatggcttttggttctgttttggggaagtggagatgtgtgttctgctcaagcctgagctcttggaaggagtcgattttgtgttacgatcttcatgcccagtgcctaacacagtgtctggtccctagagcttgatcggggcagggagacagtcagctggtacaaggacagttagtccgactgctctttgcttattggattgcctcaaagcagaattaacttctcaggctgtttgtgcttgagatgtcacatgaaaacatgttatggccgggcgtggtggctcacacctgtaatctcagcactttaggaggctgaggcaggcaggtcacctgagatcaggagctcaagaccagcctggccaacatggtgaaaccccgtctctactaaaaatacaaaagttagtcaggcacagtggcaggcgcctgtaatcccagctacttgggaggctgaggcaggagaaccacttgagcccaggaggaggaggttgcaatgagctgagatcgcgcgactgtactccagcctgggcaacagggcgagactctgtctcaaaaaaaaaaagttataaaatcctgatcctgatcctcctagtttatagaagttacagctgggttttttttaatttacttaaactctttttttttgtactagaggatagcttytgagctacagagtacactaccaattaacagtggtggtttgttttcatttaaaaatgtgttttgggctgggtacagtggctcacgcctgtaatctcagcactttgggaggcctaggcgggcagatcacctgagtttaagaattggagaccagcctgaccaacatggtgacaccccatctctaccaaaaatagaaaattagccaggcgtggtggtgcatacctgtagtcccagctacttaggaggtggaggcaggagaattgcatgaacccaggaaggggaagttgcagtgagccgagatctcaccattgcactcctgcctgggcaacargagtgaaaaaaaaaaaaggaaaaaatgtggtttggttttttgcattgtggcatattcctatattaaaagtgtgattgtttaaaaaaaaatgagttagttttactgactataaaaagccaagtagaggctgggcacagagggtcacgcctgtaatcccaacactttgggaggctgaggcaggcagatcacgaggtcaggagatygagaccatcctgacacagtgaaaccctgtctctactaaaaatacaaaaaattagctgggcgtgatggcggacgcctgtagtcccagctacttgggaggctgaggcaggagaatcacttgaactcgggaggcggaggttgtagtgagcagagwtcgcaccactgcactccagcctgagtgacagagcgagactccatctcaaaaaaaaaaaaaaagaaagtcaagtagaaaagatttggaggttagaaaatgtccattttgtatcatgacatatattgaagacatcttagcagtattctccaaaataaagttgacatcattaccaagaagttgtttgacggctgatactgtttcacatagttccaggaatgaagaagtgggtgccaaatggaggtgaggaaacaactcaagcggtgagaaatttgcagggcctctcctggggcttgtataaaatgaggaacttacctaaatgggttgtgctgaaaacatcctgcgaaaacatcctgcgacaggcctgtgccacttaactggaggttctggtatttgaagcaagtcctaattagatgttgcatctttcttaacagtttgctctcgctcagctgagaaacagtgccagatattaggcatgctggctcagcggtcttgttgcttggaatttcacagacacayacccgctcaggacatggcggcaacacatttatagaaaaaaacaaattcattattaaccagatggcacaaatatatgaatgtttcagtgagaaaagtgaaaaggagcaaagataaacctttcgaggaaacatccatccacttcgtgtcaataggtgttcgtgatcggatgccgtggccgtcattcctggcggcgcagcccctgtgcccccgctctgtgcgtgtcagcactggctgttttctgctcagaggccccagccctacctcagcacagtgcccccagctcaaaggtgacctttccctgaggagagtcaccaaattgcccacctgtggtttcagaacaggacaaggtagacatttctttcagaggttggggtggttttttttttttcttttttcttttttttttttttttacgtccccttcatatgctgtcaagctctattgtacagacggaacacttaccacattcacatagaaagaaaacagcatcttcaggctgggcacggtggctcatggggaggccaaggtgggaggacatttgaggttaggagttcgagaccagcctggccaacatggtaagaccctgtctctagtaaaaatgcaaaaattagccaagcatactggcgcatgcctgtaatcccagctactcgggaggctgaggcaggagaatcgcttgaacctaggaggcggaggttgcagtgagccgagatcgcaccattgtactccatcctgggcaacagagtgagactctcacaaaaaacaaaaaacaaacaaaaaccacagaaaaaaacccagcatcttcatccttgcatatggtaaaaaaatccacccttggcagcagcctttcccgagtcagaagcgctgctctctggagtcgcaggcactgcctggctccgtccggctccccctgaacagagcactgaaggctccgggaagacgctttggtcagaccgcagacccttcgcctttgggtgacagttccctttcctgctggaatctttttttctttttttttggagacccggtcttgctttgtcacccaggatagatggagtgtggtgttttgatcacggctcacagtagccttgacctcctgggctcaagcaatcctcctacctcagccccctaagtagctaggactacaggcgtctgccaccgcaatcagctaatttttatatttttttgtagagatggggtttcaccatgttgcccaggctggtcttgaactcctaagctcaagtggtctgtccgcctcagcctcccaaagtgctgggattacaggtgtgagccaccatgcccggccctgctggaatctttgacttaaagttccactgtggcttgaggctggagttggaacgttatctcttaggcagagctttactgggtcccttctctcttcattcacagggggccctccctttagatctctgtctattcagacaggcggccctttctcagatgggatatagacagatgatcttttgaaataagtgagaagatttttaagattagaataatatgaagaatatctttctggccgggcgacgtggcttatgtctgtaatcccagcactttgggaggctgaggtgaggggattgcttgaacccaagagttcaagaccagcctgggcaacatggcgagaccctgtctcgaagaaaatacaaaaattagctgcatgtggtggtgcatgcctgtagtcccaggtactgaggaggctgaggcaggaggatcctttgagcccaggaggtcgaggctgcagtgagccgtgatcacaccagtgcactgcagcctgggcaacagcatgagaccctgtctcagaataaaaaagtgtttctttctcagaagacagagtacagaagatgtttgtttttgttttttctctctctgtgctacaggggaaggtgtggctcattgactttaatccatttggtgaagtcacagattcactgctgttcacctgggaagaactgatatctgagaacaacttaaacggcgattttagtgaagttgacgctcaagagcaggtacaacatttttaagacagatacartgtaaacctttccagtctactgactgactgcttgttcttcagacgcataggtaggcggcaatgkccaggacccttgggaagcgcagagtgtaacacagctttactaatagctaacctgcccatggtggtggtcaaagaaggsggccccacttaactttatatacagaagtcaggatcatctgatcagtttttttagttctttttctgagctkcttctgtcacacccacctggaggaatcttggtcccagatcagctcatgcatctgttccttctgaccccagccccagctgctgaggccgacagagaagttacacacgtgcagcccagcggattcctgtcagctttctcctccatttccacggtgactggctcacgccttgatgcttctcagtctcccatcattccttccttcctctcagcagatgatttaacttgctgtttcccggaaaagggaacccactgatgagaattccctcrgttgatttctcatcacacctacaagcttgtccgtcccttcctgagtctaatctcccccctccatacacttgtgtccccctctgtcatctccccactctggacactgtgtcctcctctgtcacctcccccctcagtacactgtgtcttcctctctcacctccccctcaggacactgtgtcctcctctctctcacctccccctcaggacaccgtcctcctctctcacctcccactctggacactgtgtcctctctcaccgcccactccggacactgtgtcctcctctctctcacctccccctcaggacactgtcctcttctcgcacctcccactctggacactgtgtcctcctctctcacctcccactccggacactgtgtcctcctctctcacctccccctcaggacaccgtgtccccctctctcacctccccctcaggacactgtgtcctcctcctctttctccagatgccctctgctctttttgcaattcttcctctctatcaactctgtccatccggatttagtcatgytcagatacctcccatccgaaaaaaacaaaacattgttcaacccggtttcttcacccagccactctctcctttcctgccagcttcacagccagactttcctgaaacaactttgtagtgctgttttctgcccataaaagtaacatgtccaagacgggcggatcaggaagtcagggtatcgagaccatcctggctaacacggtgaaaacctgtctctactaaaaatacaaaaaaaaaattagccrggcgtggtggcgggcgcctgtagtcccagctacttgggaggctgcggcaggagaatggcatgaatccgggaggcagagcttgcagtgagccgagattgtgccactgcactccagcctgggcgacagggcaagactgtctcaaaaaaaaaaaagtaacgtgctcattcttaaagaaaattataaaatcacttatgatttgagaaccttgagaaccagtgtttatattttgatacataacgtgcatttaaacacatgcatagacctttgtaaataaatgaaatcatactacatactcaattacatgtcctgagattttcacagtgttctcttgtgagcattttatatcttttaaaaaatagttttgggccagacgtagtggctcacacctgtaatcccagcactttgggaggccgaggctggtggatcacctgaggtcaggagttcgagaccagcctggccaacatggtgaaaccccgtctctactaaaaatacaaaaaattagctgggcatggtggcagatgcctgtaatcccagctacttgggaggctgaggcaggagaattgcttgaacctggaaggcggatgttgcagcagtgagccaagatcacgccattgcactccagcctgggtgacagagcgggactccgtctcaaaaaaaaaacaggccaggtgcggtggctcacacctgtaatcccagtactttgggaggctgaggcaggtggatcacctgaggttgggagttcgagaccatcctgatcaacgtggagaaaccccgtctctactaaaagtaaaaaaattagccaggcatggtggtgcatgcctgtaatcccagccactcgggaggctgaggcaggagaatcgcttgaacctgggaggtggaggttgcgatgagctgagattgctccattgcatccagcctgggcaacaagagtaaaacttcgtctaaaaaaaaaaaattagttttggcagctgggcatggtggttcatgcctgtaatcccagcactttgggaggccgaggcaggcagatcacctgaggtcaggagtttgagaccagcctggccaacatagtgaaatccctatctctactaaaaatacaaaaattagccggacgtggtgacgcgcgcctgtagtcccagctacttgggaagctgaggtgggagaatcacttgaacctgggaggcagaggttgcagtgagcaacagagacctgggcaacagagatcgtgcccctgcactccagtctgagaacagagcgagactttgcctcaaaaaaaaaaaaaammatagtttggcatgggtgcaacagcccacctagcctataatcttaacactttgggaggccaaggcaggaggattgcttcagctcaggagttcaagaccagcctgggcaacatactgagatattttctgtactaaaatttaaaaaactcagctgggcgtggtggcgcatgcctatagtcccagctacttgggaggctgaagtgcgaggttcacctgagcccaggaggtcgaggctgcagtgagccactgcactccagctggaattacagacgtgagccaccgtgcccggctcattttaacttaagcatcttcctttctcctcatcaagtacagaggaaaacatggagttgaaattgttttgctaggttcttttttagttcacagaataggcctaaaaataaatgattgatattctttctcctttttcttctttgtacaggattccccagctttccgttgcacaaacagtgaagtgacagtccagcccagcccctatttgagttaccggctacccaaggactttgtagacctctctactggggaggacgctcacaagctaatagacttccttaagctggtaaagtctatgtgcatttagtatgctggccatcttttcaaatagaccttcaaattggcttttatataayatttcattggaatcctgtatcacctagactttgatggttatgaatggaaccaagttactgagttagagcattttctaattaaatatgaaataggagctgaaggcataatttattgattagaatgacagaaaatgtttttatgctgtacatgccttttgaacatttttcaaaatacttgtaactttgaagaaagtgtgtatattgttagaaggctgtaaggagagcaggtctctgctctggtggtgattttactcaagaggggatgtgaatatttatatttttgtgtggatttctgtgtaggagtttttgtatgtatggaagaaagagaagaaaatactcaaatacctgaggataatttgctcaggagtcaragtgataaactagtttaatgaattaaagcatggttttccatgacaatttttaattacatcctttgccaagacctctagaaaattacacctgctgagcagatatcccaaggagcatgtgctattttaasatccccttggttttctttgacagaagagaaatcagcaggaggacgactgatgagcgtrctgkarctggaraaraggaggccccgccccmccgctccgggagctgctcatcagccgcaacttcctgccgaccctgatgcgggtgggccgagcagtgtggacatcagccrctttttatattcatgtacattcmcctgggraaaaaaacggagggactttgctacttgtaaaaataacataataaatagatyttaaacataggaaaaccatactgttctgawaataaaatgctttctatgaaatacgttgcttttctaccgagtcattattttatttatttattttaattttaattttttgagacagtctcgctgtgtcgcccatgctggagtgcactggtgcgatctcggctcactgcaacctccacctcctggttcaagcgattctcctgcctcaggctcccaagtagctgggattacaggtgcatgccaccacacccagctgagttttatatttttagtagaggtagggtctcaccgtgttggccaggctggtctggaactcctgatcctcaagtgatttgcccaccttggcctcccaaagtgctgggattataggtgtgagccaccacgcccgccctgttttgtttagggacagtcttgttctgttgcccagtctggggtgcagtggcacaatcacagctcactgcagcctcaatctcctggactcaggcagtcctgcctcagcctcctgagtaactgggactacaggtgcacaccaccacgcccagctgatttttgtatttttttgtagagatggggttttgccatgtggcgtttttaaaaggccaccatttttaagtgatgatatcaattgtgcctaatttaccgaggctttatgatgtgccagacattctactaagagctctttctgtattagttgacatcaccaagcaatttgaaggatacagacatcacaatttcccagggtacctgcccgacgtggtatccggtggtaatcttcgtcctcagtacttgatctttgtattcagtacatcagatgccctttttttcttttttttaagtagtagagatggggtttccctgtgttgcccatactgatctcaaactcctggccttaagcaatcctcctgcgtcagccttccaaactgctaggattacaggtgtgagccactgtgtctggcctcaattgccatttgtggggccagttgtttttttgtttgtttttgagatggagttttgttcttgttgccgaggctggagtgcaatagtgccatcttggctcaccgctacctctgtctcctgggttcaagcgattctcctgcctcagcctcctgagtagctgggattacaggcatgtggcaccatgcccagctaattttattttaagtagagatgaggtttctccatgttgatggggcttgtcttgaactgctcacctcaggttatctgcttgcctcggcctcccaaagtgctgggattacaggtgtgagccgccgcccctggcctcaactgtttaatgtacaggtacttcagaaatacttttgtttttttaaactgcttacaggtgcctatccacctatgatggatttagtatcaagggttgattttaagtttagctctggaagctggctttgtcaagatggcattttaccaagccaaaaaaaaagtaaatatatttgataccaattgaaaacattcagactaggctggatgtggtggctcatgcctgtaatcccagcactttgggagcccgagaccggcagatcatctaagatcaggagttcaagaccagtctgaccaatatggtgaaatgccatctctactaaaaatgcaaaaattagctgggtgtggtggtgggcgcctgtagtcccagctacttgggaggctgaggcagaagaatgacttgaacctgggaggcggaggttgcagtgagctgagatcgcaccactgcactccagcctgggtgacggagctagcctccatcccccacaaaaaagaaaactatattcagactatataaaataaaaagacccaagcaaaatttggcagagagttcataaactgtacaattctcattacacttttgcgcacattttcctggggaaactggacttcaactcccaggtcactttctaaaatgtgatttttgtgcattgtttacttagtgtatttaattttagttgattttcctgatgttaatatcaggaaatataggatactatgcaggaaatattctcctaaagcccagtataatttatgcctgcctaaaaattacttctgttttaagacagagtctcactctatctcccaggctggaatacagtggcacgatctgagctcactgcaacctccgcctcttgggttcaagcaattctcctgcctcagcctcctgagtagctgagattacaggtatgcatcaccacatccagctaatttttgtgtttttagtagagatggggtttcactatgttagtcaggctgatctcaaactcctggcctcaagagatccgcccgcctcggcctcccaaagtgctgggattacaggcgtgagccaccgcgcccagctcttaagttttgaatcgtccttttattttactggcatttgttctttctttgaggtacctcaggcttgtgcttgaattcagaaaatggaaacttgtgtgcttcctcagcgtgtccctgcagtccttccttctgaagagaagacgctgctgcagttgcctttgaagggttggggtaaatatgtgctttgtcctgcaggtggtgtcatgtcgcatgggcctcctggagacagcacgctttgccagttttgttttcaagagtctcatttgatttgcattttctgagttcgtaaggttttctcatctcaaccatttctctttttgatgattgaggatcgttaaaaaacaagcagaaaccttatgtgacagtttttttgactaagtttgttacctgcaaagggtaagaagagttttctggagtccgttaagtgagataactcataaacctgtagcgtagtgcactgcacgtcacagaccacagacaaatggtagctattgtcaatcattctgcttggcagacttctgtacagtatatgaaaggcacgttctttttaacagagtcaagaaaaaaatatatatatatatttagtagagacggggtttcgccatgttgaccatggctggtctcaaactcctgacttcaggtgatccatccacctcagcctcccaaagtgctgggattgcaggtgtgagccaccacgcccagtcccttcttttcttttttgacagatgacgaaactgctccccaaagatgttgactttcccaaaaccttccctgtagcaggatctaaacattgttttattcacatgttgtccttggctcatgctaaggaaagaataaatcacggtaaacttaccactcacacacagtgcaggtatgtatacaccttagaaagatacagctgagcacggtggctcacgcctgtaatcccagcactttgggaggccgaggcgggcagatcacaaggtcaggagatcgagaccatcctggccaacatggtgaaaccctgtctctactaaaatacaaaaaattagccgggcacggtggtgcattcctgtagtcccagctactcgggaggctgaggcaggcgaattgcttgaacccgggaggcagaggttgtagtgagctgagatcacgccactgcactccagcctggcagcggagtgagattctgtctccaaaaaagaaaaaaaaagaaagatgcttgaggactaggccgtgcatggtggctcatgcctgtaatcccagcactttcggaggccgtgttaggtagattgcttgaggttaggagttcaagaccagcctggccgacatggtgaaaccccgtctctaccaaaactacaaaaaattagccaggtgtggtggtgcgcacctgtaatccccacgatttgggaggctgaggcaggagaatcacttgaacctgggaggcagaggttgcagtgagccaagattgtgccactgcacttcagcctgaaacagcaagattccatctcaaaaacaaacaaacaaaaagattgaggaacagaaatctaagacatcgtaacaaaaatgtagtgaagaaatagctaaaagttatacggttaggcaaaaagtctggcatgaatgacctaaagagagaatgcattcaggtgcgtcttttttttttttttaatcaaagaaaaccaaaataaaatgatactggcaacatagtaagaccctgtctctaaaaaaagttgttttttttttttaaagacaaattagccagacatgctggtgcatgcctgtagtcctaacgacataggaggctgaggcaggaggatcgcttgagcccaggagttcaaggctgcagtgagctatgatctcaccactgcaccgcctcccctccccgcgcaaaaaaaaaaaatagataaaaaggaaagaaaggaagagtcctggcgcggtggttcacacctataatcccagcacttttggaggccaaggtgggtggatcacctgaggtcaggagtttgagactagcctggccaacatggtgaaactctgcctctactaaaaacacaaaaaaattagccaggcattttggcacgtgcctgtaatcccagctactcaggtggctgaggcaggagaattgcttgaatttggggggtggaggttgcagtgagccgagattgtgccactgcactccagcctgggcaacaggcacagagccaggctgaagccctagtgttctccaaactgtcaccccagactcacaatatgtactagataaattgcaggtcgtcttcttttcttccttccaactgagttcattcccccaccctccctctgttttctcctcctaagaagtcattttgttcagccacagtttataagcagggcccactgtttaggtctgaggaacaggacagggttgtactaagcacttaggcaatgattcttatctgggaagggctgacagcttattctttaatgtctacaaattgctttgaagacaaaaaatgctacaaaaatgtcaagtaatgttattgcttttaggaacatttgttttccaccttgtgaaaggcatatatctcaggtcaatgaaagctcaagcttccaaagccagactgagtttctctcacttacaaaagaagcatagcctcctttgcatgtattggtaatgctgagagcattggagttcttagttctttacaaaaaaaaaaaaagtcaccaaagaaagaggacaccaggaggccgggcacggtggctcatgcctgtaatcccagcactttgggaggccgaggcaggtggatcatgaggtcaggagatcaagaccatcctggccaacatggtgaaacctcgtctctactaaaaatacaaaaattagctgggcgtggtggcacatgcctgtaatcccagctacctgggaccctgaggtaggagaatcacttgaaacagggagtcggaggttgcagtgagccgagatcgggccactgcactccagcctggcgacagagtgaaactccgtctaaaaaaagaaagaggacaccaggagctggacgcagtggctcaagcctgtaatcccagcactttgggaggccgaggcgggaggatcaattgaggtcaggagttcgagaccagcctgaccaacatggcgaaacccccgtctctactaaaaatacaaaaattagccaggcgtggtactgggcacctgtaatcccaattactcgggaggctgacgcgggagaatcatttgaactcaggaggcacaggttgcagtgagccgagatcatgccatttcactccagcctgggcaacagagcgagactctgtctcaaaaaaaaaaaaaaaaaaaaaagcgccaggtagggacataggaaagaaggaatggagaggaaggaatactctcaaatacttttttttttttggagactgggtcatgctctattgcccaggctggagttcagtggcatgatgatagctcactgcagcctccaatggctgccctcaagcgatcttcccaactcagcctcagatgtagctgggactataggcacacaccaccatgcctggctgattttactttcattttttttgttacccaggatggtttggaacccctagactcaagtgaacctcccgtctcagcctcccaaagtgctgggattacaggcatgagccacgatgcctggccactctcaggtcctcatggggaaataaatggagtataaatggatacagcattgtaaacagacaatttaaaa

SEQ ID NO: 97808 - DNA, 84156 bp, Homo sapiens
  misc_feature (1)...(84156): n = A,T,C or G
aaaaggaaaattaaagaaaaggaaaagaaaagagagagagggaaggaagaaagaaagagagaggaaagcaagaaagcaagaggccaggtgctgtggctcacgcctgtaatcccagcactttgggaggccgaggtgggtggatcacgaggccaggagatcgagaccatcctggctaacatggcgaaaccccgtctctactaaaaatacaaaaaattagccaggcgtggcagagggcacctgtagtcccagctacttgggaggctgaagcaggagaatggcatgaacctgggaggcggagcttgcagtgagccgaggtggcgccactacactccagcctgggtgacagagccagactccgtctccaaaaaaaaaaaaaaaaaaaaaaaaagaaagagagaaagaaagagggtcttgctatgttgcccaggctgatctcaaactcctgtcctcaagtaatcctctgcctcggcctcccaaagtgttgggattacaggcatgagccacctggcctgcatctgatttatctttgaaacatccagggactagtaaaattggtgcacccagaccaattttttttttttttttgagacagaattttgcacttgttgcccaggctggagtgcaatggcgcgatcttggctcactgcaacctcagccaaggaattcgggcagcctctagaagctgaaaagggaaggaaatagattctcccctagggcgtccagaaggaacccatcttcaccaacaccttgtagtcctgtaaggcccgtttcagattctgacctctagaactataagataataaaactggccgggcacggtggcttacgcctgtaatcccagcactttggaggccgaggcgggtggatcacgaggtcaagagatcgaggccatcctggacaacatggtgaaacccgtctgtacttaaaaaatacaaaaaattagccgggtgtggtggtgtgcacctgtaatcccagctacttgggaggctgaggcaggagaatcacttgaacccgggaggcggaggttgcagtgagctgagatcacgccattgcactccagcctgggcaaaaagagcaaaactctgtctcaaaaaaataaaactaaaataaataataataataataaaactgagtttgtggtaatttgttacagcaccgagaggaaacaaatacaactgcctgccacctgcatccttcccatgcgcccccatacatgcatgcatgcatgcattcattcattcagtgttatgtgttgctccaaacactgaggacacaggagaacaagagacaggtttctgccttcaaggggcttacattctagagagtgcagacagccaatgaacaactcaggaaataacttcagtagtaagtggcatgaagaaaacgaaacaaggtactgggaaagtgaccactgctgctcacctggaggagttaatttagacagagtggtcaagaaggggggtctctgaggcagtgtcatttgcactaagctttaaataagaaggagccagttttgtgttgacctgaaagaagagcattgctggcagagcaactagtgaggggataaggtctgaaggaagaatgagcttggagggtctgaggaacagaaaggaggccagtgtggtggaacagaaagaatcatggggaggccatggcagaggaggtggttagagaggaagggaggggccagaccatgcaggggcatatataccacagtaaggagtgtacattttaattacagagagaagcttaagaatttcagtgggggagtgatgagattgtattttttttttttttttgagacagagtcttgctctgtcgcccaggctggagtacagtggcttgatcttggctcactgcaatctccgcctcctgggttcaagcaattctcttgtctcagcatcctaagtagctggaattacagacaagtgccaccacacctggctaatttttgtatttttagtagagacggggtttcaccatgttgtccaggatggtctcgatctcttgacctcataatccaccgcactagtcttggcctcccaaagtgtttggattacaggcataagccactgcacctggccgtttttttttttttgtttttttttgttgttgttttgttttttttttgagatggagtctagctctgttgcccaggctggagggcggtggtgtgatctcggctcaccacaacctccgcctcccaggttcaagcgattttcctgcctcagcctcctgagtagctgggactacaggcatgtgccaccacacctgactaattttgtatttttagtagagatggggtttcactatgttggccaggctggtctcaaactcctgacctcatgatctactgccttggcctcccaaagttctgggattacaggcgtgaggccccactcccagccctttttttttttcttttttaagagtcaggatcttgctctgttgcccagactggagtgcagtggcactatcttggctcactgcagcctcgacctcccaggctcaagggatcctcccacctcagcctccccaatagctgagactacagtcatacaccaccacacctggctaatttaaaaaattttttttgtagagacgaggtttcaccatgttgatcagactggtctgggactcctgggcttaagggatcctcctgcagcactggcattacaggtgtgagccactgcacctggcagtggtttgctttttaaaataatcagccttcgctgggtgtggtggctcatgcctgtaatcccagcactttgggaggcagaggcggatggatcacttgaggtcaggagttcaagaccagcctggccaacatggtgagacacccatctctgctaaaaaaaaaaaaaaaaaaaaaaaaaaaatcagctgggtgtggtggcacatgcctataatcccagctacttggagactaaggcaggggaatcgctgaacctgggaggtggaggttgctgtgagccaagattgcaccactgcattccagcctgggtgatagagtgagactctgtctcagaaactaaactaaactaaaacaatcagtcttgttgctgtgtggtaaaagaactgtggtggacaagaatagaggcaagaaggccaggtaggaggccccaatataatctaggtgagagataatggtggcctgaacaagtaccacagcactgaaaaagaaatctctcttccatttgccctccagtcacccatttcttttccctggaggcaacaactgttaatagtttcttgagaatcattctggaaatattccatgcacaaacatagcaaatgcatgtgtaatttttttttttttttttagacggagtctcgctctgtcgcccaggctggaatgcagtggcatgatcttggctcattgcaacctccgcctccaggttcaagcgattctcctgcctcagcctcctgagtagctgggactacaggcgtatgccaccatgtccggctaattgtttgtatgtttagtagagacggtttcaccatgttagccaggatggtctcaacctcctgacctcctgatccgcttgcctcggcctcccaaagtgctgggattacatgctgtaattgttttttaagaggagaatttagaaagattactagaaaacggtcgggcatggtggctgacgcctgtaatcctagcactttgggaggctgaggcgggcggatcacaaggtcaggagatcgagaccatcctggccaacatggtgaaaccctgtctctattaaaaatataaaaattaggccaggcacggtgtttcacgcctgtaatctcagcactttgggaggccgaggcaggtggatcacaaggtcaggagttcaagaccagcctggccaacatggtgaaaccccttctctactaaaaatacaaaaattagtcgagtgtggtggcggatgcctgtaatcccagctacttgagaggctgaggcagaggattgcttgaacccgggaggcggaggttgcagtgagccgagatcacgcaactgcattccaacctgggcgacagagtgagactctgtctccaaaaaaaaaaaaaaaaaaaaaaaaaattagctgggcgtggtggtgggtgcctgtaatcccagctactcaggaggctgaggcaggagaatggcgtgaacccgggaggcggaggttgcagtgagccaagatcgcgccactgcactcaggcctggtgacagagcaagactctgtctcaaaaaaaaaaaaaaaagaaaagaaagattactagaaaattagctgggcatggtggcacatgcctgcaatcccaactactcgggaggctaaggcaagaagaatcgcttgaacccaggaggcagaggttgcagtgagctgagatggtgccactgctcttcaatctggcaagagtgagactccatctcaataaaaaacccccaagaaacaaaaacaaaaaagaatgattactagaagtgtatcttgtttatagagtcatagagagcttgttgtgtttatacagaaatgattatctttcctagataaaactgtccctagagtagaggagcaatttactactccagccctaatcctgtgctgatgaaacaagccttagttttatagtttggtctcctgagttaacttcccggataggagggactatcccaagaaagtgactgatgttagttgtttattttttttgaaatggagtctcgatctgtcgcccaggctggagtgcagtggtgagatctcggctgactgcaacctctgcctcctggattcaagcagttttctacctcagcctcccgagtagctgggattacaggtgcctgccaccatgcccggctaatttttcgtatttttagtagagacggggtttcacttcttggctaggctggtcttgaactcctgacctcgtgatccacctgcctcagcttcccaaagtactgggattacaggtgtgagccaccacgcccagcctggtttacctatttattttgatcgttattttagagtgtactctttctgcttaaaagaaacaagttggtcaggcacagtgactcatacctgtaaccccagcaccttaggaggccgaggtgggtggatcacctgaggtcaggagttcaagaccagcctggccaacatggtgaaatccccatctctactaaaaatacaaaaaattagccgggcatggtggcgcacacctgtagtcccagctacttggaaggccaaggcaggagaatcgcttgaagccaggagacagaggttgcagcgagttgagattgtgccattgcactccagcctggacaacaagaacaaaactccgtctcaaaaaaaaaaaaaaagaaaaaaaaaaaagaaaccagttaactgtgaaacagcctccggcaggtctttaggaggtattccagaaaaaggcatgttatcacaaaaggtgagtgttattgcccctgaagatcttccagtgggacaagatgtggaggtgggaggcccaggcgggtggattgatgatcccgtccctgggtaggcctaggctaatgtatgtgttcatgtcttagttgtcttttccttttttttttttttgagatggagtctcgctctgtcacccaggcgagagtgcagtggcacaatctcggctcactgcaagctctgcctcccgggttcatgccattctcctgcctcagcctcccgagtagctgggactacaggcgcctgccaccacgcctggctaatttttttgtatttttagtagagacgggggtttcactgtgttagccaggatggtctcgatctcctgacctcgtgatctgcccacctcggcctcccaaagtgctgggattacaggcgtgagccaccgtgcctggcctcttttcttttcttttgagaaaaggtcttcctctgttgcccaagctggagtgcactggtgtgatctcagctcactgtaatgtctgcctctgggctcaagcgatcctgtcaccttacccttccgagtagctgggacgagagaggcacacgctaccatacctggctatttttttttttttttttttttttttgtagagacaggggtttcaccatgttgcccaggctggtcttgaactcctggactcaagcagtcctcccatcctggccttcccaaagtgctgggattataggcatgagctaccgtgcccggacatgtcttagtttttatttttattttttattttttgagacagagttttgctttgtcacccaggctggagtgcagttgcgccatttcggctcactggaacctctgcctcctgggttcaagcgattattgtgcttcagcctcccragtagctgagatgacaggtgcgtgccaccatgcctggctatttttttgtactttagtagacacagggtttcaccatgttgcccaggctgctctcgaattcctggcctcaagcaatccacccaccttggtctcccaaagtgctgggattacaggtgtgaggcactgcgcccggcccatgtcttagtctttaataattttttttttttttgagacagagtcttgctctgttgccaggctggagtgcagtggcaggatctcggctcactgcaacctctgcctcccaggttcaagtgattcttctacctcagcctccygagtagctgggactatagacgcacaccaccacgcccagctaatttttgtatttttagtagagatggggtttcaccatgttggccaggatggtctcaatctcttgaccttgtgatctgcctgcctcggcctcccaaagtgctggaattacaggcgtgagccactgcacccggccaaaaaaaattttaagtaaaaagatcaagaatttttaaaatagaaaaaagcttatagaataaagatataaagaaagaaatatttttgtacagctgtacaaagtgtttgtgttttaaactgttattacaaaagagttaaaaaggtaaaacagttgataagtctataaagtaaaataattatagtaacctggtgccagaggcagtggctcgtgcctgtaatcccagcactttcagaggccaaggtgggaggattgcttgagctcagaagttcaagacaagcctcccctgctagttgagtgagatctcgtgtctacaaaaacaaacaaacaaacaaaaaacaacaacaacaaacaaacaagaaaagaaaaggaaaattagccaagcatgatggagcatgcctgtagtcccagtactcaggaggctaaggcaggaagatccattaagcctgggaggtagaggctgtaatgacccatgattgtgccacagcactcaagtgtgggtgacaagagtaagaccctgtctccaaaaaaaaaaaaaaagaaagaaaaaaaaagttacagtaaactaaggttaatttattattgaagaaaaaatatttaaaacaaatttgctgagcacggtggctcacgcctgtaatcccagcactttgggaagccgaggcaggcggatcacgaggtcaggagtttgagagcagcctgacaaacatggtgaaaccccgtctctactaaaaatacaaaaattagctgggcatggtggcacactcctgtaattccagctactccaggagactgatgcaggagaatcgcttgaacccaggagatggaggttgcagtgagccgagatcgcgccactgcactccagcctgggcgacagagcgagactgcatctcaaaaataaaaaataaaataaataaataaataaataaataaatttaatgtagcctaagtgtacagtctttataaagtcaatggtagtatacagttatatcctaggccttcacattcactcactactcactgactcacccagagcagcatctagtctggcaaactccatttatggtaagcaccccatgcaggtgtaccatttttaatcttttttttttttttttgagacacagtctcactctgtcgcccgggctggagtgcagtggtgtaatcttggctcactgcaacctccgcctcctgggttcaagcgattctcctgcctcagcctccggagtagctggggttacagccgcctgccactatgcctagctaattttttgtatttttagtagagatggggtttcaccatgttggtcaggctggtctcaaactcctgacctcgtgattcacctgtctcagcctcccaaagtgctgggattacaggcgtaagccactgcgccctgcccatttatttatttatttatttatttatttatttatttatttatttattgagacagagtctcactctgtcgcccaggctggagtgcaatagtgcgatttcggctgactgcaaactctgcctcccgggttcaagtgattctcctgcctcagcctcccgagtagctgggattacaggtgcccaccaccacacccagctaatttttgtattttttgtagagacagggtttcgccagcttggccaggctggtgttgaactcctgacctcaggtgatccacccgcctcagcctcccaaagtgctgggattacaggcatgagccatcgtgcccggcccatttatttgtattttttgagatagagtctcgctctgttgcccaggctggagtgctgtagcgtgatctcggctcagtgcaacctctgcctcccgrgttcaagcaattctctgcctcagcctcccaagtagctggrattacaggcgctaaccaccacaaccagctaattttttgtatttttagtagagatgggatttcaccatgttggccaggctggtcttgaactcctgacctcgtgatccacccgcctcggcctcccaaagtgctaggattactggcgtgagccactgagcccggcccatttttaatcttttatgccatagttttactgttcgtttccttccttccttccttccttctttcctccctccctccctccctccctctttctttcttttttttctcaagatggagtcttgctttgttgcctaggctggagtgcaatggcgcgatcttggctcactgtaaccttcgcctccagggttaaagcaattctcctgcctcagccgcacaagtagctgggactacagatacctgccaccacgcctggctaatttctgtatttttagtagagacggggtttcaccatgttggtcaggctggtcttaaactcctggtctcaagaaatcagcccgcctcagcctcccaaagtgttgggattaccagcatgagccacagtgcctggcctactgtatcttttctatgtttagatacacaaatatcattatgttacaattgcctacagcgttsagtacagtagcatgctgcataggttggtagcctgggagtaatagactctaccatatggccttggtgtgtagtagactataccatctaggtttgtgtaagtacactctaagatgttcatatgacaaaactgcctaaggatgaatttctcagaacatatccctgttcttgaggacacatgactctatttacatatgagaaaagaaagcatatgtccacacagactttgtacacaaatgtttgtagcaagttttttttctttttcttttttttttttttttgagtctcactctgtcacgcaggctggagtgcagtggcacgatctgggctcactgcaacctccacctcccgggttccggcagttctcctgcctcagcctcccaagtagctgggattatgggcgcctgccaccatgcctggctaatttatatgtttttagtatacacacatatatactgtgggattccatttatgtacgattctacaattctagaaatgcaaactaatctatagttgcagaaagcaggtcagtggttgcctggggacagtgctgggagtgacaggatggtgagattacaaaggagcaagaggcaacttctggggtgatctatatgttaattatcttgagtatggtgatggtttcatgggtatacacttgggtatatgtcaaaacttcggccagtcgcagtggctcatgcctgtaatcccagcactttgggaggcggaggcaggctgatcatggggtcaggagttcaagaccagcctggacaacatggcgaagaaaccatctaaactaaaaatccaaaaattagtgggcctcgtggcacatgactgtaatcccagctactcgggaggctgaggcagtataactgtttgaacttgggaagcggaggttgtagtgagccgagatggcgccactgtacttcagcctgggtgacagagtgagaccctgtctcaaaaagaaaaaagaaaattacagtccctaaagtggagtacagcagaattcaggggacctagaagttgaacagacctatatttaaacttgtccttgatatgtgaccttgggcaagttacttgttttgggttcccattcctttttttttcttttcttttctttccggatgaactactgtaccnnnnnnnnnnnnnnnnnnnnnnnnnnnnnnnnnnnnnnnctgcctcagcctcccgagaagctgggactacaggcacccgccaccacgcccggctaattttttttttgtattttttagtagagatggggtttcgccatgttagccaggatggtctcgatctcctgacctcgtgatccacccgcctcggactcccaaagtgctgggattacaggcgtgagccaccgcgcccggcctatctggcaggttctttgcaaagtcctttgcaaagattatttcatttagttctcaaaatgttcttgtgaagtgtttttaaattaatttttggaggkttagatagagtaacttgcccaaagctacacacaaagctaccaaagagcgaaggaaggactcaaacttaggtctgtcagactccgaagctgggctcttaactcctgcacgacactgccctctatggtcatcccgaggtactaacatcaatgaggcctggttaactactcatgacatcatctttaactgtagcctgagaaagtcacccaattttctttttctttttttttttttccagaaagaatttcgcactttcgccaggctggagtgcagtggcatgatcttggctcactgcaacctccacttccaggttcaaactattctcctgcctcagcttcccaagtagctgggattataggcgcgtgccatcacgcccggctaattttgtattttttagtagagatggggtttccccgtgttggttaggttggtctcaaactcctgaccttaggtgacccacccgcctcagcctcccaaagtgttgggattacagcygtgagccagggcgcctgatccggaagtcacctttcattcagagtgcctgaatcagggtaaatagtgcattatactagaaaaaaggatgtgtcttcaggacttctttctggggtccagggatgtgggagggagactgtattcctcttccccaccccaatcgatctcctcctctcctagtgctccccacacccctcccaatgtttctgggcctatctcaccttgctgccttcccacacattctcatatttcagaaatgatgagtccaacactgatctaagagagtagagagaaaaggttaggaaaatagccttgggaggcagctgtgaagtcagggtccctgggcctgtagatagtgagttgggactccaagtcacactgcacacttggcttgtgagcatgatgttcaccatggctcagttgcacctattcgtgcagtcaccaccagaagcccargcctccagctcattccacgtctctcagattctggttctcatgcagtcctttctgaccccatttgcactcttccccatctcctgaaaccctttcacagctttctggaacccaggattcatcatcaataaaatcctccaaatgcaacattcccttcaccatctgctctgcagtatagtccrcagaccagttgcatcacaatcacttgggacactattaaaatgcagattcctggccaggygcggtggctcacgcctataatcccagcactttgggaggctgaggtgggctgatcccttgagatcaggagttcaagaccagcctggccaacatggtgaaaccctatctctactaaaaatacaaaaattagccgggcatggtggcgggcacctgtaatcccagctactggtaggctgaggcaggataatcacttgaacccgggaggcggaggttgcagtgagccgagatcgggctaccgcactccagcctgggtaagagagagagactccatctcaaaaacaacaaagtttgggattattaagacgaaaaactaagtcaattcttaccagctaggttcttgaaagtagaatctatggagacaatcaaacaacatactctgcgcttagaatgcagagtatgttgtgagtttgtaaacccacagaagaggtagtagttaggacccacgtgacaggctgtgactctagacacttcaagaggaatcttggatcagctctgtaagtacacccacaatcacgatttactatttgaatctggttctgttgagcaagctggactttgggatcactcagattcagtacccatttttgccttggacctcttaattttcttctatcacttcctgtttacccttggtgtgrtcaggttgcaaggggcactgatgtcttgagactccctgaaggatatagattatcgcctacattcagtgctcttacacactccgggtttgccacagatrttccagtacaaacactggtgtactgacagtcaagtcaggtcagcagttcttgtctcagatttctgytggggagtgcattccaattaacagaacctccacattctaaaatctctacccgttccttaggctgggtgcagtggctcacacctataatcccagcactttgggaggccgaggcaggtggatcatttgaggtcaggagtttgagaccagcctggccaacatggtgaaaccccatctctaccaaaaaaataaactagctggtgcatgcttgtaatcccagctatttgggaggttgaggcagaactgcttgaaagggggcaggggtgcaggtgactcccaagtgtctaaaatctccaagctatacaggtgttacctttcactggcgaagtcagtaacaatttactcccaaatagattttttttttcctgaattctaggacaaattaaactattgtcatacagacaaaaataaggtagagcctttctctaccttatatttccgggatgtctcgtttctagaaatgcctttagtgtcttttccaaggtaggaagatgagcatctgaacattaatccttttatgctctgaagctatccaagtcatacatccactattcaagttccccctccaggggtataaacacctcagtttaggtcacttcccaatgtgctcctcactcaactaatagcttttcctcattctcctaatgtttacccatttttaggatgccaacttaaacttgatgtggttaaatccaaaattcagatgcctaatctccatttcacacagctatgcgaattgtgaggccaaccatacgaccacaattaaagtttaatttacataaatagctaggcgaggtggctcaagcctgtaatcccagcactttgggaggccaaggctggtggattaactgaggtcagaagttcaagaccagcctggacaacatagtgaaaccccatctctaccaaaaatacaaaaattaaccaggcatggtggcagacacctgtaatcccagctactcaagaagytgaggcaggagaatcacttgaacccgggagacggaggttgcagtgagctgagatcacgccactgcaattcagcttgggcgacaaagactccrtctccaaaaaaaaaaaaaaaaaaaagaaaaaaattaaattacatgaataagctttcttccccatgaaaataatrtgtgtcacttcacacttggtctaacacacaaaatccccaccytatctggcacagatacacttaacatgcaatattaagtacaatttccattttatttttctccagagaatagcctgtcttcagtctttaagaactcagctccttacatgggctttggtgggggwcgtggggcagcaccctgaaagacaaagaaacaaaagagtaaattaaaacccatggatccaagactcccttcccccaaagaacttgaccaccatcctctcacaaactgatgtattcaggctacaaatgcatgggaagctgatagaggtggagggagaacactactctgcatcctaaaaaccaattctgattctaacactgctttgcagtgtctctaagcatgttcaggtgtgggtctcacctgccttacagcttaacctgaggcacagaccttaatttgataccccctgcaccacaggaggaagcaacttttttttttttttaagagacaaggtctcacttttgccctggctggagcgcaagtggtataatcatagctcactgmaacctcaaactcctgggctcaagtgatcctcctgcctcagcctctcgagcagccagactataggttcacactatcatgcttggcttccttctcaatattttttgaagagatggggtcttgaactgctggtttctagcaatcttcttgtcccagcctcccaaagtgttgaggttacaggtataggacaccctgaccctccaggatgaaattttaaccatcactcccctgrmttccattctccttttaaaatactcaccgcaggtctaaatcggggtgggggtgttcggtccttgcgggcttcacgagatcgattcctgactactttgctgtgaattgcacaactcacacagtaatgtagcttcacatacagcttgggaagcacataggctaaggaatagaaaatagagttatactggtattatatacctaccttgcttttttgttacatgaatgaagagcaccttacatgtttacgtcaattaaaactaaacctatttaaatgcctgtcgggcacataaaagcacccccaaagcacctgttcagcccaatacctgagcacatatgtataaccctcagttttacaagtgaattaacatcccacgtgagttcatcttgacaccgcaaggaccagactgacattctaaatgcaataaaccaataatccagttccttctacacctacacccgccctaatgcctaccctgaaccttgctctttctataaaaggaaaaaaacaaagcgacgttcttattgctccaaacatcatccttgcacaccaaactagacggcctccattctcgaaacgttgaagacattcttcctcacctgtatattttcacaaatattcaaataatcaatagcacaagaattgtcaaatttaccaagtttctagtttttgcaatctcataaccgaaacaggcaaasctttacctcagagtaaaggctgtgcactctatcacaaagtcaccctctgcccagaaaagaatcaaaacggcaaacaagagaattctcttctaccagtaacaaccttaaatacgtggaaattgcctgagaggctccaamgaacagagcctccaaaagggcgaagttgggcgaaggctttaagatactgggatcctcacacagttcgcgccggtgacccacttaccatcgaagacgctcgcttcagaaatgtccctgactgctgcggcctccactatgtttcgaatgacgaatttcttaatggccttgtccttgggcacgcatcgggcacagttagtgcagcgaataggctgcacgtggccgcggccctttttggcacgaccattgttccttcttttctttgtctgcgacaggatgggaaaactgttaggaaaacggcgcaactcacccagcctcagtccctttccggccacaagccgcaccggcagcctccaggaaggcgccgctcggatctcctgtttctccgcaaatcccgccgacccccagagcaaatgaaatgtacactcggtccacccctcagccgtgctccaggctctcacttccccacaatcccagagtctgcacccgaacccccaccctcaccacgcaagaagactcaccatcttggaggcacggaccggagasaggagacggtgcctggcagggccctcctatatagcatgagatccctacgcggacaccgggagaatccttaggagacgggcttcaagaacggcaactcactttactcaaatattcctttacattcagcatttctgctgaaatctagggtggaaatgcgttcctagtgtttatttatccatggaacaaagtgcacatgggactatttagccggatggcggaagaaaatcgaggttatgtgtctcccagcaagccttgcgccgcgccgactcggaagcaattctggacgatgcagttttccggtatacgcgacgctaggmgtgaaagttgccagacgctggaccacaaggcgcactcgttattagaggccagagagggacagatgcttggtgggaattgtagtgcgaagccaagaggctcccccctcscccccttcccccctgccccaagtgcttagaccgaaggcggcgctgcgccaccgggggacgccctgggctcatttctctgacagtccttctaytaggtaggtgtaggattacgaagaggaaggcctgagaggaaacaagcattttgtgaatccctccttccaatatggagaaaatcccacaatgaagtgcattgaggctggggctatttctcattcatctttttatctctggcacagtgcctggccctgtggtaagcgtctttataaatattaactcatttaactttgagcaagcctataggtagctactattattatcctcactttaaagattgaagaatttagcccggcctggtggtgggcgcctgtaatcccaggtactcaggaggctaagacaggagaatcttgaacctgggaggcggagtttccagtgagccgagatcgcgccactgcactctagcctgggtaaaaagatcgaaactctgtctcaaaaataaataaatcaattaaaaaaaaagattgaagaactgacgtgcagtaggtattctggctccgctgtactatgctgtatgtcacctaacaaatggatggaggaatagcctggactaatgacttaaacgtttttcacccagattcatagcacgaatacattttacattggtacccagtacacacacaaacacgattacatgcacatgcaaaactgaaacacaagctttatgaaacgatacttacccttgtcataggtgtgctggtatgttctattctttatttttacttaatctttctgttctctattttaataaatgctgatcaaaaaccacgaaaattatttcaccactcattagtgaatctgacccctaattgaaagattatgtgtaagctccatttacctctgaagagccatcggaaagacttaagccttaggctgggtgcagtggctcacgcctgtaatcccaacactttgggaggccaaggcaggcggatcacctgaggtcaggagttcaagaccagcctagtcaacatagtgacaccccacctctactaaaaatataaaaattaggcctggtggcgcacacctgtaatcccagctactcgggagactgagacaggagaattgcttgcacccgggaggcagaagttgcagtgagctgagattgggctactgtgctacagtctgggcaatagagcgaaactctgtctcaaaaaaaaaaaaaaaaaaagcaagcaagcttcagcctggcaggaatggctgtccacagccaaccacccagttgtctccaaagttgaagacactagggtggcaaggggacctcctagcattcagacccaggatggtacagatggaaaccattgttcatttatgactcactctagagtttgaacacaccagattcaccttccctccagcaacccatcatggtttcttttaacctttaacccacttcttggggctaaaatctgttttcttactttcttttttcttttcctttctttttttatttttatttttgagacagactcttgctctgtcacccaggctggagtgcagtggtgccatctcagctcacagcaacctctgcctcccgggttcaagcgattcttctgcctcagcctcccgagtaggtgggactacaggtgggcgccaccatgcccagctaatttttgtatttttagtagagacagggtttcaccatgttggctgggacagtcccgatctcytgacctcgtgatccatccacctcagcctcccaaagtgctgggattataggtgtgagccactgcacccggccccagctaatttttgtatttttagtagagatagggtttcgccatgttgcccaggctggtctcgaactcctgagctcaggatatccacccgactcggcctcccaaagtgctaggattacaggcgtgagccactgtgcccagacttttttttttttttttcagatggagtcttgctctgttgcctaggctggagtgcagtggtgcgatcttggctcactgcaacctccgcctcctgggttcaagcgattcttctgcctcagcctcccaagtagctggcactacaggcacgtaccaccatgcccggctaattttttgtattttagtagagacggagtttcaccatgttggccacatggtcttgatctcctgacctcgtgatccgcctgcctcagcctcccagagtgccaggattacaggcatgagccactgtgcccagcgcttttttttcttttttaagatgggtctggaggctgcagtggcatgatcacagttcagtgcaggcttgacctcctgggctcaagtgatcctgccgtctcagctttccgagtagctgggactacaggcatgcaccaccatgcctagctaattttaaaatttcttgtagagatggtgttgccctgtgttgctgaggctgttctcaaactcctaggctcaagtgatcctcccaagtagctgggaggacaggtgtcctccaccacttccagctttcctgtctgttttgactttgaatttgccagtttcagtgggacatggaaaataatagactctagataggagtgtctctaattttcacttcactgtaatcttgtggaaaacagaaggcagacattactatatggaatagcaatgaggtagatggaagagaacataaaaaagttcagagtgaagagaacagaaaatagttactatttaagacagaaacaaatttatgttcctactttggatttttctagcttaggggtttcactggctgcattccctggcataaagcgatgagcacatgctttggatcacacacccctgggttcaaattctggttctgtcacttactggctgatgagccttggataaggtatttattctctcttgggcttttatttttttaccaataattgtgatcatccttttgtaggtgtttctacaattcaatgagtacttagcatttatgagatgctcaagcagtggtagaccctatgattgtcatcattcgcattatttcaccctgggcatagaatgtgttttgtgcacagtaggtactcaacaaatgtttgattaatttctactttgggtagacaggcaagtcagactttctctcctatcctgaaggcactccttcctggtaggaaaatctcctccatttcccagtctaggctgaaaattcttcgttttygtttacctcctaaactgttcagtagttggtataacatactgcaaggaggacccctccctcttagtagaaaagcaaggcaaaggaagtctgcaaaaacaaccagaggtgttaaattactcatgtttatttataacagactttcagccagtacagtacaaaacttacagtagtatatctccgttacacaaatatttacttacaatatattacatatacaaaatgctttgcaataagtctcaaaagctagtttaactccccttgagaaaggagaaaaactctttaaaaaagggggggaggggaatcagaagaagagaggaggaggtgaaggggtaaaggtcaaaagagacaccaaacataggctacaaaggaaaccctaggagagagggagaagagaggtggtattgcacttgcttctgtgtttattttttctttttgttcttcataacttctgattaaaaatatatatatatatgtatatatatatwttatgtacacaaggaaagaagctgccagaagtattacaaaatcctatctgcagcttggacactgacacaaaaaaacaaaggtctggaaaagtgtctacttagaaatattttgttggtggtattgattttgaatagcaatataaaaggaaacacctcttttctccatgtgggtttcagtgtgtgtgtatttttttttctttttctttacttttttttttatgcaaaaggagctgggagagagcatgaggatgtttgaggttccagagctggaaggctctgaaaagtaggattttgtacctaagaccctggttaaagtgcagtgatggtctggagagagacaggatgccccctctcccctccttagcacctggtcttgcccttccagtctctgctctcatgggcacagagtatagcctmagagcatagtccttcatgttccgggaggttacaggtgccacagttgactggggaaggggatgggggcaccctaaggctctgataccccagaagggactagtccttatgaagtgtcaccaaatacacagcagacacagaagaggtgggaggcggtaggtctaacaggaagggctcaataaccagaatagttcaggaaaagcccagatattaatctcagctctgctgacattctaaaaaggagctagcaccccagggtgccgttgaggattcttcctttctctagagactactctgctctgagctaacctccccattttctgcccttggcagcatctatttattgctacattgtcaaggaggaacaattgccccacaatgcttctccctgccaatctggttctcttggggaaacctcagagtgggggagaaaaaggaggacaaagaggagaaagttttttagggtctcccttcccataagaaggcaaggtagactcctctcagagcccttaaggccctaatcccagggtctgttccttagcccaccctttaccatccccccccaaaatatccctgatagggagtgagaaaagtaggaggtaaaagagccaataaggaaaggacatgtggaaagaaagatggaaggggaaggaagggaagagaaaaggagagagagaaggaccaagagttacaacttgtgaggtgttgtgtttggtttttacttttttttttctttaaacatagaaaaacagcctttggtttgaatctcaaggaagcagagagtgggatggctgtggccttgggcagaaaactcttgtagaaagaaacctccacttgcagtggagttgtatctccttctgccccttctcactaatcctaggttactcaaatagccaagggtctctgcagtagccagcagtcccccctcctaccctgtgtctgggagctgagtgtagaagggggtagtaaaggaagaccccagttcagttgtacccatcccagtcttgctggaacaagggtggaatggggtgaagggcacgtgcccgtgctcatgctgggataatttttggttatactgaaaattagaagagagaaaagagatacccgtttctccctgccactgatcctaagaacagggcccaggagcccgggaatgagagggtgaatcctgctgggagggagcagcagaaggcagcatgactgaggggctgaaacaaccccttgtcatcaggcagcaacccactagtttctcataggatggggactgaaggagcccctgagagcctaggaaggtcactatagtgaagaagtttgagaggtggaggagaaagagaagaattttgacccactcctttcccatgccctggttcccaattaggcacctgtggctcccaatctgtcagagacagagggttgcagacctagccttggcccctgagaatataaaattggggcactccaaggagagaaaagccaccacttaatagaccggtaggttgaagggactagagcgtgtggaggggtagttcaaggagagggaccagatctatcacatcctagagggagatcctgaatgtaggctttgagaactcatattactaggggaatatgacctattactaggggaataggactctcagtcccacagtgcctggggagaatttcttcagtccctcctacttccaaatgaggaaataattcttcattcattcaagaatagtgcaagctgcctaaagtgagagggcacaagaggtatggagtaccaggttgaagagtcccagagaggagatataatgccacagagctaaggtagggccgggggcaggtatcagcatcaaaactgaagaatyagataatgtaaagggtgaggacttaaagcaagaagcttgaagtctcttagtactaagaggagcttcctacccctggggctgctggaagatctaagagagaaaaattggcctaaagtggaaaggagttgtggacaggagggtgggggagtggcaagtgactgatataagttaaaatttaaaaaggcaaaaataaatcaactaattaataaataactcagtatgctgggatgagagaagataaaaaggaaaaacataagcaaaagatctgtttcatcacaatgcttacatcggtcaggatagaggaagagaataggtgaggaggggtcagggtcaggtgtgaggtcaggtggccagtagtgagggctacaaagcaaaactccttgggaaatggtggggacagggatcaatgcctgtagtcagggcagtggagtggtggactgaggagagagggagaggttgctagcccaccttatgctccccccggacaatgtgggaagagaattcgtaccggtcctggctgtgataaccacagatgttgcactcaaaagggtctctgaagccatggcagcccatgtggatagtgaacatgacgtggtccaggaagaggatacggcagtgctcacacttgaaggccttcacaggctcaccactctcgcccaccacccgaagcacttccttggaggggcctggggtgccccgcaataacccctcctgtggcttggggtcctctttggcgtaggcaggactgtgccggcccaccacaatggtgggaggtggctggggtgggggaccctgagggagggataccacccccgcaacccgatcttcgtggttgctttctgtgtctgtggagtcctggcagccattgctgggggatgccccagggtcagtcagggggcctcggggccggtagaggaggggacctccatcagccaggtcctcaggtccctcacctgcttctcgggatcctggaagctccagtcgaccagggaggggctgcatctgggtgtagacagagctgatgacaggcgtgagttctgagatgcaattggtgggtggaaggcggaggggacgcagatgctctgcacccacaaaggccagggaacttccaaagccaggctctaggctgtggtgtgccaccaactccacatccttttcatagccacccgagttcacatcataggggaggtctgagaggctgaagcgcatctgcttttcgcctgtggagaasaggaactcagcagggctgggtttggagaattcctacactctcctcaggattacttctttgtttttttacctgtggggctgggtgtaacattatttactacgtggcatttactttcgcagggtcaggtcctttgtgggactgctccctgactctaggctataatcttagagaaggactcaatcccagcccattgatttttaatacttcattttattactctccataaagctccaggtccttagagagctcatgactagtgctggggatagggggaaccacatacttatttcctctctctgactctctaagggcccacacagactgaagttcttgttattcttaaaaactgagatagcccgggccgggcgcggtggctcacgcctgtaatcccagcactttgggaggctgaggcgggcagatcatgaggtcaggagattaagaccatcctggctaacacggtgaaaccccgtctctactaaaaatacaaaaaaaattagccgggcatggtggcaggcgtctgtagtcccagctactcgggaggctgaggcaggagaatggcgtgaacctgggagacagaggttgcagtgagccgagatcgtgccactgcattctagcctgggcgacagagcaagactccgtctcaaaaacaaacaaacaaacaaaaaactgagacagcccgatgcctcgaccctgtcccttacaaccaccacgagagtcttcagtgccaacccttctccactctctttgagtacatcctccctctttactttcctcctgtcctgaggatagattttcagtatcagaggccaccagcctgctttctttctttccttttttcttttttcttttgagacggagtcttgctctgttgcccaggatggatggagtgcagtggcgcgatctccgctcactgcaagctccgcctcccgggttcacaccattctcctgcttcagcctcccgagtagctgggactacaggtgcccgccaccacgcccggctaattttttgtatttttagtagagagggggtttcactgtgttaaccgggatggtcttgatcttctgacctcttgatctgcccaccttggcctcccaaagtgctgggattacagacgtgagccactgcacccagcccaccagactgctttctttccccaaaccgaatctccagaccacacagctcagatttatttgagctgtggcttaaagctgatacgtctttccaactggattcttacctacaaacttctggggtgtggaacgcttgcgtttggtgaggctattggccagacgatcgatgaaagttggccgctcagaggatgagtgcagcatggagtctggcaccatctccaggtcacgtatttcgtcacctagtgggaagaaggtggagacagtagtagcagttgagtaggggtagcattggccccacagcctttgcctggagaaaaccagcaggtcagtagccaaggaaggacataccagttgcctgggaaactgggctctgtttaccctacctaaagctcactccaataaaatttcagatcatttggggacaatcatacacatctggcccttggttttatacttcttgtgttctctctctcccattaggccaaggatatagacccaaacttcccctacctgtcgatctccctaaagcacccaccacagacaaggctctccaccaactgggttacctagaatggggtgtttggcagatttactggggtaatcatcccctgttccacagacttcatccctcagtgygggagatactggagtcacccttgtctagcactccctctcaccatccccttttaactccccagtagtacatcaatagccctacctggttggccagccaaagcttgggcttcagtgctgagactctgtaggtagttatggcaccgctccttgtgctcctccagggtactctgctgtttgtagctccggccacagtagttacacttgtagggcttgcccactgtgggagaggagactgtggaggagagtggaaagatggcatcagagctatttctcgctgtgccctggctctgcagattcagccaagagcaagtatacactggcatgggaaggaaaggatgttgctaaattgagttcttctacttgtctttcatttcccaacttcaactgcaaccgcggacagatgaacaatatttgatgatgaaggataatgtgcagttatgggggcaagggaatcctagggcatgtggcttcagactggtggtgggtttgttcaagatggccaaattgttgcttaaaggaagtgaggacccagggactttgtagaggatcatccctagcagacaggcaggccccactgcaggatctcagagtctggggcccagactgtggtttaacctttccatttggcaggcggatgtaagtgctgtttatcagacaaggggattttttgctttttatgaactatctgctttggtttgggggaaactggtgggctggcatgacagaaatgagagcccttagatctgccaatgtggggagggggcagttttcattgacctttacttgtattttgacctccagccctagcctggtttactgattattttgtctctctgtctctctacgctgagataccaagagaggtctagaaagcccatcactgatagagtaattctgaaaagagaaaaagaataaaagaacagagaagaaaataaagaagagtaaaaaaaagagaacaccaaatttgggtttgtttgtttatgtgcttgtaataaggaacaggttataaaggtcttgtttctacmgaagaaagaaaattggaaaacagagtggtacttcatttaaagataactcttaagagatatttgtgagaggagagaaaaaagtggagagaaacaacgtattgtatatttgatgtatcttgctgctattgagcagggagacaggagaaggtatctctaggaagctggtaattactattcacccctaaccttgccatgccaaagctgggccttgactaaatcaatctactggattttactcaggctctgtaaactcttgtattttagggatgaaatgaacaccatggtccctatccacccaaagacccttggggaaacagtttaacatctgggagaggaatgatcctccaaccgctttcttttttttcaaattttaattgataattgatacataataattatacatgtttatgagatacatatgatattttcatacatgtatacgacatgtaatgatcaagttggggtaactggcatatctgtcacctcaaacatttatctttttttcttcttttttttggagacagagtcttactctgttgcctaggctggagtgcagtggcacgatctcggctcactgcaacctctacctcctgggttcaagcgattctcctgcctcagcctcccagtagctgggactacaggcgcccaccaccatgcccagctaattttttgtatttttagtagagacgggtttcaccrtgttagccaggatggtctcaatctcctgacctcatgatctgtctgcctcagcctcccaaaggctaggatgacaggcgtgagccaccatgcccagcaaacatttatcatttctttgtattgggaacattcaaaataatctcttctagcgattttgaaatatacaataaattattgttaactacagtcattctactatgctgtggaacactacaacttatgcctcccatctaactgtaatcttgtacccattaaccagcctctcgctatccacctactcccaacccttctcagtcagcctctggtaaccactgttctactctctactttttttttttttttgagacggagtttcacccttgttgcccaggctggagtgcaatggcgcgatcttggcttactgcaacctctgcctcctgggctcaaggaattctcctgtctcagcctcccgagtagcagggattacaggcatgcgccaccacgcctggctaattttgtatttttagtagaaacagggtttctccatgttggtcaggctggtcttgaactcctgacctcaggtgatctgcccgccttggcctcccaaagtgctgggattacaggcgtgagccaccgtgcctggcttttttttttttttccccaagatggggtctcactctgtcacccagactggagtgcaatgacatgatcacaggacactgaagtcttgacctcccaggttcaagtgatcctccctgtctcagcctcctgagtagctgggactacaggtgtgtgccaccacacctagtttttgtttttgtttttgtttttktttttgtagtagagacgaagtctcactatgttgctctggctggtctcaaactcctgggctcaagcgatccacccgccttggcttcccaaactgctgggatgatagacgtgagccactgcacccaacctactccgtgcttctatgagatcaacttttttagctcccacatgagtgagaacatgcatccagtctcttttttcttataataggggttgcaacagaaagcacttcacagagatgggacctgacagtatatctgtgtctgcttctgttgttaataatctacagatcaacatccaaaatctacccagttcacctcactgtgtagttggtaagaattctaggggccaagccatccttgttccaaaccagcagggggagcagccccttttctgaggaaaaggagtatgtatttctggcactggaccttgatggggttccagctaggctgaagaatagctatgtgacccgcaactcatttttccccccaacagcttcattttccttgtcaacaaaatggggataatcacatctaccttggaattgttatgaggatcacatggagaaacacaagtgaaatgctctgtagatataaagcatgtatcaacgatgatctttctccctgtttctccacatacatagagataaagaggtcccaattacaaggtgggagaacctggaacaaggtaagtggatggagaaagtagagggtgatgaaatgattgctctgtccctttaaatcctggctcaggagagtttaagaagagaaaaatagccaggaaagtttccaaggacagaccctactaattctttcccccttcctttcttcctgccttttcccaatcttgagctccctccttcctgccagctcagctcctggcctcttcccaagtccaagccaaaagcctaaagcttagtaaaatgcctaaaaagtgctatctgtccagctgattcagacagatactgattcaaacagtcttgactgggctagaaaaccttgttaatccagtttcccagcactgttccaaacattgatctctaggtaccctctggactttctcttgcctctgggaaggtgacaacctcttgggatagggaacagaaataggatactcttttcctatttggaagtcctaggctcccttttttgcaatttgagagggctatggatatttccaggagccagaaggaagtaaaggagaggacagactggttgctcaagacctctggtggtgtgggaggaaggagggtgaagatgatgacaggtgtggggcctgaggcagatgggagtgagaggagggatttcccaggggcttagatgttgggggtaatagggcatggattgtggcatcaacaatctaaaatataaaagtcaggaaagcccaggcacagtggctgacaccacgcctgtaatcccagtacttcaggaggctgaggtgggccgattgcttgagatcaagagttcaagacaagcctgggcagcatagggagatcctgtctctacaaaaaaatagaaaaattagctgggtgtggcagtatccttccagctactcaggaagctgaggtgggaggatggcttgagctcaggagatcaagactgcagggagccaaaattgcaccactacactccagcctgggcaacagtgtgagacaccgtcttgaaaaaacaaaaaacaaacaaaagtcagggaagggtgactttttttttttttwtttttwtttttgagactgagtgtygctcagtcgcccaggctagagtgcaatggcgcgatctcagctcactgcaagctccgcctcccgggttcacgccattctccagcctcagcctcccaagtagctgggactacaggtgcctgccaccatgcccggctaatttttkttttttttgtatttttagtagagacagggtttcaccattttggccaggatggtctcgatctcctgacctcgtgatccgcccatcttggcctcccaaagtgctgggattacaggcgtgagccaccgcgccaggccaagggtgaccgttaacagccaagaacattgctcctattccttttgctccaagtagatggattttacatccatatggtggatgtaaaataccccatcaaggtgtctcccaaatttcccatgaagccttgctgcccagaggatgggtgagagaggcagggggccctatctgctctgtaaatgctcccccctcctcaatgacagacactggaactccccaaatacaagagaagtcactgagctctacatactgggtgtgttggagcctcattccctcctcccactggacagacactgacctgagtgtgtgcggaggtgaccagtgagtgcatcacgccggcggcaggcatagttgcagaagggacatttaaagggcttctccccagagtgcagcttgatgtggcgcagcaggttccccttctgggtgaaggaggcaccacactggttgcaatggaagggcctttcacctgcaagtgaaagaacaaatcccagaggactgcatgtgaggaactttgaaggttgaacctatcacccaccctctgccctaccttgcccaagggaaggtgctctgaacacattgctgacgggcagaagtgcaatgcacacaaaccctgatttatgaagatcccttggggatccctggggtcttaccctggggaaggtgtggattagaggtgtgtggcagggagaggggcctggaacacgaggccaaaagactgttaccaaaaactgagccccacagggcccactctgccctaggagcccaaggcccaaggaagctgagaagagaaggcttttgttttctgttttgttgttgttgttgttgttgttgttttttaattattagatgggagggcccaaagaatacccaggagtcttacccctattggaccattggctcattcttgagtctacactttcccctccctcatatactgagaaaaatatcaccttttctttataacagcggttgagragagtgccaggaaactaaaggtattgaggggaattcaaattctgtacccacccccaccctgcctcgttttgtcagctggaaaatgtgctgggtgagacccttccctttctgaggctacccactccctgcatgacctcctccagccccatacctgctgttgtcccagcactgcccctgcctctcaaccccaccctgggagctcctcccagagcccctctggcttacttaccagtgtgactgcgcttgtgcaccatgagcacgttgggtccaatacagaccatgccgcagacgtcacacttgagcttgccattgggcagccggatgcccccaggggagtgaggctctggcccactcccatcacagtagcccaggggctcagacaatgaatcttccacaatcacgctgtcgtccttttccaggagccgctcatctggccccagcagtctgcttgactcctcatcgctgtacatctccaccttgatggagttggctgaggggtgggatggtgtttagaatagagagaggcaaagggggaagctgctcccaggccagaatggcactctttttttttttttttttttgagatggaatttcgctcttgttgcccaggctggagtgcagtggcacgaatttggctcgacgcaacctccacctcccagattcaagtgattctcctgcctcagcctcctgagtagctgggattacaggcatgtaccatcacacccagctaatttggtatttttagaacagacagggtttctccatgttggtcaggatggtctcgaacttccaacctcaggtgatctgcctgccttggcctcccaaagtgctgggattacaggtgtgagccactgcgcctggcccagaatggcactcttaaagtttaagagggtgtctttaggccctgagacattcaagccttaaatggaactaacaccctagtatccctgctgctgatatcagaatcctactggaacctgagacaaccttttctcccacccaccaggcaaataggcttcaagagaaaaaagttgggccgggtgtggtggctcacgcctgtaatcccagcaatttgggaggccaaggcgggtggattcttttgaggtcaggagtttgagaccagcctggccaacatggtgaaaccctgtctttactaaaaatacaaaaattagctgggcatggtggtgtacgcctgtaatcccagctacttcggaggctgaggcaggagaatcgcttgaacttgggaggcggaggttgcagtgagctgagatcacgccactgcagtccagcctgggcgacagagcaagactccatctcaaaaagaaaaaagttgggggtacataggatgtcttctgtcgctgaggagaggaggcgactaaggggagcttttttctctactctcttgtcatgaagaaagatgtctggcttggccctgggcaggaagccagcaagttaacagtggcgggaaaacagatctaggaagactgaagggggacaacaggccaaagagagcaaacctggaagacagacatgcttacagttccctcccacctcattagattgaatccctctaccccctccacctccataaaactctgaggcagggcaggaggggtaaaggaaggaggaaccattgaggagaaggctttggctctagctccgacctacattcctggctactccaaccatttagagaatgtcacagatctagggccagctggggagaggcagtcatggggaccctgtctgggtaggagaatgagctgtggggagatggggaggtccttctactctctatttcctatctaactccatctgatgaccatttctatctacctgcttctctaattccataatttctctttgaaacttttaccttaatcccacccatacctcttttaattccaccctagtctgccagtgactgactattcactctcctttcagaagccagaaaaaccctagacactgggctcctcattgctcttagagactaagcaggagaccagcaggaggtgacgatggggaaatggttgccagtggaaggtgaattgaaggccaaatgcaacagggggtgcctactgccaggaggtggtaggaggttacacttaccactsagtgagcggctaggagaagagtgctggctgttgggggtgctcaccgagggccccactggggccccgaggaactccttctccagagatgagtccccgctaccttggaggagagaacaagagggcaggtaaagctggagctggagatatctactgtccattgcctaatcttttaaaaaaattcagttaaatttcacaaacatttccttcatagccatgtacaaagcagtgttgtatgctgggcaccataccttgtgcccccrccagtctggatgcctggtgctgccttctgtgagctcagtggctgggccttgcctaccctacctttatctaggcctgagggcaagagcatcactgcctgacgtccacaggaagcagggctgaggctgggtgcgccagggcggagaggaaaatgggggctgcagaagggacagatgttcaggacagacattcttccctactgttcctctctggagcccccagccggttcaggatctgcaggaaaggtaactggaattgtccttgaatctaatgataatattagtaatcatcatagcagctaataatattaattgagtacttactatgtgccaggctttattctgtgcacttgaaatgaataatttcatttaatcctcacaacaactatatgaagtaggtgctaatatcatgattttttcagatgaggcaactgaggtacaaaagaggttatgttagttgtctaaggttacatagctgctagtgtggaactgggatcatagacagtaagcgtccatgtccttaaccagcacctacacagccaattggtggtcacaatcttagtagggaagaattgggcctcttagactttctaaattcagcaaaaatttgattactctagaaagtctcctactgatctgattccaatcacgtgtttactatttgatattcattgacagttaagtgatcaacttattctcagtatatttgttttaattttctgataaattgctttgtaaaaatgctttttgaggctttcataatgtttttcaaaatcagataacatacctaaaggaagatatgaatgtcttttttaaaaaaatccctcctccccacaatcttctacacaaatatataggtgaaataaaaatacatgtagataaacacacacagagacacaacacatatgtagatacatataaagagaacatacctattgggataaacatactggtagccttctacattatctgctaacatgaacatgcatggatgtgtgcacacaggcctaaatatggaagagagaaagagaaagcaagggagagtgcaagaaagagagaggaagcctaaaattcatccctgaagtccacctattagtactttacccaattgcccagctatgcacatacttactttcacaaaataaagattccattataaaatggttggagtcttgggcctgaggcaagaaatccggaacacaccctcctgagggatccctctccagctttggtcagtgggaagaaaacaaccactcaggactttgggaccatttcccrttcatatcctctcctaaagtcccattttccccattctatcccgtcaaagcctgaggaaaaatgttcactatctatagaaaaagccttatggcttgaatctgagttttcccagctggggctttttaggtgagccatggttacctaaaaatgttgcccgaaatcagaaccacacacatatcatgaagtgagcatmtcaggattgtgggttgagacttgtagactcagagccagttttaaatatatcctttcaactaagtgtagggtttactagggttaaaagggctgaaaatgttatcttcttattccctttattagtgctgaattgccctaaatcacttgatgttactatcagggaagaacagggcacttggctttgaggccttgaccctaaaaggatgagtgaacttgttggaaatccatcactggtcccagcttattcggctgaggctgcctcttgaggccagcgacttgctakgtggaggaaaatatatttaaaagtacacttagaaacactgagggcggccgggcgcggtggctcacgcctgtaatcccagcactttgggaggccgaggcgggcggatcacgaggtcaggagatcgagaccatcctggctaacacggtgaaaccccgtctctactaaaaatacaaaaaattatcygggcatggtagcgggcgcctgtagtcccagctactcgggaggctgaggcaggagaatggcgtgaacctgggaggcggagcttgcagtgagccgagatcgcgccactgcactccagcctgggcgacagagcgagactccgtctcaaaaaaaaaaaaaaaaaaaagaaacactgagggaaaagcatcctttgtggctttcccaattaaggcccagaaacaggaagagaagcaggagtcacaccagtaattcaagaggctctttgatgctgttgccctccctaagattaaggtaaggggaaaaacaggatcaagtctactttcatggggctaaaatatatgtataatgaatctgtttcaggagtcagaaaggctttcttgggcaccaaggattttgaattcyagctcaggggtgaggggactagagtaagatttaggaagtttaacagttcctctctcagccccagaaaccccagtgagggaatctcaaaagtctgggactcccaagaaatcccagactgtcaaagccaagaattaaggctgctcttaggtctctgagaaattttcttgctcaaagtcatcatagattggctgaacccccagagggcaaagccaaatcatgaggttcacattagaggaactgggaggtaggtaaaggctgaaaagcaggagggagagaaaggaactgggaaacaggccacaagctaaaggtgtttcatatgttaaaggaggctagcctccactcctgctgcctttccttgagacctttaaatagtggctacatctagggaatagccatgagcttggagaacatggagaacctccacacttctctgcaaggcacctcatcataactgctttccctttcttgaccacgggctccagggtggcaggatcctagcctgctagcagggaatagtgggtacaagagcaaagaaagacgcccatcctcagctcttttgtggggaggaagctgaggcccctcagatctctgttccaggctgaggcatctgcttgccaaggctcctcttccttaccttgattttctccactaccccttcccacccaggcctgtctcggcatttcaccccaggcagctctacctctatccccaaggcctaatcaagatgtcaccataggctcccactgtccaagtcgccgtctttgcttagcaacaccaaacaccctttcccatcctccgcaagtataaggaggaacgccccctcccccgctacacacacacacacacacacacacacacacacacacacacacacmgcccccatcctctccatctcctcaggcttgggagtagttactgaattggctccctagccccagcaccccccttcctccctccactagccgccttctgcctgaacttacattatccttcccttgccggtgagaccctggggtgcgaacgcggccgccgccttggaaacggcgagggagtgcgggtggtgtatgcatgtctgcgtctcagtggcaggcaggggtgagcccagccactcaccttccaggaagcgtggattcctggaagtgaggggaaccgccgtcatttcgcaggcagcagcagcggcacggtgagcagaggcccacggctgcagccagcaagagcagctcagcccagggtgtatgtgtgttgagtgtgtgtgtgtgtgtgtgtgtgtgwgagagagagagagagagagagggagagaaggagaggggagagcacgcttggatgtgcttggggagggggctggagagaatgtatatgtgtatatagtgggggagatgctaggctacagcatcccttttccaagacagtgaagggggtgggtggtgggtgtgtgcacagggagggaaaggcagatgctgttgcccctcgtgcccagcagacaaagaggaactgcacaacaaatgcctgagagaggcaagagtgtgtgcaagagagagagagagagatggatgggcctgcgggtgggagggagaaagggggggccctagggaaggcccaatcctctgccagctggggaagccaaggccccagaggtcatggggcccaggacacggacagcttcaaggctctcagagaggcagaaagcccctcccccaccgaactctttccctcctcctccaggaggaaggttgctctctagatgtggggactgacagcctcctcctttccagcagtgagagggcccagcagagtctggtgtcaggctagtgttgctccgtggccctgagacctttcagatcccgggcaaaaaggctggtacggtctccccatttcccccccttcctgtgcccctggggccccagcagccgaaagccctggatgaatccgccctctatcaggacaaggcctctgctcccttccctttcagaggagctgctcactgacaaactgacctactttggaagactacattttctgattccaagaatttgggggtgggaggggctgtgaaacttcgggctgcctacccctgaatccctttctactaaagttctctaaaacatttcacagtctcagaaaacttggggcaagccctgctcagtcaattaatggcaggagctgggtttcagcaactctgtttcccttgaaagataggaaaatggagggggtggttatctgtgccataaattaatagactcctgcttatctcccccttttccctgccccagaagggaatgatctgtacctttaaaaagagaaaaggggagaaaagatggattttctgaatcacattctgtgaggaattcaaatctcttggaagaacaggagagatacccttttcatcaagtggcctgatgagggaaggtcacctggcgtggagcagaagaactatgatggcctgtggaggcccgcagtgtgcttcgggagggctgcatgctgcagcctttccctctgcttccatatgactcttccaggagagatgggtcagtgatgagcgcagctatgcccagtcctaagaggggtacttttcagggctaatggtagccttactttgactttctcttttccctttctaaggtagctgctgacatctaaaattctcaaagtacagaggaggagttcctggcctccacttccattcaaaaaccatcctgtgcagaggccacttcttatctaggacatgccaatctgctgaaagcagggaaaacttggtttcatagcacggtgaagcaaatcacctccatgagtatccaatattctccataaacaggtttgaaaagagctccacaggatttgtagtttctcatttgcctgctttatggtagggactggattttatccatctgagtgttccccagcactaaagcagggtcccaagtgtacttgttgctcagtagtggttttctgaataggcttaactgagcaggaggtaggaggactggctcgctcctcacaaggccatgacttttgttctaataaagtctcttccaattaaatgagtctacctgatccctgtcattctgtcaagcatgtggcagatattgaatgcctttacccattccaactccttccctccttaaacaagaaaggggtcagagtcaacatcttaccttacattacccgggtgttgccaatgactctcatatgtgtgtctgacccatcttgctatctcctttagtgcatgccaataattccttcattggtcctactttagagtaaaaaataagctataggtcatttccaaaatggtgcttgggtttctgatagggatactcatcacatcaaaacccagttttggtttctattatttctttttttttgagacggagtctcactctgtcgccaggctggagtgcagtggcgtgatctcagctcactgcaacctccgcctcctgggttctcctgcctcagcctcctgagaagttgggactacaggcgtgagccaccacgcccagataatttttgtatttttagtagatatgaggcttcaccatgttggccaggatggtcctgatctcttgacttcgtgatctgcccacctcggcctcccaaagtgctgggattacaggcgtgagccacgtgcctggcctaatttttgtatttttagtagagagggggtttcaccatgttgcccaggctggtctcgaactcctgacctcaggtgatctgcctgtctcccaaagtgctgggattacaggcgtgagccaccatgcccagccttgagtcattattttaaaatggagacatttcatataaaaatttggatttctggtatctcttaaaaatttagaagttttggccacactagatacacattcctgcmtgacaagttctagtggacactgaaagctgctgtccctttaagtgggacatatgttctccacttcatgacagcccccaccattcttttctgcttattatcctaaccttacttcactcattcacatgactacctggcccttgcaggcctttgagctttgaaaccttgtgccgctctatctggatagaacaggatttcatgtttggctggtgacttcagagcaaaggagaaggaaccacatcttgtttccatctatttgcttcaaattattcttctaatgatgtctgctcatattcccctcctattcccttcctctataccccaagaagtctggaaaagaaaattactatttagggaatgtaagatcaccaaaataattgcacactaccaagggccaccaagcatgagtgttagctgtgtgactaggacatttagaggctgtgtgcctaggctgaaggctctctgctctgctctacaggagagtgtctgcttccagcccctaacaaatagaacacacagaaggcataccagacacataggagcggccattgcagtcttctatgtccattttaaagagattctgctgaaaaagaaaatagctgctattagaagatagctctgggaagggaggagscttttctttaatattcttgagttagcaagaaacctaaaggagcacttaagcatggtctgatactatcctaaagaagaaaaaccttagccaggcactgtggctcaacacctgtaatcctagtgctttggaaagaaggtgggaggatcactcgagcccaggagtttgagaccagcctgggcaatatagggagatcccatctctacaaaatataaaaataaattaggcatcgtggcatgtgcctgtagtcccagctattcaggaggctgaggtgggaggatcacttgagcctggaggtcgaggctgcagtgagctgtgatcttaccactgcactccagcctgggtaaccgagcgagaccctgtctccaagaaaaaccttacactttgtcctggtgaaagacaacataccctgatttacaaaccccaatatttcctccaatttacaacttctgcaggcctccccagcctctgaggtggaaacactatcttaatccagagtggtccttgattttgagattagaccgtgtatgtaggtggagattacacctcagccctgaggaggcaaagaaacagccccttagaggctctatacctcagttaaagatgggggtagtattaagaagctgggttcagtcattcaagggattctgtcttggagtatgtggtgtgagggagggtgacaggaaaagkagaagatggaggagagcagcccactcagggttcagtgataagtcctctactgaaggtgtaataaacaagttaaacctgtaaatggttatccccaccctctcatcaattactctaccacgcttattttaaaaaagaaaaaaggacggggggggcggggggggagtctgaatttaaaatgaaggttaatgtctatttgagggaaggcaagcagtaattggcagtagagtattaaacaatcgggaactgagaacacttaaaagtgataatttgttgcaatgarttatctctttaggagcctgtgggaggagagaaaaaaaaaatctatctggtggaaatttacatacctccaaaattgcggctggcatggtggctcacacctgtaattccagcactttgggaggctgaggtgggtggatcatttgaaatcaggagttcaagaccagcctggccaacatggtgaaaccccgtctccactaaaaatacaaaattatgactgggcacactggttcacacctgtaatcccagtactctgggaggccgaggcgggcggatcacctcaggtcaggagttcagcctgaccaacatggagaaaccccatctctactaaaaatacaaaaaaaattagccaggcatggtggcgcatgcctgtaatcccagctactagggaggctgaggcaggagaatcacctgaacccaggaggcggaggttgcggtgacccaagatcacgccgttgcactccagcctgggcaacaagagcgaaactccgtctcttaaaaaaacaaaacaaaacaaaattagctgggcggtagtggcatgagcctgtaatcccaggtacttgggaggctgaggcaggagaatcgcttgagcctgggaggtggaggttgcggtgcaccgagatcctgccactgcactccagcctgggcgacagagtgagacccggtcacaaaaaaaaaaaaaaagaaaagaaaaaaaaagaaaattgcattccccactcatctgatgaaaactaaacgccctgaggcagaggcagaagcaagaatggggcaagggaacagtctgagctgctgtggggattcttggtctttttgaaggatctcactgaggcagatggataaagatttggtttgcttgtaatggtatattgagagaggtaggggtgggggtgagggggtgcaggaaggcacacagagtaaagtatctgttttcctgcccccccacccccacccaattcttgtctggagttgagactccttttgaaggctcatgagaaaacctgaaacatgsgcttaccttcacttcacaaagcaattctctcttacattttgtcagagagattcctagtatcaaccctatttccctaggaagccagggcatggagaaaaaaattctctaagtttattaaccctcttttcttgacatccttcctgggatggactgaactttgggactggaccactagaacaagccacacaataagtggttccttgaagggtcccttaggaacaatcattagaagagcccaagtccacagttgttagagaactcagactctctggaactagccacaaaacttgagatagagatcaaaagataaaggagggcagtctggtattgaggggccctttcatttccaaatcattagattcayaattgccctttggtgtttttcaaaatgaatggaaagctcaggctgggtttggtggctcaggcctgtaatctcagctctttgagagggcgaggtgggtggatcacctgaggtcaggagttcgagaccagcctagccaacgtggtgaaacccsatctctactaaaaatacaaaaaaattagctgggtgtggtggtacacacctataatcccatctactcgggaggctgaggcagaattgcttgaaccggggaggtgtaggttgcagtgagcggagatcacgccactgcactccagccaggtcaacaaagggaaactccatttcaaagaaaaaaaaagaatgcaaagttcaaagtgccacttgaagccgggcgtggtagctcacgcctgtaattccagcactttgggaggcggaggcgggcggatcacgaggtcaggagtttgagaccagcctggccaacatggcaaaaccccatctctactaaaaatacaaaaattagccgggcgtggtggggtgcgcccgtaatcccagctactcaggaggctgaggcaggataattgcttgaacccgggagacagaggttgcagtgagccgagatcgtgccattgcactccagcctgggcgacaagagcaagactctgtctcaaacaaaacaaaacaagcccacaaagtgccacttgaaacttccctcacacacctccccatgcaggagaggcaagagtgagcaggattttcctgttttctgcttggagaaactgagagaaactgaggctgagagcagtgaagttacttgtcccaaggttcatggtgagaatagaacaagaacaagaacacaagttgcctgcctctctgaggtgtcctctttctattaaacctttcaaaagccaggctactcaaggccttcatgggttttcttgcttttccctgttttttttgtttttgtttttgtttttktttttgagacggagtctcgctgtgttgcccaggctggagtgcagtggcatgagtttggctcccgggttcaagcagttctcctggctcagccttctgagtagccaggactactggcatggaccaccacactcggctttttccctggttctaacatcaggtaagtcatcttttcctttggtgtgatccctgtgggagtggggtctgttacttaaaaaggaagaacaagtcgagctggctctacaggaagaaatatgctcatattattttgtgtgtgtgtgtgtgtttgtgtgcatgcagcatgcctaatgcctgtgtgaatgaagggctagacaagcactaggtgggtagaacaggtgaagcataccattcagctagcactggctcaggaagtgtatctcattcttggacttttgcccagatggccccaaaacaatttccagaaaggtctgaaggagttgttttctgagctggactttctttctaacagtaaactgagctttcctgcttaattgctcttaacgtgctctgtgacacatcttgggcaaaatcagtacttagctgtacttagctgcctccagctgggggtttttgtttgtttgtttcttttcttttcttttttttttttttttgagacggagtctcgatctgtcactcaggctggagtgcagtggcacgatctcatctcagctcactgcaacctctgcatcccgggttcaagtgattctcctgcctaagcctcctgaatagctaggattacaggcgtgcgccaccacacccagctaatttttgtatttttagtagagacagggttttgccatgttggccaggctgttctcgaactcctgacctcaggtaatctgcccgcctcggcctcccaaagtgttgggattacaggcgtgagccactgctcccggctctccagctggttttaataccaagttggtaaccctggaagtgagagggcattggattgaaactgctgttctcagtcctggttttctgtgcaaaccaggagcaaatcagcagatgtactttactctttgctcaagtctccctgcagcacatcccgcccagccttcccactctctaccccttaaagcacctcctcccctgcctaaccagccaggcagatcttagcgtctccttagaggaactgggtcaaattaggcactgccaattggagacacattgcaggaggaggaggtataaggagagggaagttagttacatgagacagttttgtatcaaagatcttggaaggagattagctttaaagcaacataactgtcggctgggggcggyggctcacacctgtaatcccagcactctgggaggctgaggcaagcagatcacttgaagtcaggagttcaagatcagcttggccaacgtggcgaaaccccatctctactaaaaatacaaaaattagctgggcttggtggtacatgcctgtagtcctagctgcttgggaggctgaggcataagaatcgtttgaaccchggaggcagaggttggagtgagccgagatcacgccattgcactccagcctgggtgacagagtgagactctgtcactaaataaataaataaagcaacataaccgtcactcagtgatggcgggtaggcacatatgtactgtaaattcagctgtgagctgaatacaaagcaactagaaacaatcagtgttccaattcaaaaggaatatctctgtgaggagggaggaaacgctggtcattgtaatctctggagacacaaattttcttccctgttcttatttatttattatatttactagagatgagatctcactatgttgtctgggctggagwgcagtggctgttcatgggcacaatcacagcacactacagcctcaaactcttggcctcaagcaatcctccttcctcagcctaatgagtagttgggactacaggtgcatgtgccactgtgcctagctcttccccatttgtttgaatccacttggcataaacaagagtcctccatggccctggctttctcctatcaacattacaacacatttgaacaggaatgggcatcctttctagacagaagatttcccaccaggctccctgacaggcagcagtgagggccaatcccagcagtttgggaggccaaggcaagaggactgcttgaggccaggagttctaggccagcctgggcaacacactgagacmctaaaaaaaaaaaaaagtaatttaggccaggtgtggtggctcacgcctgtaatcccagcactttgggaggccaaggtgggtggatcacctgaggtcaggagttcgagaccagcctgaccaaatggagaaaccccatctctackaagaatacaaaattagccaggggtggtggttcatgcctgtaatcccagctactcaggaggctgaggcaggagaatcgcttgaacccaggaggcggaggttgcagtgagccgagatcgggccattgcactccagactgggcaacaagaacaaaactccgtctcaaaaaaaaaaaaaaaaaaagtcatttaacacatgcttaatgtggcctagggggtaaaaggtcatgagaagaatattgttgggaaagatggtgaaggtagagagaatggcaaggatccataccatgtttttgttattattcccaaactataacaggcagaagtagaaaaattttctccactttcccttagtacctgggttctgcggtggagagcagtagttattaacaagacagaacttcccatgtgccttgggtatgagccattcaggtgctacaagtagagcaaacccacagcatcatcctctactgtctatgccttcctgaactgagtgaaatstgagcaaaaatatgttgaaatcacatagctggctctgctctctatcaaagctttgcataattgaggagggagaagacgcaaaggggccagggaaaggtatggaattagccactgtctgcaagcccctttccaggaaaaagacctagacatcaagcaatttgcagctctgaaattatctttagggtcaacctagtgctctctgaaggaaacccaccaaccttagctcagctcatgtgtttgtctttacagtggaaaggtctgactcatttttcaccaggctgtagatggtgaccttctgtctacatataatacagttgaagacagctcagcttcattatccaagtgcttggggagcagtgcagaggggataaattcccaggtcatcctaggaatggccagtctctaaaataaaaaggggtaagagctgaaaacacaacacctgggcagggggaaaatatcacctcattgtctccttttagatctcagatggatgcatcttttctcttgttctttgcgcttctctgtcctccccatgtagactgcagaagagagagaaggctaaggtttatgagtgggagaagaaacratcctatccctcccatgtctcatttcaggacataaggaactaaggaaaagggccaaactaaacactttaaatcactagatatgatacataggagatgatactttttggggtttttgggtgtacccccaagtatagctctctgtttatagaaaggcctcacaaaatcactgctgttcagtggtatgtttgggcaggggtggagaaagtagagcagggaaattcaatttgagttttataataatcagttttaaagccaaagatgcccaaaacagggttagcactctcaagtgaagtttgaaattacagggaagtctcagtgaactattctgactagggtacagtagcaaaaaaaatgtagaagagacaggaacaattgcctttgattgcaattgtgcccaaaagtccctaatacatgctgatcaaaaaagttcactgttgtttgggccagaaagatgttttcaggcttctctgctaatagtcttgctctgataatccaatttggtaagactctcttcttcatgtggagggtctagggcaggggtactccaggaactgagaaatcctggagctgaaatggagttgagagatkatctacaatttcctagtttttaacagaagaaactaagcccagagtcatcaatctcattaacaacagaattaggacatgtagagtccaagttaccattagaagattctttccactggaacactatattaaatcttgccccagttggaagatttgggccaccctgcttgccttctttcttgggttattaaatgaatggtttttgggtctgcgtcttgctgacctaaatccttgaactggaaacacaggcttatggatgggaggataaataatcctcttcctcctatgtctcttttcagagataatggacctgaggaaaacaccaaactagatggtcattaagtctctaaagtagaaacggcctcttagcttgaggactaccccagcataggtattgcatcagagcctacaatgtggatcctccccgcagctggaccaggtcattcatatcagcactaccctttcttagatgcctttgtctgataaactttgaacctatctctctgtttccagaacagagtccataactcttctaagaagaggaagcaaatcaaagcctggaattcaaagctttcttcagcagagtcaacagaccaataaagaaagggagtccctytgcctgtggcattgtccacactcacagggtcccacactcttatttgttcctacagagtaaaacgaggctagaaatacctatctttctttttctttggtgtgtgtgtgtgtggcgagagagagagagagacagagagagagatggccagttggggaaaaaaaataattcctttgtggatactactgtgtgtgggggggcagggggtacggtgaaaggtgggataagtttctcccatgctgggaagttcaagctgcagatttcaaactaagaggacataaagagactttcagttgcattttcactggaaaaaagtcaggacttatttctgagccaagtcctgaaatatgccttacccttaacctactcagaggaaggrgattgcccagaagctacaattcaactaactaactgcactcagtgggcaacaaagacattatattttgtgtttgagacatcaacttctattgactagggcaaggtataattctgaagctgccaaaatgagggcagctctcaccattctgaagcccaccccagaagctccagtgaaacttctcttgcttcccaatggtaaagctattttcttcttttaagattttatttttatctcaggagctactcatctgactgttctcatgacccaagggtctgtctrgattctctggctttaggctgttagtagggaaagctgaagtcctcctgcaaaccataaagcaagattcacggacctactggcaggtccatggggaggtgagggattaccatacaccccaaccaaacgaaacactatgctttcaaagattgtctgatttggccttttatctggccttgtcctcagaatctgagttatcgttaagtggaaatattctaggtagtcagataacattttcatgcttccttaaggatatgaacatgtatcttcacccaggcaaagtgagcaagtatcagtaaggggagacaggcttcaatggtcatctggttgaccatgacgttggaacatctaaagctgacatgtgagcatgtcaggaacataccatgcccaccattgatgcttcgagggcacaggctggggagacaggcacagtaggaactattagacatataagcgagggttgacaagagtaacaacaatagacagttttgttcatgagagaagggaatggggygaaataaggtatgcaaaaaattttctggccaggcacggtggctcatgcctgtaatcccagcactttgggaggctgaggcgggtggatcacctgaggtcaggagttcaagaccagcctggccaacatggtgagacccccatctctactaaaaatacaaaaaattagccaggggtggtggcgggtgcctgtaatcccagctacttgggaggctgaggcaggagaatctcttgaacctgggagatggaggttgcagtgagctgaggtcgcgccattgcaccccagcctgggcaacaagagtgaaactccgtctcaaaaaaaaaaaaaaaaaaaaatttcctggaagcagagttcgtaacttcttgaccttggatggggattggggtacaatatttcataagcatatcgaaaggtccacgttccattaaacactccactgttcccagaaaggactagtcataattttttttaaaggcacagaaataatatagaaaatttaaaaagtgagaacctacaactctagcagccatgaggtaagaaaataacgggatggggtttgtgtgaggaggtacagggagggctgtttyggtacacaggagcaggcagcctgcttcccaagtttgcagctcccgtctggatgtctgccctggggattcctctgttgcatttctttcttagggctctcaagcagtgaatctcttctttcccagccttgcttcccaagttccctacacctctcaccctacactgtgcacttctcactccatcctaagtttcttctctacatgtttctcccaatatgctcattgcctcccagatctcacctaggcctacgtctttatccccagattcctgtcttcagcattcctcgacccaacacccgggtccctcgctttttttgttcagataccctctttgctgctcctttctcctcgctgtccttctgctgtatacccaagccacatccccacggaggagccccgcgcctggcagctcctgcctgtcctcggccccttgccttgatctgtctcccgcctttttaggacccccgagtccctgctacctcgctcttaatactggggcctcgggccaaactcccccggccatcttccaaccctccggccccagcccaacccgcgaccctctctcagcctggccccttcccccgcccacgtctcccccctccttcacgccagagcccctcaggccccgcccccggctaccgaggccccgcccccgctttacccccaccaagccccgcccctcactcacctgaggtgtctccgcgcgcgcgcaggctgtgaggggttggggagaggggacagtgttgggggagagggaggcgagggggcgggggtcccccactctggcccgggcggcccagtgcggggggagtggggtcactgaggcggcggcagtcgccgggccggagccaggacccgggcgctcagaggcggcggtggcggcggctccatctccatcagcagcttcacctgagaagggacttgcccccccaaatatccccccccatcacagccgtccccctccccctaacaacttccggtcccactaccaggcgacaggcggcgtggccgaacaccgagcgtccccaagcccgggagactgctgggggaaaatgggagaggagctaggggagagtagccgagcgccgaaagattcaaatccgaaaggcaccatcgtctgcygaaggtaacccaaaaactagcctttaatctgcacccagtttgcaatctaagcacacgctggacgcccgatgtggcctggcacgtcaggccctagagccaagttttccctctgtaccttgtgaatcccaaaaatctgagacaggtctcagtttaggaagtttttggcaaaacttaattttgccaaagttagggacgcacgcccgtaacgcagcctcaggaggtcctgacgacatgtgccctaggtgactggagcacagcttggtgttatacattttagggagacaagagacatcaatcaatatatgtaaaggcgggacaactcaagctgggaggaggcttccaggtcataggtagataagaggtaaatggagcggggcgcagtggctcacgcctgtaatcccagcactttgggaggccgaggcgggcggatcacctgaggtcaggagttcaagaccagcctggccaacatggtgaaaccccatctctactaaaaataaaaaattagccgggtgtggtggcccgcgcctgtagtcccagctacttgggaggctgaggcaggagaatcgcttgaacccgggaggcggaggttgcagtgagccgagatcgcaccactgcactccagcctgagcaatagagtgagacttcatctcaaaaaaaaaaaaaaaaaaaaaaaaaagccgggcttggtggctcacgcctgtaatcctagcactttgggaggccgaggcagacgtactgcctgagctcaggagttcgagaccagcctgggcaacatggtgaaacccatctctactaaaatacaaaagaaattagccgggcgtggcggtgtgcgcctgtcgtcccagctacctgggaggctgagacagaattgcttgaactccggagacggaggttgcagtgagcggagatcgtgccaccgcactcctgcactccagtctgggtgacagagcaagactctgtctctacaaaaaaaaaaaaaaaaaagaggcaaatggttgtattccmctcaaagaaggcaatcaggtatgcatttatctcagtgagcagagggatgactttgaatgggaggcaggtttaccctaatcagttcccagcttgacttttccctttagcttagtgattctggggcctcaagatttattttgctttcacgacctcctaagacaatattgattttaaactcctagcaccctttgcctttcctgccaagtgcattggaactgttggggaaaggagttggagggtacatgtttttgtcacctctcctctcttcatggtatcctgaggtcaatcacctaggtgtccctgcagatactgccaaacctcagagaaggaagcccccctttttttgagacagaatctcgctttgtcgcacaggctggggtgtagtgggtgtgatctcggctcactgcaacctctgcctccttggttcaagcgattctcctgcctcagcctcccaagtagctgggattacaggcacccaccaccacacccagctaatttttgtatttttggtagagactgggttttgccatgttggccaggctggtctcgaactcctgacctcaagtgatccacctgccttggcctcccaagtgctgggattacaggcgtgagccactgtgctcagccggaagccctacttcttaacctacaagcctacttcctctctgtcttcctccccagttttgtttgttttggtctaatctcattatacatcccagtacaaatgcatccttcctcctgcaataggctcactccccaggcccaagagttatgatcttaaacagactatttattagaaaagtagaactataaagggagacggttgtgccccttgctctcctcgcaactctctggcaacctggagaggtagtataagatagtatatacacttttcttacacatgccacacacatttctctgaacaatccaaaaagaaaagcaaaacaaggccttgatggcagtaggcattagaaatggaggtggggtaggaagagaaaatagtgcttgtctccagaattacttttttcacttctagccccttgctgtaacagctcacacttcctggcacaggttcaaaggccaagaggggtatgtaacatagtgtccaaagagggaaggtccttgggtgaaatgtgctatatgtgtacttgggtatggcttaggaaggccagagttgtgatccaagaagttgaaaggtgggaaagatttttctgaagcagtgaggctaatgggtggggaaaggggtggaggtggctcctttccatgctcatggggagacatagacatggacacgatgccaggcattgctgagaacayctcgcaggttccagattggggccacggtgtctggctgcacattgtaaccatcatccacagccttacaaacaatgttcagttccttttgtccagctggcacaggggctttcaactgccacagacgccatgcccaggccttcctggggcgctgttcctctccatccagcttagccacctgccaggttaggcccccatccagagacacatccacccggatcacagccctgccaccaccactccrtgcatagcccttgatggtcacctcccctgattctacagtctctccatcccrgggctctgtgatggcvkactggacaggaagttcctraatggatggagcagagtcaaaatctacagtctcccagtccacagatggagagaagcctttstaatcccgccgtygccagtggctgtaactttcctctggctgcacactcactctgcccagccatytgacatggcrggcacccaccactccaggaaccaccacaygcacagggaagcygtggtcacgtggcaraggctgcccattcatctcatatgccagcaggacctcagcttcagggtccatggcccgagccagagggatggatgctccataggcagtcccagtagggtctgagtccagtccctcaaagcagacgtgggcctcagtttcacagagttggtggccagcctgggctaacacatcacagagccgtgccccagcccagcgtgcagtgctgatggctcctgttctccactccagaccttttacttctttgacctgagtcatctcagagcgtyggttgccgkcacactgcagagtgactgtgakctcgtacctgggaaagttgtgcaagtcatccagggaaagagacagtgactgacccccaggtgctcctactacgtgtaagcgataggtgtctggatccaggttaggtacaggcagatggttcygggtgaagaagatagggttgggtgtgatgtagttttctgtcagcagctcagggggaggctctgcattaaagggccgctggctgttgaccttcagggctgggtgacgtacaggatcatcagcataagggtcagaggtctccacggtgggggctaccttgtcttcaggattcagctccccaatcttgtactgagccagtaactcacgcacatgggactggttgtgaacagcatagagggcccagaagggctctaggggacccccagctgctagcatcagctttgaaggcccccctggatgtaggtccacaaattctgtgacatcaaagacctcagagcccagagtcacccagatcccagtctcagggctggtgtgggaactcacttcctccttagtgtatatgtgtgttgactcctgagcagcctattggcagggaaggagtaagataaaagggaagagactattaagaagaaatcacttggtcgggcgtggtgactcacaactgtaatcccagcactttgggaggccgaggtgggcggatcacataaggtcgggagttcaagaccagcttgaccaacatggagaagccctgtctctactaaaaatacaaaattagctgggcatggtggtgcatgcctgtaatcccagctacttgggaggctgaggcaggagaatcacttgaacccgggaggtggaggttgtggtgagctgagatcatgccattgcactccagcctgggcaacaagagtgaaactccatctcaaaaaaaaaaaaaagaaaaaatgaagaagaataagaagaaatcacttgagctcaccctgacccaacccacggtgttggccactgggaagcgaaggtagcagattagcagatttcatctccactgtgcatgaagactgcgtcactgtgaactctgtggtaactacaagaacatgggtcacagcctgggttgcctgtggagtttactaggactgattcctttattctgacaattttttttttttttttgagatggagtctcactctgtcacccaggctggagagcagtggccygatsttgatcttggctcactgcagacttagcctcctgggtttaagtgattcttgtgtctcagcctctcaagtagctgagattacaggtatgtaccaccacacctggctaatttttactagagatggggttttgccatgttgcccaggctggtctcaaactcctaacctcaagtgacccacccaccttggcctcctatagtgctgggataacaggcgtgagccactgcacccagtctgttctgacaatgaagcactttccctacttacmctacaccgatggtcctgataggccaacactgcaccgagacctaatagggtccccatgactctccatccctgggtgctggagttatcaccagagaaggtgaggctggggcgctggggctgaaatgaatcatttgtggagcaggcctgaatgcagatccttgaggggattgacttgagtctggaagagaggtcggtcttagtagcacgtatggtcatgtgaaagggctagtgaaggcttggggtctacttctttctccctggttggccattggttccttaagttggaacttagtttctccagggataggtgggaaaagtgggatctggctttctctgtcctccctggacacactctctcaactgtcttatttgcaaggtatgacattgtaaaagacactaagggtggcagataggggctaggaggcaagtcctgggatgggctggcctacctgcaggcctgttggagcctgaggaccacagctctgtgcagcagcagcattgtagcagacctgtagaaggaagattctgggatcaagatagggagaccctgggaggggatattagggaggcctaagggaatgggtgagaggaagacacagagaaggtcagcaaggagctttctgggcaagtgaggagtcttgagagtgggagtccaaatgggcccttagagaaaacttggagcacttcagagacagactgtgctgacaggatggcaggtaatgcgggtggggaatggggtaggagggatgggtgcttctagaatcagaatcacctttctcccatcttccattctgaactttgtccaccatagagaaygatgcctggggcgaagggcctaaaggaccgaaaccaaatgtctactggccagattattatttctgaagtcagcagaggacaactgtgggtcagactgacttaaacagggataaaaaagtgaaaaaaaagtagtgacagcctaaatgggtgaagaagcccagattctgggggcaaaatgccttgggtttgtgaaactggatctcttgttattcattaaccagcccgatttcctgagcaagattccaagccgttctgaacttgcttcctcwtctctgaaatgacatctgcctagcagagctaacatgaagagycaacaagtacagtagtacccccttatccactggggatatgttctacgacccccagtagatgtttgaaaccacagattgcaccaaaccctatattactgttttttcccccatacatacatacctcttatagtttaattactaaattacccacagtaagagattaacaacaatgcccggcgcagtggctcacgtctgtaatcccagcactttgggaggctgaggcgggcaaatcacctgaggtcaggagtttgagaccagcctggccaaaatggggaaaacctgtctctacaaaaattcaaaaataagccaggcatggtgacacgtgcctgtaaccccagctactcgggaggctgaggcaggagaatcacctgaacctgggaggtggaggttgcagtgagctgagatcacgccactgctctccagyctgggcaacagagagagactccatctcaaaaaaaaaaaaaaaaaaaaaaargagagattaacaacaataacaaaatagaaaaattagcccggcgcagtggcttacgcctgtaatcccagcactttgggaggctgagacgggcagatcacgatgtcaggagatcgaaaccatcctggctaacgcggcgaaacctcatctctactaaaaatagaaaaaaaaaaattagccgggcttggcggcgggcgcctgtagtccctgctactccggagacaggagaatggcgtgaacccaggaggcggaggttgcagtgagccgagatcgcgccactgcactccagcctgggcgacagagtgagactccgtctcaaacgtctcaaaaaaaaaacaaagaaaaagaaaaaaattataacattatactgtaataaaagagctgggtgtggtggctcacccttataatcctagtgagaagtgacattgtgctggcagtcctcacagcccttgctcactctcggtgcctcctctgcctgggctcccactttggcggcacttgaggagcccttcagctcgccgctgcactgtgggagcccctttctgggctggccaaggccagagtcggctccctcagcttgcagggaggtgtggagggagaggtgcgagcgggaaccggggctgagcgcggagcttgcgggccagctggagttccgggtgggcgtgggcttggcaggccccgcacacggagcagccggctggccctgccggccccgggcaatgaggggcttaccacctgggccagcagctgcggagggtgtactgggtcccccagcagtgccggcccaccagcgctgcgctcgatttctcgccgggccttagctgcctccccgcggggcagggctcgggacctgcagcccgccatgcctgagccccccttcgccgtgggctcctgtggggcctaagcctccccgaggagcaccgacccctgctccacggcacccagtcccatcaaccacccaagggctgaggagtgcgggcgcatggcaccgagactggcaggcagctccacctgcagcaccagtgcgggatccactgggtgaagccagctgggctcctgagtctggtggggaggtggagaaccttcatgtctagctcagggattgtaaatacacctatcagcaccctgtgtctagctcagggtttgtgaatgcaccaatcaacactctgtatctagctactctggtggggccttggagaacctttatgtctagctcagggattgtgaatacaccaatcaacactctgtatctagctaatctggtggggatgtggagaacctttgtgtctagctcagggattgtaaacgcaccaatcagcaccctgtcaaaacagaccactcggctctaccaatcagcaggatgtgggtggcaccagataagagaacaaaagcaggctgcccaagccagcagtggcaacccgcttgggtccctttccacacggtggaagctttgttctttccctctttacaatgaatcttgctgctgctcactcttcgggtccacactgcctttatgagctgtaacaytcactgtgaaggtctgcagcttcactcctgagccagcaagascacgaacccaccagaaggaagaaactccaaacacatctgaacatcagaaggaacaaactccggacacgctgcctttaagaactgtaacactcactgcgagggtccgcggcttcattcttgaagtcagtgagaccaagaacccaccaattccggacacactagcactttgggagacctacacaggaggactgctagaggccaggagttggagactccgtccctacaaaataaaaagttagttgggcatggtggagcgcacctgtggtcccatctactctggaggctgagaagatctaagcccaggagtttgaggttacagagtgagctgactgtgccactgcacttcagcttgggcaacagagagcgagaccctgtctcaaaacaaaaacaaaaaaaagttatatgaatgtggtctctctctcaaaatatacttttttttggccagtcatggtggctcatgcctataatcccaaaattttgggaggccaaggaaggaggatcacttgactccaggagttcaagaccagcttgggcaacatagtgagactgtgtctctagaaaaaaaaaaacaaattaactgggcatggtggtgcctgtctgtagtctcagctaccggggtggtggggagaggagtgctgagatgagaggatggcttgagtccaggaggtcgagactgcaatgaattatgatggcgccaccgtactccagcctgggcaacagggcaagaccttgtctcaaaaaaaaaaaaagcctgggcgatggagcaagtgtcgatcatggctcactgaagcttcaacctcttgggctcaagccatcctcctgccttagcctccccagcagctgggactacaagtgtgtgtcaccaagcctggctaatttttctgtagacatgggagtctatgttgtcagggctggtcttgaactcctggcctcttgctgccttagcccccaaagtgctgggattacaggcatgagccactgtccggcttcccctcccctccccctgcccctgacagggtcttgctctgcccaggctggagtgcagtggcgtgatctcagctcactatagcatcaaacttctgggctcaagccatcctcctgcctcaacctcctgagtagcggggaccacaggcgtgtgccaccatgcatggtctttttttttttttttttgtagagatgaggtcttactatgttgcccaggctggtctcaaactcctgggttcaagtgatccttcaaacttggtctcacaaagtcctgggattattacaggcatgagccaccactcccagcctcaaaatatcttattgtactgtgttcaactattttccaagcggttgaccatagctaactgaaactcaggaaaaggaaactttggataaggggagactgctgtaataacattgtctttgaaggcttttcagtccccaactctccctccattcaccctaaaaaaaattgaacccagctgggaactggaccccaacctagggtcccggaccacctcaatcttctctgtgccactgtagtgagctcagcaaattgaggagttaatggccagagtgtcaggggcaggctggagaaggaaggtaatttttctgctctctgccctgcaagtttcttcctcaaattgctgaacagagagcactgacccagcagggccaaagtgaggaggggtgacaaatgtctaaactgctgatgagatgctggagaccaatgtgctggggtgggtgggtcgtgggtagggaggaaaggaaacctagagatgggaataggagcagtcttcaccttgcccctgggccatgggaccattactctctctgccacctacctcaatgccagcagcctgtttrtactagaccagagcagtgcaggtagggctgactcgcaggtgaactcagtgagcccagaatcccaggtttgggagggacagccttttgctgtaatacagaaatgccacccgttggtgcaggtgatgacccctcactccccatgggcacgttaggtaggaacatacgtccggcatccaggcacaaaagggtcttgcggcaacaccccgcgatctcaagagcacccagacagaaggagtggaggcaggtactgatagttttgttgcccttgaggttcggagcacagctggacaccaaggccccctccgctgcccagctcagcagcccttcctccccagcttctttaccacccccagtctccttaccgggtccagtgtcttcagcactgcaattttaccagcccagctctgcgagttctcgagaaggggcggggccagcgccgttatgtccggctgcagtaagtgacctctcactcccctcagcttatccctcagccattggctggaagcgggtggctcaaccattggctggaacccgcctcctggagccgagacaggcaggttgctaagaagcctgggagaagaggctggctctttttgctgtcactctcgccaacagtccggagtccattatacccctggtgtgcaaagaatgggacccttgtgcaccagggctgtatgtccggagctcgggcagtgtggaaggtgacaaggaatccaaaagttgggctgacaggtgggagattttgagacacccctgccgcccctccctggaggaggcctcgggatccagtccggttttccccggctgtgatctccactttaaacccagggtagacctacctctatctacyctgttgcaactacaactaccctgtttatcttttagggaaagcaaagtcaatcgcttagttctcgtattccaggaatgataacagaaatgcctaaaatagtggttccaagaatttgagattccttgggctagtcgaatttctccccaaacaaaaatgaaacaacaacactgaatagccgtcttttattttgcgtagaaaaaaaaaataataatcgccccttggtggcacacgcctgtagtcccagtactcgggaggctgaggcgggaggatcscttaagcccaggagttcgaggttgcactgagccaagatcgcggcactgcactccagcctggacaacagagcaagaccccatctcttaaaaaacaaactgccccttaacaagagcaatggcagcttaacaccccgaagtatgaaggttgtagtctcttatctcaaagtaaggggcataaatataatacatttcctattacccttttgtcatttgatgcaggacaaaatttatcaaacctagtcccccaatctggacaaatgtatccatacactgccctctagaggccggacggtggagctgcaattttaatcagtttaagtgaaggtgttcacctttaattttgaaagatcatttcctttcctttcggctctccaactagagcttttaccaggaatcagggaacgggggtggggggtattaccaagagatataaggtaagggaaccgacagtgaaaagttggcaagttggctttggctcttaagtgtttggaaatggaaaggatttcaatctgtatacaatcaaatcactgaagaaggctaatgcccaacctatcctaccagttgttaaaaaaaaaatatatatatatatatatatrtatatatatatggagagagagagagtgagagagagagagagagggagaaagagggagagagagagaaagcgagcttcaacctaaaaaaaaaaaagtctcagccaaaggaagatacagagaagtcagttagggactatctaaaagcctccttcctaatagtgtcatctacttttgtgtgacacacatactttacataattgaccttaatcttcagcttttactttacagatgaagaaacgaggcggaaggcactaactaacttgatcaaggccacagctggttaagttgacagagacaggcctagaatgtcagatttgtctggcaccagtcctctttcctatccaccttcagattctttggaatttaaagcctactgcaaccacacataatcctatttcatttcccttccctcgacctttagactgtggtggactgaagggtttgaagtacactaggagtcaagagcagatccagrggaaattttcccgttgaggtggaagctacaagaaaactaactcagtgatgtttttcaacctttgggtcatggacccctttgagaaacatatagaaatggatcctagaaatatgcacatacggccgggcgcartggctcacgcccgtaatcccagcactttgggaggccaaggtgggtggatcacgaggtcaggagttcaagaccagcctgaccaacatggtgaaaccccgtctctactaaaaatacaaaaattagctgggtgtgttggtgcgtgcctgtaatcctagctactcaggaggctgaggcaggagaatcacttgaactcaggaggcggagattgctgtgagccaagatcgtgccactgtactccaggctagcgacagagactccgtctcaattaaaaraaaaaaaagaaatatgcacatacatttttgtatactacttcaaatagcacccctctctctaatctgatcagtgggcccaaagatccacagaccataccctacacatatacattctgttaagagggcctaaaaagatataatagggtttgatttgatgaacaatctagtggccttagaagaggggtgattaaatagcaatagaagggctattttctaaactagatgtttaagaaaagattaaagggaataaagatgtatcaagatgcagggaaaggtgtgtttctgattcagtagaacattactgggtatcctttcttccaaattcctagtacctgacaaatagcaaaaataataataataataacaataaaataaaaaaaagcaacactccaatgcccttttctttttttcctttttttacttacattaaatacatcggtaaatcagcagtcgcattctgttaccacgattgttatgttgggagaggaagaaaggcaaatgctttctcagaagcaaaacaaaaacaaaaaaccacaacacccccccttaaaaaaackgaccagaagaaaaaaatgagctgggaaataaacaaaagaaaactaagatccccaagcccaacagagctcaaaggaaggcagaagaggtggtaggaagtagagggaaggcagccgatasgcccaraagctaaggccaaatcctgttcctatgggggtggggggagggagaagcctggggaagtggtttcccaggcccaagataatgaaacatcttcactcctgctccaagggggaaagctgcacagagaaagaacttcatttctagaagactttggaaagccatcctagttcttccacttgtaaaaaggatgcactgggtgctatggggggccagtggcttctgggaaaggaagggggaaatgtgtgtgtttcagggccatgggaactaaggctgcccctggaaaaggaagggaattgaggcctaagtggaagaacctaagctgggtccttcagaatctcagcttcatagatttctcagctgttctgggatagaaggcagtctgcaagccaaaagggcaggaaggttccaatcctaggtcactgtgacctttcctttctttctttcccaaaactccgggctggaacaaggaacttaaagttctcttttgccttgatggcttctcagagacatcttaaaacacctgatgaaggatatgaagagagactagagatttagaaaggaccaaggtcctctgataatatgagccagttgtaaggtaccttcagtgccggtcattccctctccacaggaacaggtggtatgatacgagggcaccacaggaggcctctgtggtactagcccctattggtacatggattaaaccactggttgcatgatggggagggatggggggattaaggatggagggactaaattcaagatattaacaaaggaacaaagaaacagggcctgatgggaggcagaggatagaacagactgtacagtgggaataaagatcatacctatttacaaggaagtagaaaagacatggtaatggatatcaaattgagtgtgaaacctgggaaaggacagaaaactcctcccttttgcctgacctcctttttactcccctaccttggcctgtgctatcctgagacactcctcaattgctcaattaattctccaggaaaggcaaacctatagtcaatagttagcttggcaagaatataggttaataattagagttggaggaagctaacagtggagataggacttgagtagctgccactggtagttttatctataacctctcctcgaacctcgcattaacctcagatttcattgaattaaaaagaaggtgggagggcaagtaaatcaatcaaaacttccataaaacaagtaccccaactgaactaccatcaattaaagtgcaaactgcaggggtatatggtggctggggctgaggccatctaaaggccagaggggaaaaaaygcatatgtataaatcagaggatgggtaccagaaactgtccctcctccaatcagatcacagcagagccaaagaygyaggcaaccagtgaaaattctttggaagactctggggtccaacccccacgattaggggaaacgctacctaagaggctgcgtgaggggaaactgggcctttgaagagttacagagccacagttgacactgcacctccacctccgcccagttagcttacmmggcacctcctgcytggtgcctgagatcttgcctccccattctcacctctacctaggaacaccctccacaaggccaaatcatggataccgcaatgttttcaaatatgagaaactccaaccaaataaaaacaaaaaggaaatgtttccttactccctcctgctctgagctttattctcccccagggcccttaatgtaaatgaactggaaacctccttcctcagttcctgggttcaccactttcwgcatcctggggagaggagaaaagaggctcaagaacagggactgaccaaaagcagaaggggaagggacaggagtcagaagygttttctgaaaaaatggggaggaacactagggaggaggagaaaagatacrtaagtcgctgtcttgtacctataatacaaagtgaagaaagtttgttttggaaggtaagtcctggggggagttgacccccaagccccagagtagggggtaggaggccagtggcaacagctgcctggtgtttgttgctgaagcgttaaaaagtgccatgacggagctgtcaggaggcagcccttgggagccagggctcagtgtgctgttaccgtaggggytgtgtgctgaggggtagggatggmggttatttcttagctcttgtgctagctccatacttgtttgctgctagccaccccctcagttgctacaacactggctcttgttctgctgggactgttcatggagatccacaccccggcttcggcctgctgcacctcccagattctggggttcactctttggcaacttcttagctagagataaaaagagaagagaacaaagtatggtagactttacttccctacccctctgcctccacccgccaaaaacggctactgaattggggaaaagggagaatttgagagattaaaagaatgttctgaagatgggagggttcactatttgcaaactttttttttttttttgagatggagtctcgctctgttgccaggatggagtgcagtggcacaatctcggctcactgcaacctccacctcccgggttcaagtgattatcctggctcagcctcccaagtagctgggactacaggtgtgcrccaccacgcccagctaatttttgtatttttagtagagacggggtttcaccacattggccaggatggtcttgatctcttgacctcgtgatccgcccgcctcggcctcccaaaatgctgggattacaggtgttagccaccacacctggccggcaaacttacacattgaagacaagggagctaaagctgcagccaaggatggaggtcataacagaaagttaaggtatttccatacctaaagtttttgcaaaaggagatactcgcacctatccttgatttgggttagctataattttgcctataaacgagggaaaaaggaggacctcaggatgttctgaccttacctattgccaggaagagatcattcacgttcatagctgtcttggckgaagtctccatgaacaataagctgttgtcatctgcatatgcctgggcctcctgcaaggagtgggatgtattagtgctcagaatgtagggtgggaacgagtattgcctttccactcccatgcagcacaacagctaggcaaaatcctaggttccctccccttaattaatacccctttgagccagctagcctagatgcataatttaatgacaactccctcaagatgaccccatgtccactcagtccaacacacaaatgtcagaaagcttaattataggggagagggtaagttagttgggggcttttgggttgtgacacttgaatagtcccttaccacaaatttaattgctccctccttcctgttttcacactggtacccccacagctggtacytccctaaccctctgctctggagttttctcctgactcctttgaaaatctcctggctgtcattagggtcacagtgttgctgtatttaacttggtgtagaactggggaatgagacaatgratgtcctctgttgacgttttcagagagggctggtttggaaaaaaagaggtcccaggaacagaggaagtgttagagaggaactccacgggccaccttacttcatactccaccatacgtttgttggccaggtcagctttgttccctgccagggcaataacgatgctaggactggcctgtcgctgtagttccttcacccatgtctttgctcgggcaaaggtttcctaggaaaacatgaagagaatgagtaggctggaatgactgccaatccatatccatcaccttttaaaatgagtctcaaaattcacctcttctaggtggtcttccctcagtgaaaccacaggtctctgataattcattatctgtcttcttagcacttggaagcataatttgtactcttatttgctatttcaagaacccgttttctgcccccttaccccctgccccaaactaactcctctaaatataagcaaggacagtcttttttcttttttttttgaggcggagttttgctctgtcgccgaggctagagtgcagtggctcgatctcggctcactgcaacctccgcctcctgggttcaagcgattctcctgcctcagcctcccgagtagctgggactacaggcgcscrccaccacgcccaactaatttttgtaattttagtagagacggggtttcaccatgttggccaggatggtctcaatctcttgacctcatgatcctcccgccttggcatcctaaagtgttgggattataggcgtaagccaccatgtccagccaacaaggacagtcttcttagctcacttacctgattagtaatgtcgtaaaccacgattgcagcttgggcacccctgtagtacatgggggctaagctgtgatatcgctcctgcccagctgtgtcccagatctcaaacttcactgttgtgtcatctagacaaacggactgggtgaggaaggccgctatggatgagagaatggaggggaagatgctgtaagtgggaggatgaatgggaacatccctcccccccttcaaaatgtaactgccctacactaagaccagtcaccacccaggatagtcagctacaggaaaaggttttgagttctccttacatgtaagtcttgaaaccaggattaagactgcccttggctaagtccttcctgccagaaatgtcactagctaaggaatgggggtacatcataaactaagagggacagaagaactggcacttatacgagtcatccttcttctaaccaaaataggagaataacaaatgacagagaaaatagcttcagataaaagtcacatcaagaattaattagaagattgggctgggcacggtagctcacgcctgtaatcccagcactttgggaggtgggggctgaggcaggtggatcacctgaggtcaggagttcgagaccagtctggccaacacggcaaaacccgtctctactaaaaatacaaaaattagccaggcgtggtggtggacacctgtaatcacagctactcgggaggctgaggctggagaatcccttgaacttgggaggtggaggttgcagtgagccaagatggcgccactgcacttcagcctgggcaacaagagcggaactccgtctcaaaaaacaaacaaacaaacgcaaacaaacaaaagaattaattagaggattggctgggcgcagtggctcatgcctgtaatcccagcactttgggaggccaaggcaggtggatggcttgaggtcaggagttcgagaccagcctggccaacatagtgaaaccccgcctctactaaaaacacaaaagttaaccaggcatggtgatggacgcctgtaattccagctacttgggaggctgaggcagcagaagtgcttgaactggggaagcggaagttgcaatgggcaaccactgcaccactgcactccagcctgggcaacagggtgagactcagtatccaaaaaaaaaaaaaaaaaaaaaaaagaattaattagaagattttaaagcttgatggcaagtcccatcattatcaatattatttggctgttactttttcatataatctgctgcaggtccaggaatacatttccaagatgactaataaaaaggggaaagaggccaggcacggtggctcatgcttgtaatcccagcactttgggaggccgaggcgggtggatcacttgaagtcaggagtttgagaccagcctggccaacacggtgaaaccctgtctctatacaaatacaaaaattagccgggcatggtggtatgtgcctgtaatctccgctgctcaggaggctgaggcacgagaatcacttgaacctgggaggcagaagttgcaatgagccaagattgcaccactgcactccagtctgggcgacagagactccgtctcaaaaataaataaataaataaataaaaataacaaggggaaggaataatttggaagttctcataaaagatcctttattgaattagcaccctattttggggtagtagtggggaaaaggtagcaaagatgagaaagacagacaccctttgtattttgcattagttccagcctctattttaccagatttttttttgtttttgaaacagtctcgctccttcgcctaggataaaatgcactggcgtgattttggctcactgcaacctccgcctcatgagttcaagcgagtctcctgcctcagcttcccaagtagctgggattacaggcatgtgccaccatgcccggctaatctttgttgttgttgttgttgttttgtttttttgagacggattttcactctagtcacccaggctggagtgcaatggcgcaatcttggctcactgcaacctccatctcctgggttcaagtagttctcctacctcagcctcctgagtagctggaattataggcatgtgccaccacgcccagctaattttttgtatttttagtagagacggggatttcaccttgttggccaggctggtcttgaactcctggcctcaagtgatccgcctgccttggcctcccaaatgctgggattacaggtgtgacccaccatgcccagcctattttaccagattttgatttttttttttttttggagatggagttttgctcttgtcgcccagggtggagtgcagtggcgcaatctcggctcactacaacctctgccccctgggttcaagtgattctcctgccttagcctcccgagtagctgggattacaggcgcctgccaccacgcctggctaattttttgtatttttagtagagacaggatttcgccatgttgggcaggctggtctcgaactcctgacctcaggtgatccgcccatcttggcctcccaaagtggtgggccactgggaccggcctctgtttttataaagggtttccatttctggggaaaagaatgggaytaagagggccagctccataatcaggtcttatatctcttttcaaaagccttaccggcccggcgtggtgactcacgcctgtaatcccagcactttgggaggccgaggcaggcagatcacctgaggtcaggagtttgagaccaacctggccaacatgatggtgaaaccccctctccactaaaaatacaaaaattagacaggtgccacggtgtgcacctgtaatcccagttactcgggaggctgaggcatgagaatcgctcgaacctgggagacagaggttgcagtaagccaagattgcgccactgcactccagcctgggtaacagagcaagactccatctaaaaaaaaaaaaacccttaccaaacattcaatctcctattaccccaaggcactcacctccaatggtgctctcctggtactcatggaactgccctttgacaaaacgtaataccaggcttgactttcccactgcagattctcccagcaggaccaatttgaactggcaaattttgctggcctggggttgcccattgggcctagctgtgcttctgctagtcatggccagattatcagaatgggaaagggtggagggagggggatactgtaaaggggggagggggaaggggaggggatttccaggcttcaacactcctgcaagaaaaaaaagtgaataaaattaaacatacgtccattgaagctgcaatcscttttcagagaaggatagaacctcttcatctccttgcttctatgaggacttagctctgagaaggtcccaggcagctgatcctcagtggtaagagttgggaagagcaaaataagaactgcttctggagtctgccctaccacataatctctaactgccaagggagccgaaatagagagactgaaaactgagagtttttaattccccagtaattccccaccaggtcttcaaagttttttgtttgagtcacacaaagtgatcaacctttagctggcctgaagaatatccagatccacccaccggtaccctagatccccagtatctccttggcatcctggtgctgtgctcttcttttccttttcttctttttttttgagacgtcactcttgttgcccaggctggagtgcaatggcacaatcttggctcaccacaacctctgcctcccgggttcaagcaattctcccacctcagtctcccgagtwgctgggattacaggcatgcaccaccacgcctggctaattttgtatttttagtagagacggagtttctccatgttggtcagactagtctaagaagtcctgacctcaggtgatctgcccgccttggccttccaaagtgctgatattacaggcatgagccacygtgcctggccttcttttcatttttccttagctctttgtcaaaatgagagattcactctaggggtgtgggataagagtcaccactcctaagggcagaagggtagttgctgctgtatcctttatatatgaccggtctccctgataagacatttctaaagatctaaccagggtcccattgccacaaaatctatcctttctcatttttggttgaaggtaaagagagaaatacaaccaacagatcacattcattatcaactctttgtttcattaacaactcttttttcactttgtttctgccatctttccaaatctgaaagtctatcaagaatcagtaagcttgacctactctcaacttgcagctgtcttgctggtgcctagggattagattaccctccacaccaaaggggcctaacagctgtagccctccaaattagaggcagagaaaggtataccttctaaagacatgcagaagtctccagaggatggtatagggcgttaagtctgcaagcaatcagtatttgatgaaagaatasactgaatcagctcctctatcttctaagagggctaagaaagctgctggtggggcagggaacagagagaagagttgggactttgagattctaatcgtctaaatctgaatacatttcatcatcctgactctragcggaaaggaactatgaaattcaaagggaagttagcataggcagagcatgcaaaaacctctctcccaaacctaagcattgcttgagagttgtactttgcttgttcaaattactctttcgcttttccaaagcagatcctagtgacttcacagacatcatactctatggcatatgtggggaaacatcattattttgtcaccacaattagtgggactggagttaaactggggttaaaaawtttcagtaaccccacttactagatcgtaaagacagaaaatcatacaggaggcaattcagaggaataaaggctctggagtccaattctccacrtttgtttttcagctctacttactagctatgaaccttgagcaagtcactaaatatatgtgtgcattcatttcctcatctgtaaaatgagataatagccttataagcacctacttcataagggtgttgtaaggattaaatgagataatgcatataaataactaaagtattttaagtatttgatagatactaagtgctaaataaatattaagctactaatcattactaatatgatataaagagaatttctctacctctctaagccttaccttctacctttgtaaaatggaaaaaataccatcctcatagctacaaataataagtgaaagatgtgtttagcatagtgctaatagctattaaaatatatctcaatattagttgttatcaatatattcctaaaaagcagccacagcctgggtgcagtagctcatacctataatcccagcactttgggaggctgaggtggatcacctgaggtcagaagttcgagccctgcctggccaacatggtgaaaccccgtctccactaaaaatacaaaaaaaattagctgggtgtggtggtgcatacctgtaatcccagctactccagaggctgaggcaggagaatcgcttaaacccagaaggtagagggtgcactgagctgatgcgccactgtgctccagcctgggtgacagagcgagactccgtctcaaaaaataaaaggcgggcacagtggctcacgcctgtaatcccagcactttgggaggcaaaggcaggcagatcaggaggtcaggagtttgagacaagcctggcaaacatggtgaaaccccgtctctactaaaaatacaaaaattagctgggcgtggtggcgcgtgcctgtagtcccagctacttgggaggttgaggcaggtgaactgcttgaacttgtgaggtggaggttgcagtgagctgagattgcaccactgtactccagcctggcgacagagcaacagcgagactcagtctaaaaaaaaaaaaaaaaaattagccgggtgtggttggtggccggcatttgtaatcctactcgggaggctgaggcagaactgcttaaacccgggaggcggaggttgcagtgagccgagatcgtgccaccacactccagcctgggtaacagagcaagactccacctggggtgggtaggggggagatcgggggcagggaagaagccacaatatgaaagtggtacagagaaagaaaaagagaaaaaacaggcctggcagagcggcccatgcctgtaatcccaggggtttgggagataaaaggggaagccttgcttgaggtgaggagtttgagaccagcctaggcaacatagcgagactgagtctctagaaaacatttaaaaaaattagctgggcatggtggtatgtgcctgtaatcccagctactccagaggctgtggtgggagaatcactggagcccaggagttgaaggttgtagtgagctgattacaccactgcactccagcctgggcgacagaacaagacgctatctctggaaaaaaaaaaaaaaaaaaaaggagacataactaaagggtaaagaggaagttagcaaaagaatgagaggtgagaactcaaggtcccaaagtagactagattaatacagaggaacatgacaattactttgattctactgggtattctgtagtccccttggtcagtcagtcttaaaaattcagatatacatgtaccattttatgattaagttttcaatggcctatgacgaaaggatcaaaataaagatgatacagcaaatttttcataaagctaaatttattcaatttaaatgagtatctttaattataacattttaaaatttattttccatttttagagagagtctcactctggtgtttgagaggtcaggagtttgagaccagcctggccaacatatagtgaaaccccgtctctactaaaaaatacaaaaattagctgggtgtagcgccacatgcctgtagtcccagctacttgggaagctgaggcaggagaatcgcttgaacccagagggcggaggttgcagtgagctgagattatgccactgtactccagcctgggcaacagagcaagactccrtctctcaaaataaaaaataaataaaagagaagacaggtgacaccataataaaaaaaaaaggacagatgataagctgatcaagtttccttcaggtgacatatatatgctatactctcaagaaacaatagaaaaagttactggttttttcaacttactcccttacatttttatgtatttcaaagcatgtgatccaaggggtagaatattaagcctcaatgttactactctacaatamaggaaaatgtgggagttagaatggactgaattctcatggctaaacatatcacttgagctctgggggagtgtaaagacaggaaacaattgcagacacgcttgagttgcaaagtctctgtcactaactctcagagatgggaagtcaagccagagcccagatgtggtcagcaagctttcttgctactaagcaaccttggattctcagagatcagtaactactgacttagaaaagactacctcgtaccctaatatgtagccttaagagtatgttctggctgcacatcatggttcacgcctgtaataccagcattttgggaggccaaggcaggaggatcacttgagcccaggagtttgagaccagcctgggcaacatagtgagatcccacctctgaaaaagaaagaatatgtcctgccttcctccctgttcacagcaattgttgagccacctctaagctttgatctttaatcttatcatgtttataagggtatcatttaaaaaatataatagctagactctcaaaaattctgtggtacagaaatgaaataatacatataagattcaattatttattttctattctcattttttcccacaaaaatactaatttttttttttttttttggtaaaccagtcaagtggtatgatgattattaccttcaaacccgagacaaaaaaaagggagatggggcaggtttctcttcctttcaacctttttagctcagaagagaagaaatcagatttaacttcccttagaagtgcagctctgccrggtgcagtgactcatgcctgaaatcccagcactttgggaggctgaggtgggcggatcacctaaggtcaggaattcaacaccagtctggcgaacatggtgaaaccccgtctctattaaaaacacaaaaattagccaggtgtkgtggctgacacctgtaatctcagctacttgggaggctgaagcaggagaattgcttgaacctgggaggcagaggctgcagtgggtcgagactttgccactgcactccagcctgggtgacagagcaagactccatcaaaaaaaaaaaaaaagaagtacggctctacaagaatgacttataaaatgacccattaactagggaggattgaggcctgaccatgggttagcccactagatgcaggagacccatggaggatgttctttaatgtgggcaactctcccaagcagtgcagcaaagtaggcataacagtaaaagtgtcttagcagtcccagctagagtaagactccattcctcaagcccccttccacttgttagctttgagtccctaaaccaaatacatatgaagtctccagaagtctatcacctatcaacagagacagagttctcggtatatatagccactggagtccaacccagtaccagttgtcagccttaaggtcagtcaggcagatcagagccagtctagaggtcatttagtccagtctctatattttataggtgaggaaaccgagacacatacaattagtcaatttgggctaggcgtsgtggcttacacctgtaatcctagcactttgggagggcgagatgggcagatcacctgaggtcaggagtttgagaccagcctggccaacgtggtgaaaacctgtctctactaaaaatacaaaaattagctgggtgtggtggtgcgtgcctgtaatcccagctactcaggaggctgaggcacgagaattgcttgaacctgggaggcagaggtagcagtgagccgagatcacacgactgcactccagcctggacaacagagcgattccgtctcaaaaataaataaatagccccatcccttccccggctcccccggtgtccgccatggccaaagcctaygaccacctcttcaagttgctgctgatcggggactcgggggtgggcaagacttgtctgatcattcgctttgcagaggacaacttcaacaacacttacatctccaccatyggaattgatttcaagatccgcactgtggatatagaggggaagaagatcaaactacaagtctgggacacagctggccaagagcggttcaagacaataactactgcctactaccgtggagccatgggcattatcctagcatacgacatcacggatgagaaatctttcgagaatattcagaactggatgaaaagcatcatggagaatgcctcagctggggtggagcacctcttgctagggaacaaatgtgacatggaggccaagaggaaggtgcagaaggagcaggccgataagttggctcgagagcatggaatccgatttttcgaaactagtgctaaatccagtatgaatgtggatgaggcttttagttccctggcccgggacatcttgctcaagtcaggaggccggagatcaggaaacrgcaacaagcctcccagtactgacctgaaaacttgtgacataaagaacaccaacaagtgctccctgagctgaggaccctttcttgcctccccaccccggaagctgaacctgagggagacaacagcagagggagtgagcaggggagaaatagcagaggggcttggagggacacataggtagatggtaaagagaatgaggagaaaaaggagaaaagggaaaagcagaaaggaaaagaaggaaaagagaggaagggagaagggagaggaatgaattgaggaagtgaacgaaggcaaggaggtaggaagagagggaggaggaaaggaaggagagatgcctcaggcttcagaccttacctgggttttcagggcaaacataaatgtaaatacactgatttattctgttactagatcaggttttagggtcctgcaaagggctagctcggcactacactagggaatttgctcctgttctgtcacttgtcatggtctttcttggtattaaaggccaccatttgcacaaaaaataaataaataaataaaaaataaaataaaattagtcaacttgtcaagtgttaccatacagccaactgctaagcagtaaatgtaggactcctagtcaggtactcctgcctcttataccactatacttcttaaggaagcaggaaatgctgaactctaaagagaacaccaggacaggatcgagagcttagactggatagagttcctgcctctattcagtttaggtaagtacttgctttgggactaaaaacaaattaagaagacccaggccttccttggcaactgggatgcagtcccatatctttctgacagaagaattaattcatcactactcttttctagaaggtctatgaccaaaccctgccaggacagttgaaatagaagcaattcaatgagaggcaataggaaaacaagcggtaacttttgcagaatttggtgggccctgcgattaatgtgagagttttactaagtagggaagatagagcagaaaccagtaaataccttcatctccctctccaactctgtttaaacccaagtcaccaaaatcttgaaatgagagttctaccacttggctcagctcttcattttgttgatccagtgttacctaatgagtcattggattaaatgagattccttccacatctcgcaccctttcccttatatttctccaagaggcaaaaagcatacttacctcttatcagtatggtagtacaaactccctattattgacctaggtaagattggaatgcccgtccctacttgtctgcctagcaaaattctatatatctcataagaccaagctcaaatgttacttcagtgaaattacataatcaccctctcccccacagaattaatcattctctagaggcccgtagggtcccacagtattaagactgtatttctggccaggtgtggtggcgcacacctgtaatcccagcactttgagaggccaaggcagatggatcactggaggttaggagttcgagaccagcctggccaatatggtgaaaccccgtctctactaaaaatacaaaaattagctgggcatgttggcacaggcttgtaatcccagttacccaggaggctgagacatgagaattgcttgagcccgggaggcggaggttgcagtgagcacagattgcaccactgtactccagcctggacagcaaagcaagaatccgtctcaaaaaaaaaaaaaaagactgtatttctataatagtatgtatcacattatcacagtatataaattgtgtctgtctgctctgctaaactatgaacttctttaaaagtgggagtttatcttaaaatcttcagagcacagcatgctgcctgatccctagtaggtgctcattaaatgctccctaaattaaggctaagtaattctacttctctcccccaatcaactcctccctttctgtaccatctggacagatcttactcaattccatttgggttcttttttttttttcctgagacggagtcttgctcagtcgcccaggctggagtgcagtgacgcgatctcggctcactgcaagctctgcctcccaggttcacgccattctcctgcttcagcctcccgagaagctgggggactacaggcgcccaccaccacgcccagctaattttttgtattttgtttagtagagacggggtttcaccgtgttagccaggatggtctcaatctcctgacctcgtgatccacccgcctcagcctcccaaagtgctgggattacaggcgcatgccaccgcacacggccccatttgggaatatttttaataggcctcagaatcaattctctccctggctcctctgtgatctcccttggatggagggcccccttgggatcttgcccacaaggtactattgcaactcgcatgggctaactgcttttcctgtcacccgttactatgcctcagatggcctaatcacacccaatatgtggccctcccacccaaacactgaggcaactatagctaaaaacaaagttcgctgaattttcagttgatgttgaacggtcaaaagctttgggccactatctattaattcctgacttgagaaacacaagtttaaaaaaaggagccataacaccacagaaccaggagacactctgaaaaggtacccactgtccctgaacagaagctacaaccttgcccagaaatgtacacatactttgttcacctgggtagctccttattcagttcagttactgttgagtcaatggctaaatctttcccaaaacggaagtgggagtataccatgtagggttttatggtatccttcctccaagagggctgctgcatttccttattataagttcattgtctcacactttggttaccttccaatctgaaatgctttaggattagggagcaaactatacgcttgcttcttctaccctatgcctccttctcagaagtaaaattcataccaataagcaatatttgctcccaggtaaagtaagagttagaagatatgaggtatgttatgcagtagggattgtccaggaaaaaaattttaaaagatatgaggtatgacttgaagggcaatgggaaagctctcttctccaaatatatttttgcaactccaggtctatgtatgaaattccttattgataattctactcctaaactctcttaggatgcaaaaaactgttggaaaaattagataggattaaaacacacacacacacacgcacacacggccaggcgcggtggctcactcctgtaatcccagtgctttgggaggctgaggcacgtggatcacctgaggtcaggagttagagtccagcctggccaacatggtcaaatcccgtctctactaataatacaaaaattagctggtcgtggtggtgcacgcctgtaatcccagctactctggaggctgaggcaggagaatcgcgtgaacctaggaggcagacgttgcagtgagccgagatcatgccactgcactccagcctgggtgacaaaagtgaaactccgtctaaaaacacacacacatactcctacacaactgtctctaggactggcttgcaggtgagaaaagttccttgggggaaaaaaccgaggtttccaatgggcgctgtacaaaggctgggtacaacagagggcttttaaagctagtaaggacaaattcaattaataaggtggtagtatgaaatgccccagctgtactctgactctgagatttagaggaaaaccgatttcaaatccagataagcttggagcttctcagatccctacagaaagacacacactgtactccagcctaagtgacaaagcaagaccctgtctctaaaaatagaagaaaagaaaagaaagacaaatacaggggcctcttaggagaaccatcatcatcatggataagaaagggatagtcaagtaatgtgaacatgcagagaccatgaacatccagagaccatgaatttgagataagggtctgaaattcctttctttagcagagatgccaacaattatcccaaccaaaatgatcctttctccccataaagttttgttccatctctttgggcacttcctaggacacccagcacacaacttggggtgtgtgtgtttgtgtgtactcaaggtgaataacacacagtacagccctctgcttgtcggacttggtagaagacaaaatgaactgtgaaaggaacacaataaataacagagtatcatcccagaagggaaaactgtagaaagaataagactagagtttgatgagaacatgaaaacacaattgccttttgtgacacatcccccaaagcaaagcaagattagtctgatttgctgtctctgatccttgaccttcctaaatgaaatatgaataaggtatgtgtgggaggatttacacttcttaaactgctgtacaccttccatattttaaaatatgtacatattaacttttgtaattaagaaatgtagtgatggccgggtgtggtggctcacgcctgtaatcccagcactttgggaggccgaggtgggcggatcatgaggtcaagagattgagaccatcctggccaacatggtaaaaccctgtctctactaaaaatacaaaaattagctgggcgtggtggcgcacgcctgtagtcccagctacttgggaggctgaggcaggagaatctcttgaacctgggaggtggaggttgcagtgagactccgtctcaaaaaaaaaaaaaaaaaaaaaagaaatgtagtgataaaatatattggtagagacgcagaaaaggaggaagtacagtaagggaaaatccaataggctccaatctatgagggactaagaaggctagcagaccattaaaaatatgtggggaggagggtactccactcctctgctttggcaatctttgtcttttttttttttggagacagggtctcattctgttgcccaggctggagtgcagtgggaagatcatggctcactgcaccctcgaactcccgggctcaagtgatcctcctgtctcagcctcccaaagtgctgggattacaggcgtgggctactgcacctctgtatctttttctctactcaccatcttccccagatacttcatagtttgacccaactttctaacagcacagaaatctgggcttttgaagtagacaaagaacaaggggtgatgccaagcttttgaaatggaatttctcactcttccccaaatctcttcctcagtgatatcaccgcatagtttcggacctgttaactccattacctgcctgggaaatacccaagtcaagtctaagtcccacaaaagtttcaccaactatgatcagaagatctcctgatggctgaggatctctaagcccctttcccatgtagataatgaaatagatatgaaatagattctcagttctaggagacatggtatttgctatagaccacattattaagtgggaaagaagtggacaaaacatgcccccaatccaacttcttagctctttcataggacatgaaacagtaagttaagaaacagactgcagtatagaccagctatgaggccaacagaaagtgtaggggctgagtttggagcagccaacagtcatggaaaaaaaaaaattactttgatcttcatccctaccctgggagttttaaaaagcttcaaattaccacatctaaacactaaagggaacaaaagagtgtgtactcccaagacccagagcccccagcccacccttcagcattcccagaagttcccataactgataccaggccctgcttccattacttcaactaccttagtcttctagattaatacagccttcttcattttccccagttctccctcactgaacccaaatctctctcagctcaacaccatagcaccctcagttctttttacaataggcactttccctgaaaagaacgcttcttacccaactaagaacccttctcaggcccttccaatgaacctctctgcagggacccagccccagtcacccccggggctcgggcgacaggtctgaccctcctcacctcccggcaaatgggcttacctcacccgctgccctgttcctttccccagctcctccctcttcagcgctgcttaatgaggcctgcccctgccctcactcaagctccaggcctccagcccccggccctcggcctggccgccgccacagcccagccgccttcccgactcaccaacttcggggtcccaggccgcccagtcccctcctcagcgacccccattaggcctgccggggcccggcccccttctcccctctccggtgggccactctaacccctcgcttaggaccagacccgcctccgctctcaggccaggctgctctcatctcccgggcgcttccgcccctgccctttgggctccatcagctcggtacctggggctccgtctcccccgtcggccccaagcctgtgtcgaacagacaaacagctgcagctcaaccaaaccctcctgcccctccttctcctcctcgccctggggcggggctccagccaatagctcgattacccgcctaccttcgagggtgggctatatgtgcactcatccacc

SEQ ID NO: 97809 - DNA, 52501 bp, Homo sapiens
gaagattgcttgagcccaagagatcagcctggggaacaaagctgtatgtatgtagagagatgtataaaactgactgggccaggcgtggtggttcatgcctgtaataccaacactttgggaggctgaggtacgcggatcatgaggtcaggagttaagacaccaccctggccaacgtggtgaaatcccgtctctactaaagatacaaaaaattagctgggcgttgtggcaggcgcctgtaatcccaactactcagaggctgaggcaggagaatcgcttgaatccgggaggcagaggttgcaatgagccaagattggggcactgcactccagcctgggtgacagagtcagactctgcctcaaaaaattaaaaaaaaataaatgaaggtatacatttaaatgtagatcacaaagcaatggtttctagtctgaggggagtccggcgctatatggaaactgagcattaaatatttactgtattagggctgagtgcagtggctcacacttgtaattccagcactttggggccgggcacggtggctcacgcctgtaatcccagcactttgggaggccaaggcaggcggatcatgaggtcaggagatcaagaccatcctgacttaacacagtgaaaccccatctctactaaaaatacaaaaaattagctgggcgtggtggcacctgtctgtagttccagctactcgggaggctgaggcaggagaattgcttgaacctgggaggcggaggttgcaggaggttgtggtgagctgagattgggccactcactccagcctgggcggcagagtgataatccgtctacaaaaaaaaaaaatttactgcattaatgtactatacattttcaaatatatatagatgggatatatagtaaaattacataaattttacatatagtaaaaatgtggctaaactgtaggaacttttcatgattcagtgtaatgaactattgtgcaagaagttttttgttcttgtttttaattcttttttttttttttttgagacggagtttcactcttattgcccaggctggagtgcaatgggtgcgatctgggctcactgcaacctcctcctgggttcaggtgattcctttgtctcagcctcctgagtagctgggattataggtgcccgacaccaggcccggttaatttttgtatttttagtagagacggggtttcaccatgttagtcaggctggtcttgaactcctgacctcaggtgatctgcctgactcagcctcccaaagtgttgggattataggcttgagccactgtgcccagcctcttttttatttttttattttttttaatttttatttttttgagacggagtctgttgcctaggctacagtgtggtagcacagtcttggctcactataacctccacctcctgggttcaagcgattcacctgcttcagcctcctgcatagctgggattacaggcatgcatcaccatgcctggctaatttttgtttccgtttttttttttttttttagtagagacccccgtctctactggtgtcgaactcctgacctcgtgatctgccctccttggcctcccaaagtgctgggattataggcatgagccaccgtgcctggcccccagcctcttgtttttaattctaaaagtgggcattaaaatagttaaaataaaagatgaagaacaaaaagaatgatactaaaaattcttccatcatggctgagagaccagataatctgtcagcttattcagcaggtattaggggtggtaagaagggtcttttgagtgctaagaatatggagtgagatgataaagataggtcagaaagggggatggcttaagtaaaattactttggttcgctgggcgtggtggctcacgcctataatcccaacactttgggaggccaaggcgggtggatcacgaggtcaggagttcaagaccagcctggccaagatagtgaaaccccgtctctactaaaaatacaaaaaaattagccgggtgtggtgatgggcacctgtagtcctagccactcgggaagctgagacagagaattgcttgaatccaggaggcagaggttgcagtgagccgagattgcaccactgcactccagcctgggcgacagagcgagaccctctcaaaaaaaaaaaaaaaaatttactttggttcctgttcttcatgggatctcactttaggctatctatgtgcctgctgatgacttgactgaccctgcccctgctactacgtttgcccatttggatgctaccactgtactgtcgcgtgccattgctgagctgggcatctatccagctgtggatcctctagactccacctctcgtatcatggatcccaacattgttggcagtgagcattacgatgttgcccgtggggtgcaaaagatcctgcaggtgagtatattactatgtgggatcagtgtccggaaagtcaaaaagagggcctgtggggactatatgaggactggatctttcttagtgatttgttttggagcaaggaaagttgaggctggcaattgctagtgagagctaatgaggtctcttgagtttccaggtacttaacgctttggaatgcaatatttttctttctttttttttttttttgagatgagtctcactgtgtctcccaagctggagtgcagtggtgccatctcggctcactgcaacctccgcctcccaggttcaagcgattctcctgcctcagcctcctgagtacctgggattacaggtgcgcgccaccatgcctggctactttttgtatttttagtagagaccaggtttcatcagttggtcaggctggtctcgatctcctgacctcatgatccacccaccgtggcctcccaaagtggtgggattacagacgtgagccactgcgcccggcggaatgcaatatttttctaacagcaccaaactaggactatggagaacaagacactgatctttcttggctgagggccctcataacaccaccaccttctctgccccctagcatgtaactttccctttgttagcttgtccaaattaaaggaatgagaatacttaactcagtcttcttttttctcataggactacaaatccctccaggatatcattgccatcctgggtatggatgaactttctgaggaagacaagttgaccgtgtcccgtgcacggaaaatacagcgtttcttgtctcagccattccaggttgctgaggtcttcacaggtcatatggggaagctggtacccctgaaggagaccatcaaaggattccagcagattttggcaggtgagattttgagtacaaatcttgaatgtttactgtgctgtggtcccattccaacaaccgtcaagcaatatatgtaatatactatgcttaattatattttttaatttaaaaaacaaacttacccattgattttgtttgaaaatactctacatttaatttgagtgtgatttgttacttgattctctagctcccttttattttatatgtattttttgagactgagtctctgtcgcccaggctggagtacactggtgcaatcttggctcactgcaacctccacctgccgggttcaagtgattctccagcctcaaccatccaagtagctgggattacaggcacacgccaccacgcctggctaatttttgtatttttagtagccatggggtttcaccatgttggctgggcttgtctcgaactcctgaccttaggtgatccgcctgccttggcctcccaaagtgctgggattacaggtgtaagccaccgtgcctggcccatgtgttcttaattcatactgtatcatatcttgtaaatttgatttgtgagggaaatttaagctttctaagatgacatgaattcatcacattctaactgatggcctgaagtggtgaggaatgttacatgatgcagaaagttgatatccctccgcttcttactctttttttttttctcccccatcatacaggtgaatatgaccatctcccagaacaggccttctatatggtgggacccattgaagaagctgtggcaaaagctgataagctggctgaagagcattcatcgtgaggggtctttgtcctctgtactgtctctctccttgcccctaacccaaaaagcttcatttttctgtgtaggctgcacaagagccttgattgaagatatattctttctgaacagtatttaaggtttccaataaaatgtacacccctcagaatttgtctgattctcttggttctgacaacatagtcaacactgaagggttatgtatttaattttagttttagagacacggtgtctggctgtgttgccaagactggtctctaactcctgggctcgagatctcccacctcagtctcctgagtagctggggctacaggtgtatgtagtctcacatcaccagcactgttttcaacaattagatttttagagtggctataagaagcagtttcagcatgaagtgggccatgtatgtttgaaattggtccttaaaaatagccattctcttttgttgatggacaaccgtacctcttgtgaggggtttcctgtgggtagtgtgatcttagtagggcctcagttttgggccttttgttcaatacaaattgatttttttttttttttggcctctattccatgtggcacatccctacttcttggttaaaaataggacttttttgaagggcatattgggaaaaactcgttttagaaataacttatttccaggggttaatctgagtttaatgaattaaattttcaagaaatagtgatgaagaatactgatctttgttaaaatggaatcaaaagggttctctacatcttggttaggccttcatgtcttcagaaagtgtacttaactacttcctgacattttgggcaagcctaaataaaagttgcttgtgattccttgaggctatgcagaggcatataataccataaggcctagtccaccctctgtgaagatccccttatgaaagtccagaaaagataatcttacaagggaatagcaattttcagagttgctggcttgggcttctaaactaatgaagttaggttattttcccttcattttagccgactgagaggtgcaggggtagaagatatattttaccatttcaatttaaaagaagcgtgcaaggtcagattgggttcctcttgtgttcttttccgggaccagacccatccgactgccctctcgcggtagcactggagactctgcaagaactctgatcccattttcaaatccatgaaggccatttgctgggatgtggctctcagttaaagactgtttacagaccagctggggcttttgtcctggggaggagcctgtatctataagctccacccgctgagtccatcaagttaggtagaagctgggcggggacaagctgagctccaattcagaggcccctgggggctgaaggttggggagggctttttggcgcggggccaggggtggagtaggggcctctaagcttccttccatctgcctgtgacgtccttggcagcagcctctcccgcagtctctcctgtgtcatgatctggacagaaggtggagcccctgagctgcttgtgctggtagtttgctcccagaaaagctgggatttggggaaatgctgagttatgggggtgtggacacttcctctaggtcctgactctggagtgggtaagaagctggtagaaaaagccctagggtacaggtcagccctttctgctttgttttctcacgtcacccgatacagacctgggaactgaaatcctaaaggtcttttgcatccctccaccccttcccccaacatgttcacgtccttcagcgtttatcgagaaccttctccctctcagtagctgcaactatttgtttccttccccctttgccggcctcttctaccatgccactggagtgtcaacacagctctctaaccttcctccatatttctcctggtctgccctgtcctcgcctcctccctctctccacccagagaaagccccgcccttccctcctccctccccaccccagtctgtcacacagggacatcaccctacagcagttcaggctgtgtggttcgcaggaagcatacactggctttttgattcttgctagttcccagctcacagtttgggaggatccaacaccaacctttacgtgaagtggrggcccaaggacagtgaggagctgggtggtcccagcctggagctgtgccagcctgacatgggtgagtatggggaccagccccggggaaggcctgagggatgcctactccctccctggctgactcagcaggggtggggcctaacctttgctcatttgggggctgaaggagaggaaacaggactctgggggacggggggcacagggctcagctagcgaggctgccgaccacgggatcctgagtatgggcaagccccagttctaaggaagagcctgagacgcatcttaggccagggctttcccagccccctccccgccgccccgtggaggattgcccctgctcctccccatttaagctgttgagattcaaggaaattttgacagtactcactgctagcccccacaaaagtaaagccggcttttggcagtgctggaaggtctttaaaatgcctcccctccctctcatttttctaaggccttttaagtctgtcttctctcctcccccaccttgacccaccttcaggtgggggctgcactgagcagctgcttcctgttgccccagagactgaagcaagggtggtggtggttgggggaaaactgaaccaaagtcgattctcatggtcccacatcagcctcaccagggctgctattgatggcccccacactacagtcactgagggcactgagtgggacgcaggattgaggttgagaggataggaggtttttgccttcgtggcttcctgattccaaaggccccacagccgtagggatggagccctgaggagctgaaacacggggaaccagttcacctagtagggcgctgcgcgtgacccccagcaggctcggccttgagttccctctcctgcacccctaggcctcctaggagcccatgtagctctttctgccttccccggcctcttttgtgaagcggtctttgctggtgccctgggagcgcgggcagagctctcccaagtccttcctttcggacctaccaccatcccccacttcaccgcagaagtttctgtctctttctgggatccgttctcttcctcccatctgggatccttcctggttctggcccctaggagacgccacccgctatcctctcccccagtggatccttcgcgactgctctcctgagcggttgtcctcacctcggtagttcctgcccctttaagcaccacctcctcccctccgccgccgccggcccagggctgggggaggaggcgcagccgccgcccggctcggccacctgcgcctctgccgccgccgccgccgcctgcggcccggccctgctccaggtgaggcccggcacccacctccagctccggagtcccttggcgggccgttcctgcggtatcctgccccgggatccctgctgccccgggattcgggatctgactctccccctgagggagctgcccttcctctctcccctgaactatctactcgcccattttccccctgtcctccgcgaccggaatccggaggcttctcacgcctctccgccatcgtctcccgagtacctttcctattctgggcccaggatctccccctcccccgcgccttcttcgccagaaaaatctcccgcggtctgggtttcgcctcctcccctctgaactagcgctttcccacgccttcctaaccccaatgggaggggggatacccaccccaactcctctccttccccgtagtaaggggggcgggggagcaacatcgacagcactatctgtccctgctccgctcagccctttaagttcagctaagtcccatctaaaccttttctgtagtcctcaccccaccctacatctccgggagcttggggtccaacctcagcaccgcctactgagcccaggtgggaaggactctcctcctgggcctarggttggtcggtgcagcctaggaaggcccctcccccagaacctgggagctgggggccagggcgctgccggaatcttgtgcttcarggcctcagggacagttgggagagagtgcgtggggagctggggctaaatctctaagggagttggggcgatggggaaggcaagagaagtccagtcttctctgttcagatgcaaaggaagccccccgactccctaggaaataggggctttctctaacttccaggaccaccatagagaatcccattgggaagtttggaaacaagtctgtgtgaatctgaggagccacctgtcgacttaaaggggagaagggggccgggtggagtgtgctcgcctgtaatcccagtactttgggaggccaaggtgggcagatcacttgaggtcaggagttcgaaaccagcttgggcaacatggcaaaaccttgtctctacaaaatatacaaaaattagccagtcgtggtggcgtgtgcctgtaatcccagctactatcgcttgaacctggcaggctkgaacctggcaggcgtaggttgcagcgagctgagatcacaacactgcattctggcctgggtgacagagcaagactgtctcaaaacaaaacaaaacaaacaaacaaacaaaagtgggggaagaaggggaggggtgttttccttgtgatgtgttatgggagaatctagccttcccagattgtagagggggtgaagacttttgctttaacctggtgggggggtctagttggaatggttacccggctaagagccatctccctgctagacagatcctgttaacagtatgatccattcagccagtgaggggaaggcaggtctttaataattatcccacctccattagagaattccccctccacccccagtccagctgcgcccctagctatgctctttcatttcccactcctcacttccagaattaggggactggctgccaagatctgcttcagactcttctaagtcatgtttggagggggtgctggggggaggagagggtgttcagcagtggtgtttggggttggatgccaggagtatctggtgggggagagggaaggatgtagagggatgcaaacgaatccccttctctctcttcctcctcccagccctagccatctggctacagagtggagccaggcactgtggcagctgaccccagagtcagggaggtgctgcaggaacacagggagggtgagaaagggggtgcaggtgctaatttgtccctccccattctcttcatgactagtccactggcctggcttgagggaggttcagcctattccctggagactctccttacaagttgctgataaaatgaccatttgccccttcccctttctagtagcttcctgaagggaaatgggtggggaaaagagaggtgggtgggtgatcagccacatctgatgggattgaggagtgtttcgggacatttggggtcagtctgccctctctcgtctggatggggggagaagcacagctgcagcatggggtgacttctagcaagaagtaaacatccagctgttgggcacactgtcaccccaacctcatccttcctcagagcaaggaagatcctgattagatgagatgaggtggggtctcattcaggaatgaggatgattgtagtctttctgcaccagatgggaagaatggatcctacctcattttcttttctaatcccaagtggtcctctcctatccaacacccctcttcctaaccgctcctggctggaatagtcctaaaggttgccctggagactaggcctggggctcggaaggggtgggggcggtcagtggggcacaggagtaaccggctcttccggagcagagtggagccagtggtgggtgtgtgtgggtgtggggaggggcgtggctacacccgtctgacgggcgcaggctcctcccctgcctgcccagtccccgactggccccctttaagattgggagcaggaggtaggaagattctccctcatctgctctggaaaagggcagggaagacaaaaggataccagcttccttacccacacccccatcccgccgcccttgaggcctcagttttatgcctttcttcacctgccttaattttttatttggggatagagaggcatttcttagcagaagtttgccagagccctcctttctccagaaggaaggaaacctctaccctgagtgtgacctctacttactcagggacttgaggtcagcaggctgttggaggagtatttttttttccccaaggtgacctgtaaatctgttgttttgacagggaggagagaagggttttggtttccacctgcctattccctccactggtaatctacttatctcgagagaggaagagaaacccccttagccttctgtgtctgtggcccacacactctgtgagcctttgctaaagctagcttccttcttatcctctctgagccatttgtagtgggggggtggaggggtggagtctttccccaaaattcagggaagagcccacccctctgtggagtaaggaaatccaatgtagactgatggatctcaccccccaactctgcccatttttcagatctctttcctcctcagacccccagaggaaaacgtatttgttgacaccccaacttgccagagtttcatcatccccactctgttgcttttccagaatattcagcagcctgagctttgcacagtttaggcaactgtttctagaactgcattgcattgaattaaatgggaattatcttcaaggctgcaaagtgttgagttgcaaggaaaggaaacctggtttcctttcttgtcatattttatccactgtttgacattgaagaagtcattgaacctctttgggtcttaatttcttcatttgatgaaggagagaaggttgaactagaatttttttttttttttttttttgagatagagtctccctctgtcacccaggctggagtgcaatggcgygatctcagttcactgcaacctccacctcccaggttcaagcgattctcttgcctcggcctcctgagtagctgagattacaggggcacgccaccacacccagctaatttttgtatttttagtagagaccgggtttcatcatgttggtcaggctggtcttgaactcctgacatcatgatccacctgcctcggcctcccaaagtgctgggattacagccgtgagccaccgcgtccggcctgaactagaaattctctaagctctaacatcatatgacactgttcttcatcctggtgccctgcagtggacattttaggtgacagccaaactctagtcctctgctagattttacttttctgagttttcacacagttatgtagccctgtcagaaaaaaattcccagaaccatagaatgggtggacatttgtggcatctttttgctgattagttttcagcttatcctttacttctctgactgcatttaggctacactcaggtctttgctgtctggttccagagccgaaccttctttcccccacgcacaggaatctttcctttccggtgaccagggccctgcagatgtcgccaggaaagtggtgatccaggcaggaccaggctgcactgaagggacagaggtgagtgggtggctgactcttgcctctccccatccctttactgaatcgcgacctgagtgactaacctttctatttccacgtttccattaccctacctgggaaataactgcccccgaaattcccctgactcttacccctaccagcctgttagagaagtggcacctgcctttgggcctagacgtttggtctagtcttttaagttaaccttgggactgtggcatgcctttcagtttgccctgtgtgaagcaggaccactgcctccatgagatgcgggtgcagagggagctgccaggtgggcaaggtggccagagttgcaggaggcacagcggcgctaggacccaggtccgggtcggaaagatgggctggcgggctttaggaccctgtggcggaggccgcgtggggagactctctcccggccgaggcttctccgccccctccggctccgactcactcctcccccgccggccatgttggctcctctcgggccccgcggttgagccgcgtccccctcccccttcccgaaccccggaccccagaccccctccccagcgggcgtctccacccgttctggcgcccggagcgcggccatgtgaaccgcttgtaccccggggagagacgagccccgagcccggctggacgccgctgcctcaggtttgtggggtctgtggccaggggcctgagggggagggagccccgctttcatccgaggcttccctcggggaacagaagctccagagccggcttgagccttgccggggcgggaagccgacgggagcttatttcctgcgaggatccaacccgaggcgagggtctccttgctctggggtctgggaggagaacagggctggtggggctgctgaggaccccggacggggccgcgggggcaggaggagctgtaggggctcccggcgacagtgaggaggcggagaagccgcctggctggtggagatgactcctgtgggggacttggggtggaatccccgggaggggctccacctcctcgggtgggggtggggattgcctgagcgcgaggggtgggtgagggggttcccttggcgggttaaaacgctccgtttgcggggagctgggcgttttgactgtggtgagtggagggcggaaggggtttccaggggtctgagggtgtctccctcggggagcgcacccattctcttgagcgtgragatcaggagagggccttccttgctgagggtggtgctgcgcttggcttggggccctcgcgtcccgggagaatcgcgcactccggggatggaggttsatagggcttccgctgaggctttccaatttgagctgggctgaggggcagaagggaagaataaagaggaattcctttttccaaggagattcctcactgaggggatccccgcttccgtggcagaaagatgataccgcatcatccctttctttcccggtgttcccagttttcaggagaaggcaatgtcaatagcagttgtcctttgtagggttaattggagtgagagatttgtctgctttgggggacgacggaggggatagctttccacctctatctgtacacaaacagcccctcccccagcctcccgcaggaagtggccgggaaatggcagctgtgcgtttgctgctgcgtgtcttgttgttttgaaatgtccattttaatcagatttggtttcattttctgaagccttctgggcaagcttggatcttgccaaccatgtggcccgagagacctttcgttggactttttttttttttgtaaacttgtcaactggaagtagtcaacttcagttgactcacgtatcccaatcccttctccagaacatctctgtcttcctgtctggtttcgttttgttttccctttagctagaggtcatagagaagcaaactcagttatctaccagcggggtacgctctatgtaagtgatgcaaattccctcagcatagagagctgtcagggagactagagagcttttgtggcacgagtagcttcttggggtcctactttagtatagttattatgacagtttctatattgcagagcacctgagcaagtgagcttgtgaagaagggtagattctaagaaatggacgaagaggaaggggtgaggaagatttaactattagatggatttgtgtgtcgggggtagggactgattaacagactgagattggtgaactcagtccttggtggtgattctagcctaagggcagcccctgtgggaagcttgttatttgactaaggggtgctggagatactaccttctgcagaatcaactaattagaatagtacagtttgttatcatatgacttactctttaatccataaaagaacgtctcccctcttattcttcttggagattggtaagcttttcctctgttccctgcaaagtcgtgcccagattttttttttctttcttttcacttgataatcccaggatatttctcctgtaacatatagtgatggactgtgtgctatgtccccaggcattttgtggcacactggatttggttaggggcaacagttggccacagaattttatttttctttcttttctttttcttttctttttttttctttctgtcttttttttttttttttttttttgagacggagttttgcttttgtcgcccaggctggagtggtgtgatcttgtctcactgcaacctctgcctcccgggttcaagcgagttgcctgtctcagcctcccgagtagctgggattacaggagcccgccaccgcatccagctaattattttatttttagtagagacggcgtttcatcatgttggccaggctggtctcgaattcctgacctcaggtgatctacccacctcggcctcccaaagtgcagggattacaggtgtgagccaccatgcctggtcttctcttcttttcttttttttctcttctctctctcttttcttttctctttctttctttctttttttttttttttgagacagggtctcactccgatgcccaggctggagtgcagtggcgccatcatagctcactgcagccccgacctctttggctcaagtgatcctcccacctcagccccctgagtagctgggaccacagacacgcaccaccacatccagctaattttttgtaatttttgtagaggtggggttttgccagtttgcacaggctggtcttgaactcctgggctcaagtgacctgcctgccttagcctcccaaagtactgagattacaggcatgagccaccatgcccggcctatgaccccaggaccacaggattttagattttgaaagataaagttttgtttttttctttttctttttttttttttttgagatggagtctcgctctgttgcccaggctggagtacggtggcaccatctggactcactgcaaccctcgcctcccaggttcaagcgatcctcctgcctcagccctccagtagctggaattacaggcatgcgccaccatgcctggctaatttttgtatttttagtagagaaggggtttcaccatgttggtcaggctggtctcgaactcgaattgagcctcccaaagtgctggggttacaggcatragccacagggccaagccttgaaagataacattttcagattatttggactattctgaaaactacgtaagcctgtcatttaaatcatcttttcactatttattttccaggcaaaaacccctcccacctagatgaagatccctagattaaagatccagtatgggagcagatagacacttatgattgtgtgaaagtggcatcatcactagtaagatagcagcatcattgctcttctcactggggctgttggggtttttgatattctggaaacagtaaaaacaagtccatctgatgtcagcatcctttttcttgcccctgattagttcctttaagttgctgtctgatggggttgatttgatgctgattttaagttcccctttcttcagcctttgcttacctgaattggcacttgacagaacagcaagttgattttccctgttgggggttaaaagagtaaagaaaggagagataactactcttgagtctttggacttttaaaagaaaagctgattttgagaaaatagtgatttcatttgatacatgattgaattgggagctgaatgaagcaaacctttcatggccttcttataaaatgggtgcatttttctgtcagagaaatatatttcttaatatttcaagcttctcgatgaaagaaaaaatctgaggtgtaaagagagctgtatgggctgaccccagagccagtctagaatgaagggttcatcttgtagtcttgcggctctggaatcaagtattactgggagagaagcaaagcttgttagggttactgacagtgtcttcctgctgttgacctttcttgtcaccactgaagaggtcaagcaccaaactgctatttttactgctgaaacagtatagaagttagtcattgataatgatgtttgaccttgtgtaagatgtatcaagagcagcaataatgccaagtataaaatttgagataattcctggggtaaataaccttcttggtttgtttcttaggatgttggtgtcctcatatgccttatatatagcccaagatgaatagtttctcagtattatctcatgtgggtcagtaggactatttttcaccagcttgttattatcagtctgcctaatttggaaatttaaaaaattgtgcaaaacaaaaaagcccatctttgaagatatctgatactttgaagatactgtcactagcagtaaaagtagcattggcttagtgttttgtcttttctcctctttaaagagaacagttattatgggggcattttgcagactaaaatactgtaatcttgccaaaaatttaccaaagaaaggaagaagttttttgttgttgttttttttttttttttttttttgagacggagtttcgctgtgtcgcccaggctggagtgcagtggcgcgatctcgactcacwgcaagctccgcctcccgggttcacgccattctcctgcctcagcctcccgtgtagctgggactacaggcgcgcgccaccatgcccggctaatttattggctttttacattatcagtacttccctattttcaggccttattttcttcaaggaatggctatttaagtacgtcaagatttgaggcctttcttctctcttgaaatttttatctctgtgaagaatgaagctgagttttttttttttttttttgttctctgaaaatagtaagagcaaagcccatgaccttcattggataagtaagctggtagtggcagaaaaggtagatttactcattcatttcttcagtccatggactcaacaaatatttcctttggttcttttgtatacttagcactaaattaggtgctagggatataatggtggaacttatatccaactgatgctgtggaaccgacataatgtagaagaaataaggacagagaacagtcatctttgaattcttctgaacagcctggacgtgacagttttctttgagtagccccctcttagtataatcttccttctttcattatctttgttctgcctcacttggagtcctgactagggaaggtagttaaggagaggatggatattttgagcctcagtcagtatatgatatagtttgtccgagtcagagttcaagggaagcttgttactagggcactcagaatgggttatcgtgattggagaagagggcatatttattctgtggcttggtacttggaattttttttttttttttagtgtagagatagggtctcactgtgttgcgcaggccagtcttgaattcctggcctcaagtgatcctgctgaggttataggcatgagccacctctcccagcctacatggaactcttattggtggaggaacatggcttagccagggagatgaggtttttagatacaaaagccaaagcgtcctcatttgcagtgtcaggaactgggaacagtgaaaacttggaactttcccaaggtgtggggcaggaatgggacagcttttacattagaacagggtttctcagccttggcactattgataacgtgggccagataatatcttcgttgtggggggcgctgtcctgtttgttgaaggacgcctagcagcatctttggcttctgcttactagatgccagtagcacataccttcagagattactaaatgtcccctacggggcagaattgcccctgatgagaacctctgtattagagtgtggtgggtaatccagagatgtgtagagttaagaaatatccttcatgatgttcacaattacaaagctaaaatgtagtggtgtgatttttactctagaatttgcctttgctgtttagtcaagataaacatttgaaatctctctcaccccccaaccccatttgtgagattttgatgtactacatgagaagaatgaacccaagagctgcagggaccactgcagtatccagctggagggtgttaatgtgtcttgttgtcctggggggtagcctcagaggctggagggttagaattggtcagggaggacacctgtaacagtgttgcaatatataatatttatttcaacactttgtgcattgtcagcctttttcttttttttttttgagatggagtctcgctctgtcgcccagactggagtgcagtgacgcgatctcggctcactgcaacctccacctcccgggttcacgccattctcctgcctcagcctcccgagtaggtaggactacaggtgcccgccaccacgcctggctaattttttctatttttagtagagacagggtttcaccgtgttagccaggatggtctcgatctcttgacctcgtgatccgctcacctcggcctcccaaagtgctgggattacacgagccactgctcttggtgttgtcagcctttttctattaaaccatgtcacaggcccacagagtagcagctctttgattggaactgggagaaaagcaacctattcggccctgtggggagggctttattgcttcaagcttatagggcaatgtcccttactcttataaatgaaacataggagctcttaaaagatccatttatgtayagctgggactgggctgggtgcttgaatgaatgtacttcctggtatgagagtcatctgctactctaggggttgggcactggctgatttcttttctcatttggtgaaaatcctattagttcaaagggagatgctctcctttgctttactgttcttactagctctggatgggaggacagagtttacctttagggtttattgtgaaaagcatcttgagtaggaaggttaaaatgaaataaacctaggttcattgttgagaggaggtgttcacatgtttttcgtattcccatactgtgacataattaattcccatatttaagtgacatctgaaatcaggagtcaaattgtatataaggaagtctggctggatcatccctagttttaaattatatttattttatatgtagaccgtttagacctgattatcttttttttttggagatagagtgttgctctgtcacccaggctagagtgcaatggtgcgatctcagctcactgcaacctccatctcctggattcaagcaattctcctgcctcagcctcctgagtagctgggattacaggtgcccgccaccacgcccagctaattttttgtaattttaatagagatggggtttcgccatgttggccaggctggtttcgaactcttgacttcaggtgatccacccaccttggcctcccaaagtgctgggattacaggcgtgaaccactgcgcctggccaggcctgatatctttttgaaaactacacagtcttttactgtttgtctaataatagtagctaatgtagtcctggtaaggtggctcacgcctgtaatcccagcactttgggaggtcaaggtgggagaattgcttgaggccaggaatttgagaccatcatgggcaacatagcgagaccctgtgtctacaaaaaaatttaaaaattagccaggtgtggtggtgagcacctgtagtcctagctacttgggaagctgaggcaggaggattactggagcccaggagttccaggctgcagtgagctatgatcatgccactgcacaccactctggatgacagagtgagactctgtctcaagaagaaaaaaaaaaaactaacgtttatggagtgcttgctggatgacagacactgtgctggggctctaatttagattttctcatttcatcctcaccagtccttaaaagtgggtacaaaaattgttacagatgatgaaacttaggcccagcaagtataagtaacttgtccaaggttaaacagctagctagtaaatagtagagttgggatttgaacctagagcccactacattgtgctgaccacattgcatagcacaaagacaattttatgtgtctaggaagcttctcgtaaatgaagtggttgtggttctgatgacagttcagaagagacaggtggagaaactgatctcacatactaaataacttcccattctttttaattctctgatttctgtgagccatcgacatgttgttattaatatttacaaaaacaggatatgctgtgcttttccagagcagcagagaggaggtcacaactttgttcttggattcaaatagagaatggaaaaatgaaccgtgacccatcattgaggaggatatagtccactgcacataggatggaagttgcatgtatcctccacaccaggggaggtgtacaaaaaactggggagaggagaggtgaggatcagatgaaattggccctctaggcatagtatttccaggacttctgaagtgaagagtgtcctccttgctctgtggtataagctttggaaggaacctaactggagactaaggaatgaactttcctttaattcttgcacttaagaaggattattaatctcatgatgcttatctttcagaccccctactgctgaggagtagctgttaactatactagggaaatcctgactgggcgcagtggctcatggctgtaatcccagcacattgggaggccgcggtgggtcgatcacttgaggtcaggaattcaagaccagcctggccaacatggtgtaaccccgtctctactaaaaagataaaaaattatctgggcgtgttggcgggtgcctgtaatcccagctgctggggaggctgaggcaggagaatcgcttgaaccygggaggtggaggttgcagtgagccgagatcacacccttgcaccccagcatgggcaacaagagggaaactctgtctcaaaaaaaaaaaaaggaaatcctggaggaccctgtgtgttttgtttgtttgtttgttttgttttgttttgtttttttgagacagggtttcgctctrtcacccaggctggaatgcagtggcatgatcttggctcactgcaatctctgcttcccaggctcaaacaatcctcctgcctcagcctcccaagtggctgggactgcagctgctcaccatcatgcctggctaacctggggtcttttcactataaagactccattttttcactgatgcatggcaggtttaggtctgctacttaatttagagcaagcttgtccagcccacccaggacaactttgaatctggcccaataccaatttgtaaactttcttaaaagataacatggagattttcttgtgattttttttttttttttaaagctcatcagctctcattagtgtattttatgtgtggcccaagacacttcttccagtgtggtccagggaagccaaaagattggacacccctatttagactaaagatgagatatcctatatgggagataagtaagtcctaaaaactttttcccttaaatcaacaaatgcacattgcttttagtttttagagatggggtcttgctatggtgcataggctggacttgcacttttgggctcaagtaatcttcctgcctcatcctcctgagcaactgagactacaggcaggaaccaccatgctcagctaacttttttattttttgtggagacagagccttgctatgtttcccaagctggtcttgatctcctgacctcaagtgatcttcctgcttcagcctcctggagcactaggattacaggcatgagccaccatgcttggcctatttttatttttaaaatttcagttaaaattgattaagatacagacaattcccacatactatgcagggtttatatatcatgctcagacttatgttatattcacatttatactaatggtgtctaattttagtaatgtagcatatttatgaatgtaactcttgcagactttggccagtgggcatatatattcttttcttttcttttttttttttttttttgagacagggtcatgctctgtcacctaggctggagtgcagtggcatgatcatggttcactgcagcctcgacctcctgggctcaagtgatccttctgccttagcctctcgagtaagctaggaccacaggtgtgccccaccacaccctgctcctttttttttttttgagatgaagtctcgctcttgtcccccaggctggagtgcaatggcatgatctccgctcactgcaacctccgtctcccaggtccaagcaattctcctgcctcagcctcccgagcagctgggattacaggtgcctgccaccacgcccagctaatttttgtattttttagtagaggtagggtttcaccatgttggccaggctggtcttgaactcctgacctcaggtgatccgccagcctcggcctcccaaagtgctgggatttcaggtgtgagccaccgtgcctggccttcacaccctgctacttttaaaatgttttgtagagatcggttctcgccatgttatccagcttggtcttaaactcttagcctcaaatagtcctcctgctttggcttccaaagtattgggattataggtgtgaaccactatgccaggcctcatcatatatgtacttaaccagtgtattcattcttttttttttgagatggagtttcactcttgtcgcccaggctggagtgcaatggcgcaatttcagctcactgcaacctctgccttgcgggttcaagcgattctccttccttagcctcctgagtagctgggattacaggtgcctgccaccacacccagctaatttttgtatttttagtagagacagggtattaccatgttggtcaggctggtctcgaactcctgacctcaggtgagccaccgtacctggcctgaattcttctcttttttaaaatgtagtaacataattcaaggagttgctttttctgtatcaagacagattatgtttctcacatatcaagttggtatgcactaggatgtcacaagaatccgattgatatgttagagtttaccaataattctggcttctgcttgctttctttcctttcctctgtcaaagttaaattcattctgatcaagggcttcttatcattcttagtagtattcagaaagggtgaaaaactttttagccatacctcaatgagccattgcactttacaaatataagtatcttgctattttattttccctgtgaccgtttctttatatttaagccacaaaactaaaacattaggaaataaccataatagacataacagaataatattttttgggataccctcatatttaatcaattttccactgctgacatttttctgacctgtgttcttggggagcataaagagtagaagtattgctggatgattcgaggtttgccattatgatcaccttcctgaaatgtattctccttttcaaatccctttactaatgtaactactatcttgagatatctagggctatggataggataattagaaattatgtttagctcaagtttaataatgaaacaaagagtgtttatcaaatatgcttttctgtcaaaaagatggctttgagaaccttttgtgggcctgggagggagactttaccttggggataaaaacaaaaggatggagaatgttaagtggtacagtagaggctaatatctaatatagaagggtaacctgggctgagtggggcttacacagagggaagactcctccaggtttgtatcttggtttttctcgctaacttgctttgttttttaatctacaaagctggctttaaaagactgttttcataggttcattgctcaggctagaggcatattttctccttctcttttcttattctgtaccttccctcacacagtacttaggtaggagaagggtaagtaggtggaggggaggggtcattgcccctggaagattccaggtgacataaccttgtttaaccgccagtattttttttccctctctctcccctcctgcagaaatggaggcaaacgaccattttaactttactggccttccccctgcacctgctgcctcaggactgaaaccctctccttcctcaggggagggcctctacactaacgggtctcccatgaacttcccccagcaagggaaaagtgagtgtgagggctgcttggcctggggagggaatgggcatcatcccttyagggcagattcatggggggatattttgctctactttgctgctggagagaaatcaacttctaagaacaagttctagggttttttggaaacattttttgtattgatttaaggttggaagagattagaaaaacccactggctttttcatcttagcctgttcttctgtcagccctgttcccctggctgctgacagagcagtgaagtggctactgctgctgataacccatgagagagataaagtgctagccttctaagaagctgtttttagaggttagggaagctacactgggccaggactgagagttgaatgaaggttgcagtgtatttattgccttttagtttgtacatcagagaaaggcagatgctagaagtacttattccaccttctgtccttggatggaaggtagggacaagggaaagtttaatgcttacctagttcccccagagagargttcataattccatatggaggtgttgctgccaggattgggtcttttcctggatttggcttaccagttgctctgtaccatgactcgccaggtacctctgtaatcttgcttgggtttcaagtcctttatacttggaagcagagagaagcccacatgcttccctcctttcttgtagcagaaaaatcctgctacttctccctccgatcctctcgaagagggttgcagatggtagaagctcctttatttcattggattccaccctaccctcaagcttccttaatatcttggttctttttgattgattgtcctccatcccagaggttgccattgatgatgagagctgaattctacagcacacaaagtgccccccctaccccgccagctggcatattaccttccaatgcctatagggaagggccaagcccagccttctgagctgggttcttgtcgctgtggtgactgcaaattctattcttagcccagcacaaagtgctggatctgcatgtgccagtgaggtggaggttgttccttttggtaccactgtggggccaaataggcactggggaaagggggcccctagcgaattcagtcatgcccctccaagggaagaaatcccctagggaatgagagtagggcagaatgcaagtcactgtagggagtctgcaaacagtttcatttaattaaaaacaaaaaaaaaggccaggcgtggtggctcacgcctgtaatcccagcactttgggaggccgaggcrggtggatcacgaggtcaagagatgagaccatcctggccaacacggtaaaaccccgtctctactgaaaatacaaaaattagccgggcgtggtgatgggcgcctgtggtcccagctactcgggaggctgaggcaggagaatcacttgaaccagggaggcagaggttgccgtgggtcgagattgcaccactgcactccagcctggtgacatagcgagattccgtctcaaaacaaacaaacaaaaaataaaccaaaaaaaagccagcagtaagcagcagcaaccagctctgctggtggctctcatggtaggcctggagagctctctagccccctactcagcctcagcagcagttgctaaacctacatccaggagcctctgggcttggtgttctccagagacccaaaaactaaatatagcaggggaggaatcccccttccctttaccatgtctttttctagtcagtgctattactttgagtttgttttggtaaagttgcttgcctacrtatctgtaactgaccttttctttctttctctgccaggtttgaatggggatgtgaatgttaatggcttatctactgtatctcacactactacttcagggattttgaactctgctccccactcctccagcacctcacacctccatcaccccagcgtggcctacgactgtctctggaactactcacagtacccatctgccaatcctggcagcaacctcaaggacccaccccttctctcccagttctcggggggacaatacccactcaacggcatccttgggggcagccggcaaccttcatccccaagtcataacactaaccttcgggctgggagccaagagttctgggccaacggtacccagagtcccatggggcttaactttgattcacaagaactgtatgattcctttcctgaccagaattttgaggtgatgcccaatggaccccctagttttttcacctccccacrgacttctcctatgttgggatctagcattcaaacctttgcaccctcccaggaggtaggcagtggtatccatcctgatgaggcagcagaaaaggagatgacttcagttgtggcagagaatggcactggcttggtaggcagcttggagctggaagaagagcagccaggtataactgggttggtgaactgggtgggraaaggaaaaatggagctcgggggggatagtggctttttgaggtgagaaaaacttgtctttccagctctctgcagtggaggctgatttgcatgttggtgattagcaattagcagagccaagtggctggtgtttttgtggcagcagcaccagctcgcgagtgggagtgcaaattatttcaagctcatgcagagcttctggcctggagagggcaggtgggcgagcccgaaacagccccaacagacaccctgcatcaagaaaggcttctttcaaaatatacggagtggttagggtctagcagcgggcattgaggctgttttaactgactgtggcaggatcagactggctgttaaagtcgtctgagcccaatgtagtgattggcatgcgaaggagggaaggaagcaggcagagcatatcattatttgtctactcagtttccttttttttgttgtttagcattagtacacgtgacagcccctctcatcttttccctcaaaatagataaaagcttagcttccagttgattcctggtacaagggtaaccaccactctgtaaaattacaggatgttttctcgtttcccaatggatggaggagatatctgagaacatgatagagatgttgtatcagaccccactctcttttcctctctttgcctgctgtaggattgattttaccagcacatctctgctcagagtatcttgatgtgatcggttcccagcaatgaactggccgcaataaatgttgaatgaatgaacatccttctagcaaagattgactgcctagtatagctaagtgaaccaatataaggcactgattttgacttttggtctctcctgkgatttcctagaactgaagatgtgtggctacaatggctctgtcccttctgtggaatcgttacaccaagaggtctcagtcctggtccctgaccccacagtgagctgtttagatgatccttcacatcttcctgatcaactggaagacactccaatcctcagtgaagactctctggagcccttcaactctctggcaccaggtaggtttggaggctatgtccctttaacttatccatgcagagtagccaaactttacctgaaagagacagtaaaatgggaaaagtattaggcaatcaggggcactggggcttccaggtaggcctaaggcagaccacagttacatgccacaggacttggtgccctaactgaattctgagctgaattggttcatgtcccaggttctttcccagtattccttttggccaagagctctgggctgtaataattcactgggtagggacttattatcacacagttgatctttctgggttctgacaaactaggaagaaaacatttgtcagtgagcagttaccttttactccactgaagtacaagaaagacatattttatgataaatcctagaattttgcataggtctctgggtagataataccaccaatgcctttcctttcattttcaccttgtagagatgaggtcttgctatgttgtccaggctggtcttgaactctggcctcaagcaattcttctgcctcggcctcccctcaaacttttatgatccctataatctcatgactactctttcagggagaaggctttacttgttacctaacttaatattaggaagaatcttcacattgtgggaactagaattggatgttttctgaccagtgtttcttaaatcttgctttctgatttttttctcattatcctgctctgatttttctacccttgtaaacagagccagtgagtggaggactrtatggtattgatgacacggagctgatgggtgcagaggacaagctgcctcttgaggacagccctgtgatttctgcccttgattgcccttccctcaataatgctactgccttcagtctcctggcagatgatagtcaaacatcaacctctatctttgccagtcccacctctccacctgtcctaggggagtctgtcctgcaaggtaagtgacggtaggtaggacaaagaaagacctttacctgagaaaagatgagagaataagtttcatagttagggccttaagagtgggaaatctggctgggcgcagtggctcacgcctgtaatctcagcacttcgggaggccgaggcgggtggatcacctgagatcaggagtttgagaccacctggccaacatggtgaaaccccgcctctactaaaaatacaaaaattagccaggtgtgttggcacatgcctgtaatcccagctacctgggaggctgaggcaggagaatcgcttggccccaggaggcagaggttgcagtgagccgagattgtgtcgttgcactccaacctgggcaacagagcaagactccatctcaaaaaaaaagtaggaaagcaagagcaccttgctgggagctgaggggctatgggatagtgtatggtggaactaaaagaggtataggctgctatactccgacctgtgccctctgctttgaagaacttgtgagacttggaatttgtagggagaaggaggctagaagctttattggcaccaggtaaaaggtatttcttcacacaatgacatctgtagcaactttaccctttaatcctcatgattggttgggagaaaaagctacttctttttccaaccctagggaagaccccttgaagtaaccctgtttagcttggtccagggttgactgagtagattctcttgttttatgtgatgccttttttttttttaaagcctatcctgtccctttggattctagataacagctttgacctgaataatggtagtgacgctgaacaggaagaaatggaaactcaatcttcagacttcccaccatccctgacccagccagctcctgatcagtcatccactattcagstacatccagcaacctcaccagcagtctcgccaacaacctccccagcagtctccctagtggtttctccagcagcctccccagaaatctctccagaagtttgtcccgcagcttctacagttgtctctccagcagtcttctcagtggtctctccagcttcctcagcagtcctcccagcagtctccttagaagtcccgttgacggcttcagtgacatccccaaaagcctctcccgwaacttccccagcagctgcctttccaacagcctccccagcaaataaggatgtcagcagctttctagaaaccactgctgacgtggaagagatcactggagaaggactcactgcttctggtagtggtgagtatccagattctattctatccctgtctggttccaagaaacttttctgtcccatgttgtagttagcctttccctattggcctattgtttaaatattttgcttgaactcttaacttgggtatcccttcctcccaaggtgatgtcatgaggagacgtattgctaccccagaagaagttcgtcttcccctccaacatgggtaaatgctctagtttgctacatttattgaccttgacaagtttaatgcacaactctagaaagaagggaatgcctcttttcctctgaggtgggggaggaatgggccagacaagagtagattacaggacagttatctgcagtgataatgtttcttggcatgagattcctaggttttccttcttctctcaaggtctgtcttccatcacctattcttttttcatcttgtagtgactcaattttgcccaaggagctccagctattatcttttccaaaccctagggctcacatccaaaccagctggcttgtcctatttctgtggacaagggatagtaatgaatgaggagtgacttagtactaatgaattgaggtggttttgttgttttaatgctcttaggagaggtaagggcaggaacagtacatgaccaaaatgaacaaactagctgacaccagggccttgtggaaataactgccttcctggatcttccccacccctgcccctcaaggctacttgtggtcaccaagtctgagtactgcttaaaattttgagagaaagattagagttagtcttagaactaactctgactaactttgtgttctgctcagaacacagagttcctaactaaaccctggcatattgagtcttttcatggaatcagcagcaaatttatttttctgcttgcctccctgccytttgtcttctgtctttattccccttaggtctttatcctctttactggaaatccagtaactgccctgaatggctcagggaggggtttctggcagcttatctcactgattttgtaaaggagggatggagatctctctgagcttgtgcagtttggtgtagtgcttttctcctaagggccttgatgtatttgctggagctcaagtcagccttctagccaagcttatctctcttggtgcttttgcatctgcatgcagttctagagatacaaatgtggggagggccatctgctcagagggcttcgcgcttaggtggcatgggagtgggtaggggtgtgacctggcggcagggcccatgtgcttctctggcaggtggcggagagaggtgcgcatcaagaagggcagycaccgatggcagggggagacctggtattatggcccctgtgggaagaggatgaagcaatttccagaagtgatcaaggtaatgtagctttttttaaaggactgctttcttgggctcagtggactcctttccactgcccaagactccgttcttgggctcagtgacaacaggctggcattgtctgctctgggcctgttctgcttatgcctttgctggccaaagacatggtaggatccaactttattaatgttactttacttcttcctcttagtacctgagccgcaacgtggtacacagtgtccgccgwgagcacttcagcttcagtccccgtatgcctgttggagatttctttgaagaaagagacacgccagaggtgcagacccaagggttaaatatgcttttgtccctgaggaagagttggtggacaagctgcagcttcctctcgtggggtttgaaggttctggggcattgaatggttccgagggcctcgtggcctgcactgattccttactactgtaacagtctcccttgctaccttagggcttgcagtgggtgcagctctcagcagaggagatcccgtcgaggattcaggcaattactggcaaacggggtcgacctcgaaacactgagaaggctaagactaaggaagtccccaaggtgaaacggggtcgaggtcggccacctaaggtcaaaatcactgagctattgaacaagacagacaaccgccccctaaagaaactggaggcccaaggtacagtggtatttcttactttgggattctgctccctccatgaggtatctaaaatgttgatgaattgctaatacctggatttcccaggagtgtaactaacattatctgggaagaatgaatctgaatcagcttctccttggaatccagcatcctagtcccagcgcttgggaatactacttttccagccatggtctttcttgagttgctgttaccagtgaaaccttgggctgcccccaggtgtgtttagcccagaggagaggactttcttgccctttctttccatcttttagctccttatcatatactggttcagttgtacccttttaccttacccatttctactatcatggaggttcagaattcacatctgaattcaaaagataattgggagccaggcatggtggtgtgtgcttaataatcccagttacccaggaggctgaggcaggcagcagaggatcacttgagcccaggagtttggaggctacagtaaacttcagttgtgttattgcattccaacctgggcaacagagcaaggccctgtttctaaaaaaaataataggccgggcacagtgtctcacacctgtaatcccagcacttcggaaggccaaggcgggcggatcgtgaggtcaagagattgagaccatcctggcgaacatggtaaaaccccgtctctactaaaaatacaaaacaaaaaattagctgggcgtggtggtgtgtgcctgtagtcccacctacttgggaggctgaggcaggagaatagcttgaacctgggaggtggaggtttcagtaagctgagattgcgccactgcactccagcttggtgatagagctagactctgtctcaaaaaaaaaaaaaaaaaaaaaaaaagccaggcacggtggctcacgcctgtaatcccaccactttgggagactgaggagggcagatcacctgaggtcgggagttcaagaccagcctgaccaacatgaagaaaccctgtctctactataaatacaaaattagccaggcatggtggcgcatgcctgtaatcccagctactcgggaggctgaggcaggagaatggcttgaacccaggaggcagaggttgcagtgagctgagatcacaccattgcactccagcrtgggkwacaagagtgaaactccatctcaaaataataataataatataataataataataggcactgttttagtggatggacaggtgagaaatacctacatttttcagtaaatagtgtgtttaccctggtgtagtgtgaagaatgtgaaaaaacttagtcttttgattttcactcagacatctagccgtgtcatgtttcaaccaaatgacctagaacaagtctcattttgtttttttttttttgagacagagtcttactctgtcacccaggatggagtgcagtggcacgatcttggctcactacaagctctgcctcctggattcaccccattctcctgcctcggcctcccgagtagctgggactacaggygcacgccaccacacctggctaattttttgtatttttagtagagacggggtttcaccatgttagccaggatggtctcgatctcctgacctcgtgatccgcccacctcgacctctcaaagtgctgggattacaggtgtagcccccacgcctggccctttttttttttttttccagatggagttttgctcttgttgcccaggctggagtgcaatggcgcgatcttggctcaccgcaacctcccaggtttaagcgattctcctgcctcagcctccagagtagctgggattacaggcatatgccaccacgcccagctaattttgtatttttagtagagatggggtttctccatgttggtcaggctggtctcgaactcctgacctcaggtgatccgcctgcttcagcctcccaaagtgctgggattacaggtgtgagccactgcacccagctaagtctcatattttaatcaaagccttaggtagttcatctgcccataatatctgtcttagagggttgtcacgtagacatgtggtggcgtttctataccagaaacaaaataataaatattgtcatgtcagggccrggcacggtggctcacggctgtaatcccagctctttgagaggctgagaccagcggatcatgaggtcaggcaatcaagaccgtcatggctaaaacggtgaaactccgcttgtactaaaaatactaaaaattaactgggcgtggtggcacgcgcctgtagtcccagctactggggtggctgaggcaggagaatcgcttgaacctgggaggtggagattkcagtgagccgagattgtgccattgcacttcagcctgggcgacagagtgagactccgtgtcaaaaaatatatatawgtatatatagtcatgtcagaaacatcaattatgaaatactcttgtttgcagaattatacttccacaagtcttcccgaaaggaagaaattcagaacttttagtgaagcaagacatggagctgagcatgatcaataactatgtcagtgattcttttgaggtgtccactgtgtgggccttttttctggcacacccttggttaatcagtgcttctaactactaccctctttccctggcagtttggcttgctgtatcctttctctgctttctgctctaaaatcagtccgtgggtttctgctcttgtcaggtatcctgggagagagattggctccaaggctactctgccattgtggcctcttttctatcagcaggacaccttytaaagcagtctgattggagccaggggctggtgcttctgggcaggagatgtcatttgagttctttgtgccacccccatagcaggtgcctctcctacattttttcccccaatgttttattatgtatacttaaaaaaaaaaaaagctactctagattcttcagggagctgcttgggaggccagctttgagacgggcatgtgttgccctggatgctagagaactgccttcctgcctcacttgtttcatttttctttctgctctcacagaaacattgaatgaggaggataaagcaaagattgctaaaagcaagaagaagatgaggcagaaggttcaacggggagagtgtcagactactatccaagggcaggtgagggacatcagagagatgaaacagtaggttaatttttcctacaacttacttcatcttttattttcatttcccacatccgtcactccctgtgtagcagcatatcttcattaccctgaaatttcttgcacttgatttagagaattgggtttgttcaaaaataacgtgggcatctctagggtgagagaattaatccattgccaacccctcattccatctctcacctctcctccccagcacccttgtctgtttttgaatcctagcccaagcagagatgctttcagagtttgaggagaaatgacttcccttatggtttacaggccagaaataagcggaaacaagagaccaagagcttaaagcagaaggaagctaagaagaaatccaaggtaggtgcatgtacaaacttgccaagtataatttcgaagccactaaactgattttgcargacatgtacatcagtcttgttttayagtgagatttctgggctgtgaggttgggaggactgggaccagggaaggatagtgactgatatctttatggcagtcttggttcctctcttccttgggtaggctgagaaagaaaaaggaaagacaaagcaggaaaaactgaaggaaaaagtcaagagggaaaagaaggagaaggtaaaaatgaaggaaaaggaggaggtgaccaaagccaagccagcctgtaaagcagataagaccctggccacacagaggcgcttggaggaacggcagaggcagcagatgatcttggaggaaatgaagaagccgacagaggatatgtgtctgactgaccaccaggtagtgaggagagagtaacagttcctgggtcagctgggaagactttcctttaaaaaaaaaaaaaggacttctgcaatgggagagacatttccattaaagattaaaggaaggccgggtgccatggctcacactgtaatcccagcactttgggaggcygaggcgggcagatcgcttgagcccagcagttcaagaccagcctgggcaacatggcgagacctcatctctacaaaaaatacgaaaattagctgggtgtggtggcatgtacctgtagtcccagctatttgagagactgaggtgggagaattgcttgggcttaggaggtcgaggctgcagtaagcagagatcatgccactgcactccagcttgggtgacagagtgagaccctatctcaaaaaaaaaaaaaaaattacataaaaattaaaggaagaacctcttgtagacatgcaaattgtcatcttctgttatgtttaacagaactctctactcacttttctctctctagcccctgcctgacttctcacgagtccctggtctgacattgcccagtggagccttctcagactgcttgaccattgtggagttcctgcatagctttggcaaggtgctgggctttgatcctgccaaagatgtgcctagcctgggggtcctgcaggagggactcctgtgtcaaggtgacagcttgggtgaggtgcaagacctgctggtcaggctgctgaaggctgcactccatgatcctggctttccctcctactgtcaggtgagtgcaagtccctcccaaagtaaccaggacaagtaaaggagatgtaactacttagtgtttctcttttccttatatttttccatttctttttcttcctgactcctctccttattttatttttctttattttttccttttcttttgtggtcttctttcgtattctgtcttaacccccatagttmtcttctgatgtattttcctcttgcacattcacccaacttggttgtgcatctttccctactcacccccattatgctgtcctccacacagtccctaaagatcttgggggagaaggtgtctgagatcccactgacaagagacaatgtgtcagagatcctgcgctgcttccttatggcatatggagtagagccagccctctgtgaccgcctgcgcacccagccttttcaggcccagccaccccagcagaaggctgctgtcctggccttccttgtgcatgagctcaatggctccaccctcatcatcaagtgagaggctgggagtggggatggtcattgtatcccttgcatcagaatggggtggaggacttgtagccttccagaagtcctcagaaatgtgtgttcactgccatgttctgaagatgctggaatgacttgggactgaattgcagtgccctccctgggagagcctaagccttctgccattcacccaatctgggttctaggctggaactcctttttcagctgcagcccctttacccttgagcctcctttccctttttttgtgctgccacttcatcctattccctattcccctgcagtgagattgacaagactctggagagtatgtccagctacaggaaaaacaagtggattgttgaaggccggctccggaggtagggaccagacagagagtagagcctcagagaggagagaagtggggcgggtgaagcatagccagggttttggcttgaaatgtgatgctttagccccttccctgggtttgggaccttaccagggcccaggatggtttagagtcaaggtatttcttttgtggcactatcatgttcctcaccagtttcccgtaattttttttttttgagatggagtcttcctctgtcgcctrggctggaatgcgatagcgcaatcttggctcactgccacctccgcctcccaggttcaagcgattcttctgcctcagcctcccaagtagctgggattacaggcccatgccaccacacctggctgatttttgtatttttastagagacagggtttcaccatgttggccaggctggtctcgaactcctgacctcaggtgatccgcctgtcttggcctcccaaagtgctggaattacaggtgtgagccaccacacttggccttcccttaatctttctccatctatttcaaggctgaaaactgttctggccaagcgaactgggcggtctgaagtagagatggaagggccagaggaatgcctgggacggaggcgcagttctcggatcatggaggagaccagtggcatggaagaagaggaagaagaggagtctatagcagctgtccctggccgcaggggtcgaagagatggagaggtactggcccaagatcaaggaaagtgggagttagaaaataaattcctctttcttgaatctgataacctcctttttcataatgcccatgtgtttctccctaggttgatgccacagcatctagcatcccagagctagagcgccagatagaaaaactcagcaaggtattgtgcttctaacctcccaagagttggagatatgggctgggcaagaattgatcagcttcttttttaaactgaattttaatttttattcttttgagatggggtttctgttacccaggctggagtgcagtggcacgatcatggctcactgcagcctcagcctcctgggcttaggtgattctcccaagtagctgggactacaggcaggagccaccatgcctggctaatttttgtgtttttgtagagacagtttccatatgttaccaaggctggttctgaactcctgggctctagcaatccacctgccttggcctcccaaagtgctgggattacaggcgtgagccaccgctcccaaacttaatcaccttctgaattaggcccagatggcatcacttttatagagggactgagagccattgcctttctcygatatactggatgaattcaccactgtcactctggaaatgtgtttattcatcttcattttcattgtctacccagcgtcagcttttctttcgcaaaaagctgcttcactcatcccagatgcttcgggcggtctccctgggtcaggaccgctacagacgtcgctactgggtattgccgtatttggctggtatctttgtagaaggaacagaggggaacttaggtaggtgtgcctgtgggagtgtggattctgagtcctatcaaacaagaattaaataattccttttccttagtagtcttgggcttctttcattttctgataatatagcgtaatggttaagagcacagattttagagtaaagctgcctacccacctgctctgccatttccagctgtatgattctgtttcttcatttgtgaagttgagataataatagtgtatgtacttcataaggctactgagaggattaaaatgagttaagtctcttagaataatacttaacccgtagttgtttcgcaataaatgttagcttatgattgtgctgctgctgctgattacttgggagaatagtgtttcttccccagatactgtgttcattggcatataagctcttcccagtggaatctcaaaaaagggggactaagtccaagagaaaaagaaagtataggtcctaagtttatataccctcttacttttcccttgtatgtcagcatatgkcttaactctttacttctctttacagttcctgaggaggtgataaagaaggaaactgactccttaaaagtggcagcccatgcgtcactcaaccctgccctcttctctatgaagatggagttagctggctccaacaccactgccagttctcctgcccgggcccgaggccgacctcgaaaaactaagcccgggtctatgcaacctaggcatcttaagtcccctgtcaggggtcaggattcagaacagccccaggcccagcttcagcctgaggctcagcttcatgctcctgcccagccccagcctcagcttcagcttcagcttcagtcccataaggggttcctggagcaagaaggctcccctttgtcactgggtcagagccagcatgacctcagccagtcagccttcctgtcttggctgagccagactcagagccatagctccctgttgagcagctcagtcctcacacctgatagcagtccgggaaaactagacccagctccatcacaacccccggaggagccagagcctgatgaggcagaatccagccctgatcctcaagcactctggtttaacatctcagcccagatgccctgcaatgctgcccccacaccgccccctgcagtttctgaggaccaacccactccctcccctcagcagcttgcctcctccaagccagtaagtagccagaattagtagtatgcacttgatttcatcttgccacaggcaccattgcctgggtgtggagctgctgcctgaagttgagggaacctataaacatgaaaacatcctcatttccttatgtctcattttattcacagatgaatagacctagtgctgccaacccttgttctccagtgcagttctcttccacgcccttggctgggttggcccctaagaggcgagcaggagaccctggagaaatgccacagagtcccacagggctgggacagcccaaacggagagggagacctcccagtaagttcttcaaacagatggaacagcgttacctaacccagctgacagcccagcctgtcccacctggtgagtgaccttggagtgagggcatmcggtgtgggcagtgcttcacagctggcgccccacatatatctcatctgctcacagagatgtgctcaggctggtggtggatacgagatcctgagatgttggatgccatgctcaaggccctacacccccgaggtatccgggagaaggcacttcacaaacaccttaacaagcacagggacttcttgcaggaagtctgcctgcggccctcagctggtaaatacattcctacacccagcttgagctgaagagcccaggataagcattgagctgctgctagggacaacagcctgatgggcctctccctctgccacctctcttctcagaccccatctttgagcccaggcaactacctgcctttcaagaagggattatgagctggtcccccaaagagaagacatacgagacagacctagcagtgcttcaatgggtagaggagctggagcagcgggttatcatgtctgatctgcagattcgggtatgctgggattggcactgtgtaggaaggttggggaaaagcattagtcccttatgccctgttagaaaaaaccctgggtccctacttcacaggtgacctaccttaagtgggtcttgtttttgtttttttttttcctatgccaaattttcctccttttacagtgagttttattcctctctcttaactgaagggctggacatgtcctagcccagactctacccgtgaagacttggcctactgtgagcacctctccgactcccaggaggatatcacctggcgaggtcggggcagggarggactggcacctcagcgtaaaactaccaaccctttggacctggctgtgatgcggctggctgccctggaacagaatgtagaacggcggtacctgcgggagcccctctggccaactcatgaggttgtgctggagaaggccctgcttagcacacctaatggtgcccctgagggcaccactacagagatgtgagtgactcccaccctccattcttggtcttggagagaaagggataagttccctctttagtggatccgctccttctccaaagatcaccactttctccctccagatcatatgagatcacccctcgcattcgtgtctggcgccagaccctcgagcggtgccggagcgcagcccaggtgtgcttgtgcctgggccagctggagaggtccattgcctgggagaagtctgtcaacaaagtggtaagaggctgagagagcctggagaggctgaggrgccagccagcaggggcggggtggggtcactggcaggtagaggctggagagctcattctgcctcctcacaaccttggtccagacatgtctagtctgccggaagggtgacaatgatgagtttcttctgctttgtgatgggtgtgaccgtggctgccacatttactgccatcgtcccaagatggaggctgtcccagaaggagattggttctgtactgtctgtttggctcaggtaaggcttctgctctttctttcccacactcaaacagaaatcagagattatcctcaatctctcctctccttggaaagagtcctagactgggtattaggggacctgggttctaagtccttttttggacaagtcacttaaattctatagctttaattgctgtctctataaaatgagaataactataccttcccttttacctacttcattgggttatgtgaataaaccaatgccggcttatgcatgatagtattttgaagccttaaatcatatttaggcagagattgtagtagggcaagcagtgcatctccagctgttgctaatctcacctgtttcctatactaagcaggtggagggagaattcactcagaagcctggtttcccaaagcgtggccagaagcggaaaagtggttattcgctgaacttctcagagggtgatggccgccgacgccgggtactgttgaggggccgagaaagcccagcagcagggcctcggtactcggaagaagggctctccccctccaagcggcggcgactctctatgcggaaccaccacagtgatctcacattttgcgagtgagttgagtgaatcctggggggacagttggctctacctctgccagaggaaagggctgggaggggtcagtatatttgcttcctgagatggagccatcattgtccctctaatgataggattatcctgatggagatggagtcccatgatgcagcctggcctttcctagagcctgtgaacccacgtttggtgagtgggtaccggcgcatcatcaaaaatcctatggatttttccaccatgcgggagcggctgctcaggggagggtaagtagatrtgggtgaaccscccggtctttgctactgctgcaactcctaccmagctcacagttttgcccctgccctgtccaggtacaccagctcagaggagtttgcggctgatgccctcctggtatttgacaactgccagactttcaacgaggatgactctgaagtaggcaaggctgggcacatcatgcgccgcttcttcgagagccgctgggaggagttttatcagggaaaacaggccaatctgtgaggcaagggaggtggggagtcacctkgtggcatctccccccaccttccaaacaaaaacctgccattttcacctgctgatgctgccctgggtccagactcaagtcagatacaaccctgatttttgaccttgcccttggcagtgccccacatcctcttattcctacatccctttctcccttccctcctcttgctcctcaagtaagaggtgcagagatgaggtccttctggactaaaagccaaaaaaagaaagaaaaaaataatttttcttttctgttttatttgctaattaaaaatggggagggggaaagtcgtccctacttcctcctccctgcttcctctcctcccctgtacgtgccccagcattctggggttatttaacaatagcaatagttctagtgaatgtgtgaaaccaagaaacactctgtactgtgtgcggacccgcagtgacggccagtaaagtggacttaactcccaagtgtgtcgcgccggacaccgggccctggacatgctgcttccatgttcagtcccttccctgcttctcgctgtctttcttttcccacctcccaccccccagttttcagattttctctcatccaataatgtaaaactatcgtgtacgggttcctccctccttttctcttctcccaaatcttttcccttcaaaggaaaaaaaaatgttcagaggtccctgtcttctgtccccatcttcctgccgatagctatcccctgtatgatgttggatgctcctcacatgctgagtttccagccttttctgaaactcagtagctggggagagggcagggaggcttcctgggccttccagcctccttccccacctccttcccaaaccctcttgggaactcctcagggacaactactgctgagtttgggtgcaccctaagatggaggccaggtagcaatggggccggcctcagagagagcgctgtgtgtgtgtgtgtgtgtgtgtgtgtgtgtgtgtgkcggcctcagagcgcgctgtgtgtgtgtgtgtgtgtgtcagcctcagagcgcgcgctgtgtgtgtgtgtgtgtgtgtgtgtgtgtgcgtgcttgtgaccctgtattgtttgataggatccattcagtttccccaagtacctgttttcattcccatttttcccattgtttaaaaccatcacttttttgtctttgggaaaccacaggaacaatttctctggagacaaggctgtgtctctctcctggtcatttttgttccagcctcttcagactgtgcaatctttcagcaggaactccctctcttctcggtagctttgaatcttaagcttctacgggagagtggtagaactggatcatttcctaatcccatttrgttgtgcttttcttcatttacttcataccccaggaccccttccccagcagcagagaccctggagcacaggagagtagggaggaggggttctgggtccatcactgccctacatgtgactatgtccaagttaagcccccaacacgagaggaaagctgctgactcccagctatagccatgggcacttggccccctgcttttcctgctcagcagagcccctcccttcagagattacgggtacttgcactggggaggtggctgctggctggcccaagcagagagctgaggcatccaagaaatgttccattggggggtgggggtgccaggtgaggtggagcattccttgtattctggcagcactgaagagccactgaagggggtaggggcagtgtaggtcctggggcagcccctttattcctttatgccccttctccctcatagcctatttctaaagtcgccttttctgtcagataaacctcaaaacttttaattttatttgagatttttttttgcttttaagaggtggattgaagaatatttgaattgactttatattatgcataaatatttatattttatctaaataactgcgctgtaacaaactttgtgttagacagttgaaactgttagagttgggggctctgctttttccccctggcaattttcccctggtataagatgtgctagattaatttcattgtgaggtggatgggggagtgaaattgtgaggtggatgggggagtgaaatctccatggttcctgctttgtgttcctctcccagctccatctctttccctagggaccaggcactcatatggcggggtggggtcctagcctcagtttgaagaagtgggggctggagcggggttgggggtggtagggatagggcatgatcaaaggggccatttcttgcttttctttcctcatcttcactgcccccttgagctaggtggattttctcttcatgacaagagtatttggtagggaaagcaggtttaaaataaaaagacaacccaccccctgcccttttgcttccctcccatcagtctggttgacaggaagaaaccacaccatcaacaccaacaagtttctgtgttccttttacagcaaaagggactttttatataaccaaatgtggtgttttagtgactttttgataatgtacagttttttgtgaatttaaatttatttctttctatatttttaggaccaatctcatttttaataaggttaaaaagaaaaaaaaagtctagcgaaaaaactcctgtttttgccatgtgatgttccacaagtgcagctgtagaaaagtgcttgtcagttgttgaataaaaaaaccacatttgatagagattcaaaagactctgtgtattcatcttcccttctacacacctgagggggagacggcgttgggataggtatgactggcttaagagaccacaggcaagggaacaacaggggctcctgttccataccctctgtgtggatggaaagggtcattagtgctcctgcctaaatgtctggctgagttgctggagcaaagggggattcagtgcatccaggtcctgccttgtgagatgtggccccagcttcctaagctgccacctctgtgttcctgtcatagcaaatatgggaccatcaccagcttaccacttcccactcacggataagacaccaagacgtagacttttgtgttttatttaaaaaaaaaaaagtgtgaagtaagacaaaatggacctctaccaagttgtagggaaggacaaggaaaagaccaggggtagaaaaggagtgtaagttttagaatggtggcattggcatagatgtgggaagagtataaaactagaagaagtctccagataaaaatatgcaaaatatgtctgtttaagtataaacattttctgtccacatgcaaagaggtgtttacccacccaaaaagggtatatgttggagtggggacttcactcgcgctggatatgtattaccctccagcctggaaactttgtcttggtgcaaccccctaaactgtatgttaaggtagaaaaggaacattcgcttccagccttataaaaatgacagactccctctttggtgtttggttaccttcacagctatacgccagccactgagcagctttcttgtcctcttaagttctaaactctgctcctatgctggtgtcctccaaccattacttattaccctaagccgtcactgcacagcctactcccctggcctatcacagcaggacctatctggagagttcacactattctagggcgatcagtgagctaaaaatcccagagaaaacactgtaggaatagaaattcccaagtttaattcccaagagtttaaaaattatgagccttttctagcccccaccttcccaaccctcagagaaggacagtaaagaaatcagtgaatccaggtatttacctgttgttgaattgtgaggttgtgaggtagacgtgtaacaaggacaaggaagtttggggatctgcttggagaatgaaggtttattcaaaacaagtggacaggtcaggggtaacgggtgatgagggcacctggcttttgtaatcatgtggggactgtcccctgggaggtgcagcaaaaatcagaacggagacagaagctcacagtctggttttagctgccaactcctatggaagtccatagctgactcctatggaaggcctaccaaatgaggaaatttcaggaatttgctaatgcgtgggaggattgaaaatgtaggcagcacagaaatagagtagttggtttaaacgggaatcaggaaggattggtataacaaggcacaagatttggaatttaccctttacagactggcttttataacacccaccctcgtctctgaagcctgctgattcagggctagcagagcctaggggcaagtttgggccagatcacccacccagtttattgcccttggctaagaatgcaaagcccctcatgagcgcaatgctgccacttgcccagaaggtggggcatgtgcacaaggcagcagcaatagttcttttctagaagactaatagccactgctactagggattcctaggacattccagcaaggcctctcacagcatcatatgacgcaaagtaacagcccacgggttgacattggagtgacaggcctcaactcccaatgggttgacattggagtgacaggagtaggcactggaggcactaagggagggtgagtgagctgattgtcaagttaggaaaggaaaacgaatggagtggagctgaagtggcccaacccagcgcatggcctgtgaagcagcaaagtctggtcttcatcttcaatatgagtaatgtcctcttaccactccttatctgttactgacaaggtctattaccctttagagccaccaggcttcctggcctgggcaactctacaaattctttagttaaaaacactacaaagggccgggtgcagtggctcacgcctgtaatcccagcactttgggaggccaaggcaggtggatcatttgagcccaggagttcaacaccagcctgggcaatgtggcaaaaccctgtctctactaaaaatacaaaaattagccaggcatggtggcaggcacctgtaatcccagctactcaggaggctgaggcaggagaactgcttgaacccaggagatggaggtttcagtgagccaagatcacgccactgcactccagcctgggcgacagagcgagactccgtctcaaagaaaaaataaaaataaaaaaactgaaaaggccaggtgtggtggctcatgcctataatcccagcactttgggaggccgaggtgggtggatcatttgagcccaggagttcgagacgaggctgggcaacatggcgaaaacctgtctctattaaaaatacaaaaattagctgtttggaggtcaggagttggacactagcctggccaacgtggtaaaaccccatctctactaaaaataaaaaaattagccaggcatggtggcacaagcccatagtcccaggtacttggtggccggggaaggggtggctgaggcaagaggatcacctgagccttgggaggtcgaggctgcagtgagccattatggtgccactgcactccagcctgggccacagagtgagaccctgtctcaaaaaaacaaaacaacaaaaccaaaaaaccaaaaacattaaaaacaacatctcatccaagcatggaggctcacacctgtaatcatagcactttgggaggctgaggtgggaggctcacttgacaggagttcaagaccagtctgggcaacatagtaagacccctgtctctacaaaaacttaaaataacgaactgggcttggtagtatgtgcctgtacttccagctacttgggaggcttaggtgggaagaacccttgggcccaggaattcaagactgtagtagactacgactgcatcactgcactccagcctgggtgacacagcaagaccatctctaaaaaataaaataaaggccgggcgcggtggctcacgcctgtaatcccagcactttgggaggctaaggcgggcagatcacctgaggtcaggagttcgagaccagcctggccaacatggtgaaaccccatctctactaaaaataaaaaaattagccgggcatggtggtgggtgcctgtaatcccagctacatgggaggctgaggcaggagaattgcttgaacctgggaggcggaggttgcagtgagccgagatcgtgccattgcactccagcctgggcgacagagcaagactctgtctgaaaaaataaaataaaataaaaacatctctctccatcatcatctccacatcttcctgacctctctactggcaccctcctccaaaaagtccaatcagtttagggtctgagtatcatctcagagcctgagatgaggagtaataacaccgataggagatggctaggcaggctcagagcctataaaggattatgccatctgaggaaaggactctagtgtgttctagctgactgaaaacagaaaaatgccaagtactaaaatattttaagaatgttatgagcatctgtaatgagtgggggtgagatgtaaagtacaaagagagtaagagctgggctccatgaagacagcattcagaaaacactaggcatagtgtttaagagcccaacccttggctgtgagctggaaggctcccctatgtttccttctgccatcaacccaaccaattagactatttcatgggagaaacagtatccctcctttcttctccctcctttcctccaaacactcacccactgttacaaatgaactaacaattaggagaggaaatgagtgtaaaccaaatgcaccaaaaaagaaattcctcagtgccattagccactgcaaaataacttcaggcccccatcacttcccatgcccaaaccagaaacactcattaatacaatctaacaagtagattcacatgagaagaactccaaaaggtaaattcaaaattcaaaacaaaaaattagagccatttaaacattttaaaatatatatatagagagagaaagaagacagaatcaggagttctgtgaggcagaggagaggggagtggcaatatcaacaatggtttctatgcgtgaaaggcccttcctaaacctcctaccatagcaaagctcccccggtctatcagatgaacagaattctagatttgttttctctttctctcaaaggccactgacaagaaagcagctatggtatattttccttgactgagggctggagactcaaaaacaaaagctatctgcccagccagagccctctagaaggttgctgggcttggggctattttacactggataagcccttcctgagtttggaagcatcaattagaagactgcggcaatttgtcctttacgctttatatcctacccattgccccgcactccctcacccctaggatgtacatagaaagtcgacactaggggcactgggactctcaattctagggtggctgggaagggagggaaagctgggccgagctctacttgtgacaactgatactacagtttcttttcccctgctgtcacccccttcctctccctatggccagcctaatgaacacctgtctctctatcctccattatttgcctttgtctgactgtctagtggagaggcacctggccttgaagtgcaagggagtcaaattctcctttcagtgcataagggagtgactgggagaagacaagagcaggattttatttcctagaagatgggtgaagtctttcttcaatctgtctccatgtgtatagagtcacatcttgcagaaggggacagttaaagaccaagacataggcttttttaaaggactcctgacctcataaagagttggaatttattgctctttgctaccctagctccccgttgtccttccacagaaggaacattatttctgatgtcctggttccctgggcaaagggtccaagcacaccggggcagggcaggttgctctagacagtttagagagctttgtcctttcccaccattgcacagcacacaccagaacaatgcccacctgaatccctctgagtacatgtgtgcattcagcatggagccacagctctttcaagaatcactcttgctatatgcagagttatcaaaagtcaaagtctggggagaattcaaggatcccagtccagtccttccccaacagttgcatgagtgtcaaaaggcactgtttgtccagggttggggtgaaaatttaccctaacccaggaggcagggacaacactgtctatatcagtgtttcccagtcttggcaatattgacccctggagtcagataattcttggctgggggtagtggggactatcctatgcagtgtaggatgtttagcagccactagatgccagtagcacacacatcccacctccaggcgtggcaatcaaaactgtctctagatgttgccaaaggcctgagggacaaaaccacctctgattgagaactcctggtctgtgagtgaagcagcagatcttccaccgtgtggaaggagcctatgtggattcaactaggtcgcagctgcaaaggctctgagcacagcaatgtgtaacagggaagagaggggccatgaagcccaggacagaaaatatcctccaggaggcaagaaagcaggtactcccaaaaagctatacctcagatgctgttggccttggcagtgagaagagttgataaaagtcagtaagtccattcttccggaacttgccagggaagacctagtcttcaaccaagtttggctcaagggtgtgttcccagggctgtggagttgtctctttagtaagcctgggtcacatctgtgctttctgaagccaaagtctagttttttctcccagggtgtggcagggtgggggaaagaacagccacttccatggcctacttagtgttctgccttgttccttgcccagcctgccccccaaccccaaattccacatgaaatttcatttttaaaaatccataaaattaaaagctgtaaaagggcaaagtaggcaggctcagctgtttagaaaagagaaaaagaagaatctggacaagagaaagaaggcataatatgggtgaagaggagatggggtgcatgagctgagagctttacaaaataacatttttagagcctgcatactttttaaaacacatacacacatgcatcaaaaaagtccataactaagctcagtaagtagggctccttcatcgatgttccagcaccacacctttctgttctgttttggtttgtaaagaaataattacaaattgttttaaaagcattcccaaataattccaatacatcgaaaactttttcatatagatgagaagctgcgaccaccatgtctcttcaaggtaggggaaaagtacgttgcagttaaaaacaaaaagctttctttgcaaaagaagaaaagtttttttgatctccttgaatgtagcacacaaaaaaagtgatggttcccccaggctccatcagcaatagtaaagggcaggaacgtagagatttctttttccaggcccaggcctgtgaaaaacgatggctaagtgttagtccttagcagggccgacggatggtctccattcctggttaaccctctggaatctgggagcatgagtatctccaagaattcatttctattcagtaaagatggggaggggaatcctaaagaaggcacaagccagagaggagacaagacaaacatgagaacctgtctgacttcaggccgggctgagctgctgtctgccagtgcagccctccctgccccccagcatgtggttcttacccactgttacttgttgaactggaaagaatagaccccatgctctgagggtgcgtccactgccacttggttctgttggccgctgctctcctgtgc

SEQ ID NO: 97810 - DNA, 39867 bp, Homo sapiens
ttggaatcttgctcaggaaatcgggctggttaatgaataacaagagatccagtttcacaaacccaaggcattttgcccccagaatctgggcttcttcacccatttaggctgtcactacttttttttcacttttttatccctgtttaagtcagtctgacccacagttgtcctctgctgacttcagaaataataatctggccagtagacatttggtttcggtcctttaggcccttcgccccaggcatcgttctctatggtggacaaagttcagaatggaagatgggagaaaggtgattctgattctagaagcacccatccctcctaccccattccccacccgcattacctgccatcctgtcagcacagtctgtctctgaagtgctccaagttttctctaagggcccatttggactcccactctcaagactcctcacttgcccagaaagctccttgctgaccttctctgtgtcttcctctcacccattcccttaggcctccctaatatcccctcccagggtctccctatcttgatcccagaatcttccttctacaggtctgctacaatgctgctgctgcacagagctgtggtcctcaggctccaacaggcctgcaggtaggccagcccatcccaggacttgcctcctagcccctatctgccacccttagtgtcttttacaatgtcataccttgcaaataagacagttgagagagtgtgtccagggaggacagagaaagccagatcccacttttcccacctatccctggagaaactaagttccaacttaaggaaccaatggccaaccagggagaaagaagtagaccccaagccttcactagccctttcacatgaccatacgtgctactaagaccgacctctcttccagactcaagtcaatcccctcaaggatctgcattcaggcctgctccacaaatgattcatttcagccccagcgccccagcctcaccttctctggtgataactccagcacccagggatggagagtcatggggaccctattaggtctcggtgcagtgttggcctatcaggaccatcggtgtagggtaagtagggaaagtgcttcattgtcagaacagactgggtgcagtggctcacgcctgttatcccagcactataggaggccaaggtgggtgggtcacttgaggttaggagtttgagaccagcctgggcaacatggcaaaaccccatctctagtaaaaattagccaggtgtggtggtacatacctgtaatctcagctacttgagaggctgagacacaagaatcacttaaacccaggaggctaagtctgcagtgagccaagatcaagatcgggccactgctctccagcctgggtgacagagtgagactccatctcaaaaaaaaaaaaaaaattgtcagaataaaggaatcagtcctagtaaactccacaggcaacccaggctgtgacccatgttcttgtagttaccacagagttcacagtgacgcagtcttcatgcacagtggagatgaaatctgctaatctgctaccttcgcttcccagtggccaacaccgtgggttgggtcagggtgagctcaagtgatttcttcttattcttcttcattttttcttttttttttttttgagatggagtttcactcttgttgcccaggctggagtgcaatggcatgatctcagctcaccacaacctccacctcccgggttcaagtgattctcctgcctcagcctcccaagtagctgggattacaggcatgcaccaccatgcccagctaattttgtatttttagtagagacagggcttctccatgttggtcaagctggtcttgaactcccgaccttatgtgatccgcccacctcggcctcccaaagtgctgggattacagttgtgagtcaccacgcccgaccaagtgatttcttcttaatagtctcttcccttttatcttactccttccctgccaataggctgctcaggagtcaacacacatatacactaaggaggaagtgagttcccacaccagccctgagactgggatctgggtgactctgggctctgaggtctttgatgtcacagaatttgtggacctacatccaggggggccttcaaagctgatgctagcagctgggggtcccctagagcccttctgggccctctatgctgttcacaaccagtcccatgtgcgtgagttactggctcagtacaagattggggagctgaatcctgaagacaaggtagcccccaccgtggagacctctgacccttatgctgatgatcctgtacgtcacccagccctgaaggtcaacagccagcggccctttaatgcagagcctccccctgagctgctgacagaaaactacatcacacccaaccctatcttcttcacccggaaccatctgcctgtacctaacctggatccagacacctatcgcttacacgtagtaggagcacctgggggtcagtcactgtctctttccctggatgacttgcacaactttcccaggtacgagatcacagtcactctgcagtgtgccggcaaccgacgctctgagatgactcaggtcaaagaagtaaaaggtctggagtggagaacaggagccatcagcactgcacgctgggctggggcacggctctgtgatgtgttagcccaggctggccaccaactctgtgaaactgaggcccacgtctgctttgagggactggactcagaccctactgggactgcctatggagcatccatccctctggctcgggccatggaccctgaagctgaggtcctgctggcatatgagatgaatgggcagcctctgccacgtgaccacggcttccctgtgcgtgtggtggttcctggagtggtgggtgcccgccatgtcaaatggctgggcagagtgagtgtgcagccagaggaaagttacagccactggcaacggcgggattacaaaggcttctctccatctgtggactgggagactgtagattttgactctgctccatccattcaggaacttcctgtccagtccgccatcacagagccccgggatggagagactgtagaatcaggggaggtgaccatcaagggctatgcatggagtggtggtggcagggctgtgatccgggtggatgtgtctctggatgggggcctaacctggcaggtggctaagctggatggagaggaacagcgccccaggaaggcctgggcatggcgtctgtggcagttgaaagcccctgtgccagctggacaaaaggaactgaacattgtttgtaaggctgtggatgatggttacaatgtgcagccagacaccgtggccccaatctggaacctgcgaggtgttctcagcaatgcctggcatcgtgtccatgtctatgtctccccatgagcatggaaaggagccacctccacccctttccccacccattagcctcactgcttcagaaaaatctttcccacctttcaacttcttggatcacaactctggccttcctaagccatacccaagtacacatatagcacatttcacccaaggaccttccctctttggacactatgttacatacccctcttggcctttgaacctgtgccaggaagtgtgagctgttacagcaaggggctagaagtgaaaaaagtaattctggagacaagcactattttctcttcctaccccacctccatttctaatgcctactgccatcaaggccttgttttgcttttctttttggattgttcagagaaatgtgtgtggcatgtgtaagaaaagtgtatatactatcttatactacctctccaggttgccagagagttgcgaggagagcaaggggcacaaccgtctccctttatagttctacttttctaataaatagtctgtttaagatcataactcttgggcctggggagtgagcctattgcaggaggaaggatgcatttgtactgggatgtataatgagattagaccaaaacaaacaaaactggggaggaagacagagaggaagtaggcttgtaggttaagaagtagggcttccggctgagcacagtggctcacgcctgtaatcccagcacttgggaggccaaggcaggtggatcacttgaggtcaggagttcgagaccagcctggccaacatggcaaaacccagtctctaccaaaaatacaaaaattagctgggtgtggtggtgggtgcctgtaatcccagctacttgggaggctgaggcaggagaatcgcttgaaccaaggaggcagaggttgcagtgagccgagatcacacccactacaccccagcctgtgcgacaaagcgagattctgtctcaaaaaaaggggggcttccttctctgaggtttggcagtatctgcagggacacctaggtgattgacctcaggataccatgaagagaggagaggtgacaaaaacatgtaccctccaactcctttccccaacagttccaatgcacttggcaggaaaggcaaagggtgctaggagtttaaaatcaatattgtcttaggaggtcgtgaaagcaaaataaatcttgaggccccagaatcactaagctaaagggaaaagtcaagctgggaactgattagggtaaacctgcctcccattcaaagtcatccctctgctcactgagataaatgcatacctgattgccttctttgagtggaatacaaccatttgcctcttttttttttttttttttgtagagacagagtcttgctctgtcacccagactggagtgcaggagtgcggtggcacgatctccgctcactgcaacctccgtctccggagttcaagcaattctgtctcagcctcccaggtagctgggacgacaggcgcacaccgccacgcccggctaatttcttttgtattttagtagagatgggtttcaccatgttgcccaggctggtctcgaactcctgagctcaggcagtacgtctgcctcggcctcccaaagtgctaggattacaggcgtgagccaccaagcccggcttttttttttttttttttttttttttgagatgaagtctcactctattgctcaggctggagtgcagtggtgcgatctcggctcactgcaacctccgcctcccgggttcaagcgattctcctgcctcagcctcccaagtagctgggactacaggcgcgggccaccacacccggctaattttttatttttagtagagatggggtttcaccatgttggccaggctggtcttgaactcctgacctcaggtgatccgcccgcctcggcctcccaaagtgctgggattacaggcgtgagccactgcgccccgctccatttacctcttatctacctatgacctggaagcctcctcccagcttgagttgtcccgcctttacatatattgattgatgtctcttgtctccctaaaatgtataacaccaagctgtgctccagtcacctagggcacatgtcgtcaggacctcctgaggctgcgttacgggcgtgcgtccctaactttggcaaaattaagttttgccaaaaacttcctaaactgagacctgtctcagatttttgggattcacaaggtacagagggaaaacttggctctagggcctgacgtgccaggccacatcgggcgtccagcgtgtgcttagattgcaaactgggtgcagattaaaggctagtttttgggttaccttcggcagacgatggtgcctttcggatttgaatctttcggcgctcggctactctcccctagctcctctcccattttcccccagcagtctcccgggcttggggacgctcggtgttcggccacgccgcctgtcgcctggtagtgggaccggaagttgttagggggagggggacggctgtgatggggggggatatttgggggggcaagtcccttctcaggtgaagctgctgatggagatggagccgccgccaccgccgcctctgagcgcccgggtcctggctccggcccggcgactgccgccgcctcagtgaccccactccccccgcactgggccgcccgggccagagtgggggacccccgccccctcgcctccctctcccccaacactgtcccctctccccaacccctcacagcctgcgcgcgcgcggagacacctcaggtgagtgaggggcggggcttggtgggggtaaagcgggggcggggcctcggtagccgggggcggggcctgaggggctctggcgtgaaggaggggggagacgtgggcgggggaaggggccaggctgagagagggtcgcgggttgggctggggccggagggttggaagatggccgggggagtttggcccgaggccccagtattaagagcgaggtagcagggactcgggggtcctaaaaaggcgggagacagatcaaggcaaggggccgaggacaggcaggagctgccaggcgcggggctcctccgtggggatgtggcttgggtatacagcagaaggacagcgaggagaaaggagcagcaaagagggtatctgaacaaaaaaagcgagggacccgggtgttgggtcgaggaatgctgaagacaggaatctggggataaagacgtaggcctaggtgagatctgggaggcaatgagcatattgggagaaacatgtagagaagaaacttaggatggagtgagaagtgcacagtgtagggtgagaggtgtagggaacttgggaagcaaggctgggaaagaagagattcactgcttgagagccctaagaaagaaatgcaacagaggaatccccagggcagacatccagacgggagctgcaaacttgggaagcaggctgcctgctcctgtgtaccraaacagccctccctgtacctcctcacacaaaccccatcccgttattttcttacctcatggctgctagagttgtaggttctcactttttaaattttctatattatttctgtgcctttaaaaaaaattatgactagtcctttctgggaacagtggagtgtttaatggaacgtggacctttcgatatgcttatgaaatattgtaccccaatccccatccaaggtcaagaagttacgaactctgcttccaggaaatttttttttttttttttttttgagacggagtttcactcttgttgcccaggctggggtgcaatggcgcgacctcagctcactgcaacctccatctcccaggttcaagagattctcctgcctcagcctcccaagtagctgggattacaggcacccgccaccacccctggctaattttttgtatttttagtagagatgggggtctcaccatgttggccaggctggtcttgaactcctgacctcaggtgatccacccgcctcagcctcccaaagtgctgggattacaggcatgagccaccgtgcctggccagaaaattttttgcataccttatttcrccccattcccttctctcatgaacaaaactgtctattgttgttactcttgtcaaccctcgcttatatgtctaatagttcctactgtgcctgtctccccagcctgtgccctcgaagcatcaatggtgggcatggtatgttcctgacatgctcacatgtcagctttagatgttccaacgtcatggtcaaccagatgaccattgaagcctgtctccccttactgatacttgctcactttgcctgggtgaagatacatgttcatatccttaaggaagcatgaaaatgttatctgactacctagaatatttccacttaacgataactcagattctgaggacaaggccagataaaaggccaaatcagacaatctttgaaagcatagtgtttcgtttggttggggtgtatggtaatccctcacctccccatggacctgccagtaggtccgtgaatcttgctttatggtttgcaggaggacttcagctttccctactaacagcctaaagccagagaatcyagacagacccttgggtcatgagaacagtcagatgagtagctcctgagataaaaataaaatcttaaaagaagaaaatagctttaccattgggaagcaagagaagtttcactggagcttctggggtgggcttcagaatggtgagagctgccctcattttggcagcttcagaattataccttgccctagtcaatagaagttgatgtctcaaacacaaaatataatgtctttgttgcccactgagtgcagttagttagttgaattgtagcttctgggcaatcyccttcctctgagtaggttaagggtaaggcatatttcaggacttggctcagaaataagtcctgacttttttccagtgaaaatgcaactgaaagtctctttatgtcctcttagtttgaaatctgcagcttgaacttcccagcatgggagaaacttatcccacctttcaccgtaccccctgcccccccacacacagtagtatccacaaaggaattattttttttccccaactggccatctctctctctgtctctctctctctctcgccacacacacacacaccaaagaaaaagaaagataggtatttctagcctcgttttactctgtaggaacaaataagagtgtgggaccctgtgagtgtggacaatgccacaggcaragggactccctttctttattggtctgttgactctgctgaagaaagctttgaattccaggctttgatttgcttcctcttcttagaagagttatggactctgttctggaaacagagagataggttcaaagtttatcagacaaaggcatctaagaaagggtagtgctgatatgaatgacctggtccagctgcggggaggatccacattgtaggctctgatgcaatacctatgctggggtagtcctcaagctaagaggccgtttctactttagagacttaatgaccatctagtttggtgttttcctcaggtccattatctctgaaaagagacataggaggaagaggattatttatcctcccatccataagcctgtgtttccagttcaaggatttaggtcagcaagacgcagacccaaaaaccattcatttaataacccaagaaagaaggcaagcagggtggcccaaatcttccaactggggcaagatttaatatagtgttccagtggaaagaatcttctaatggtaacttggactctacatgtcctaattctgttgttaatgagattgatgactctgggcttagtttcttctgttaaaaactaggaaattgtagatmatctctcaactccatttcagctccaggatttctcagttcctggagtacccctgccctagaccctccacatgaagaagagagtcttaccaaattggattatcagagcaagactattagcagagaagcctgaaaacatctttctggcccaaacaacagtgaacttttttgatcagcatgtattagggacttttgggcacaattgcaatcaaaggcaattgttcctgtctcttctacattttttttgctactgtaccctagtcagaatagttcactgagacttccctgtaatttcaaacttcacttgagagtgctaaccctgttttgggcatctttggctttaaaactgattattataaaactcaaattgaatttccctgctctactttctccacccctgcccaaacataccactgaacagcagtgattttgtgaggcctttctataaacagagagctatacttgggggtacacccaaaaaccccaaaaagtatcatctcctatgtatcatatctagtgatttaaagtgtttagtttggcccttttccttagttccttatgtcctgaaatgagacatgggagggataggatygtttcttctcccactcataaaccttagccttctctctcttctgcagtctacatggggaggacagagaagcgcaaagaacaagagaaaagatgcatccatctgagatctaaaaggagacaatgaggtgatattttccccctgcccaggtgttgtgttttcagctcttacccctttttattttagagactggccattcctaggatgacctgggaatttatcccctctgcactgctccccaagcacttggataatgaagctgagctgtcttcaactgtattatatgtagacagaaggtcaccatctacagcctggtgaaaaatgagtcagacctttccactgtaaagacaaacacatgagctgagctaaggttggtgggtttccttcagagagcactaggttgaccctaaagataatttcagagctgcaaattgcttgatgtctaggtctttttcctggaaaggggcttgcagacagtggctaattccatacctttccctggcccctttgcgtcttctccctcctcaattatgcaaagctttgatagagagcagagccagctatgtgatttcaacatatttttgctcasatttcactcagttcaggaaggcatagacagtagaggatgatgctgtgggtttgctctacttgtagcacctgaatggctcatacccaaggcacatgggaagttctgtcttgttaataactactgctctccaccgcagaacccaggtactaagggaaagtggagaaaatttttctacttctgcctgttatagtttgggaataataacaaaaacatggtatggatccttgccattctctctaccttcaccatctttcccaacaatattcttctcatgaccttttaccccctaggccacattaagcatgtgttaaatgactttttttttttttttttttgagacggagttttgttcttgttgcccagtctggagtgcaatggcccgatctcggctcactgcaacctccgcctcctgggttcaagcgattctcctgcctcagcctcctgagtagctgggattacaggcatgaaccaccacccctggctaattttgtattcttmgtagagatggggtttctccatttggtcaggctggtctcgaactcctgacctcaggtgatccacccaccttggcctcccaaagtgctgggattacaggcgtgagccaccacacctggcctaaattacttttttttttttttagkgtctcagtgtgttgcccaggctggcctagaactcctggcctcaagcagtcctcttgccttggcctcccaaactgctgggattggccctcactgctgcctgtcagggagcctggtgggaaatcttctgtctagaaaggatgcccattcctgttcaaatgtgttgtaatgttgataggagaaagccagggccatggaggactcttgtttatgccaagtggattcaaacaaatggggaagagctaggcacagtggcacatgcacctgtagtcccaactactcattaggctgaggaaggaggattgcttgaggccaagagtttgaggctgtagtgtgctgtgattgtgcccatgaacagccactgcwctccagcccagacaacatagtgagatctcatctctagtaaatataataaataaataagaacagggaagaaaatttgtgtctccagagattacaatgaccagcgtttcctccctcctcacagagatattccttttgaattggaacactgattgtttctagttgctttgtattcagctcacagctgaatttacagtacatatgtgcctacccgccatcactgagtgacggttatgttgctttatttatttatttagtgacagagtctcactctgtcacccaggctggagtgcaatggcgtgatctcggctcactccaacctctgcctccdgggttcaaacgattcttatgcctcagcctcccaagcagctaggactacaggcatgtaccaccaagcccagctaatttttgtatttttagtagagatggggtttcgccacgttggccaagctgatcttgaactcctgacttcaagtgatctgcttgcctcagcctcccagagtgctgggattacaggtgtgagccrccgcccccagccgacagttatgttgctttaaagctaatctccttccaagatctttgatacaaaactgtctcatgtaactaacttccctctccttatacctcctcctcctgcaatgtgtctccaattggcagtgcctaatttgacccagttcctctaaggagacgctaagatctgcctggctggttaggcaggggaggaggtgctttaaggggtagagagtgggaaggctgggcgggatgtgctgcagggagacttgagcaaagagtaaagtacatctgctgatttgctcctggtttgcacagaaaaccaggactgagaacagcagtttcaatccaatgccctctcacttccagggttaccaacttggtattaaaaccagctggagagccgggagcagtggctcacgcctgtaatcccaacactttgggaggccgaggcgggcagattacctgaggtcaggagttcgagaacagcctggccaacatggcaaaaccctgtctctactaaaaatacaaaaattagctgggtgtggtggcgcacgcctgtaatcctagctattcaggaggcttaggcaggagaatcacttgaacccgggatgcagaggttgcagtgagctgagatgagatcgtgccactgcactccagcctgagtgacagatcgagactccgtctcaaaaaaaaaaaaaaaagaaaagaaaagaaacaaacaaacaaaaacccccagctggaggcagctaagtacagctaagtactgattttgcccaagatgtgtcacagagcacgttaagagcaattaagcaggaaagctcagtttactgttagaaagaaagtccagctcagaaaacaactccttcagacctttctggaaattgttttggggccatctgggcaaaagtccaagaatgagatacacttcctgagccagtgctagctgaatggtatgcttcacctgttctacccacctagtgcttgtctagcccttcattcacacaggcattaggcatgctgcatgcacacaaacacacacacacacacaaaataatatgagcatatttcttcctgtagagccagctcgacttgttcttcctttttaagtaacagaccccactcccacagggatcacaccaaaggaaaagatgacttacctgatgttagaaccagggaaaaagccgagtgtggtggtccatgccagtagtcctggctactcagaaggctgagccaggagaactgcttgaacccgggagccaaactcatgccactgcactccagcctgggcaacacagcgagactccgtctcaaaaamaaaaacaaaaacaaaaacaaaaaaaacagggaaaagcaagaaaacccatgaaggccttgagtagcctggcttttgaaaggtttaatagaaagaggacacctcagagaggcaggcaacttgtgttcttgttcttgttctattctcaccatgaaccttgggacaagtaacttcactgctctcagcctcagtttctctcagtttctccaagcagaaaacaggaaaatcctgctcactcttgcctctcctgcatggggaggtgtgtgagggaagtttcaagtggcactttgtgggcttgttttgttttgtttgagacagagtcttgctcttgtcgcccaggctggagtgcaatggcacgatctcggctcactgcaacctctgtctcccgggttcaagcaattatcctgcctcagcctcctgagtagctgggattacgggcgcaccccaccacgcccggctaatttttgtatttttagtagagatggggttttgccatgttggccaggctggtctcaaactcctgacctcgtgatccgcccgcctccgcctcccaaagtgctggaattacaggcgtgagctaccacgcccggcttcaagtggcactttgaactttgcattctttttttttctttgaaatggagtttccctttgttgacctggctggagtgcagtggcgtgatctccgctcactgcaacctacacctccccggttcaagcaattctgcctcagcctcccgagtagatgggattataggtgtgtaccaccacacccagctaatttttttgtatttttagtagagatsgggtttcaccacgttggctaggctggtctcgaactcctgacctcaggtgatccacccacctcgccctctcaaagagctgagattacaggcctgagccaccaaacccagcctgagctttccattcattttgaaaaacaccaaagggcaattrtgaatctaatgatttggaaatgaaagggcccctcaataccagactgccctcctttatcttttgatctctatctcaagttttgtggctagttccagagagtctgagttctctaacaactgtggacttgggctcttctaatgattgttcctaagggacccttcaaggaaccacttattgtgtggcttgttctagtggtccagtcccaaagttcagtccatcccaggaaggatgtcaagaaaagagggttaataaacttagagaatttttttctccatgccctggcttcctagggaaatagggttgatactaggaatctctctgacaaaatgtaagagagaattgctttgtgaagtgaaggtaagcscatgtttcaggttttctcatgagccttcaaaaggagtctcaactccagacaagaattgggtgggggtgggggggcaggaaaacagatactttactctgtgtgccttcctgcaccccctcacccccacccctacctctctcaatataccattacaagcaaaccaaatctttatccatctgcctcagtgagatccttcaaaaagaccaagaatccccacagcagctcagactgttcccttgccccattcttgcttctgcctctgcctcagggcgtttagttttcatcagatgagtggggaatgcaattttctttttttttcttttctttttttttttttttgtgaccgggtctcactctgtcgcccaggctggagtgcagtggcaggatctcggtgcaccgcaacctccacctcccaggctcaagcgattctcctgcctcagcctcccaagtacctgggattacaggctcatgccactaccgcccagctaattttgttttgttttgtttttttaagagacggagtttcgctcttgttgcccaggctggagtgcaacggcgtgatcttgggtcaccgcaacctccgcctcctgggttcaggtgattctcctgcctcagcctccctagtagctgggattacaggcatgcgccaccatgcctggctaattttttttgtatttttagtagagatggggtttctccatgttggtcaggctgaactcctgacctgaggtgatccgcccgcctcggcctcccagagtactgggattacaggtgtgaaccagtgtgcccagtcataattttgtatttttagtggagacggggtttcaccatgttggccaggctggtcttgaactcctgatttcaaatgatccacccacctcagcctcccaaagtgctggaattacaggtgtgagccaccatgccagccgcaattttggaggtatgtaaatttccaccagatagattttttttttctctcctcccacaggctcctaaagagataaytcattgcaacaaattatcacttttaagtgttctcagttcccgattgtttaatactctactgccaattactgcttgccttccctcaaatagacattaaccttcattttaaattcagactccccccccgccccccccgtccttttttcttttttaaaataagcgtggtagagtaattgatgagagggtggggataaccatttacaggtttaacttgtttattacaccttcagtagaggacttatcactgaaccctgagtgggctgctctcctccatcttctmcttttcctgtcaccctccctcacaccacatactccaagacagaatcccttgaatgactgaacccagcttcttaatactacccccatctttaactgaggtatagagcctctaaggggctgtttctttgcctcctcagggctgaggtgtaatctccacctacatacacggtctaatctcaaaatcaaggaccactctggattaagatagtgtttccacctcagaggctggggaggcctgcagaagttgtaaattggaggaaatattggggtttgtaaatcagggtatgttgtctttcaccaggacaaagtgtaaggtttttcttggagacagggtctcgctcggttacccaggctggagtgcagtggtaagatcacagctcactgcagcctcgacctccaggctcaagtgatcctcccacctcagcctcctgaatagctgggactacaggcacatgccacgatgcctaatttatttttatattttgtagagatgggatctccctatattgcccaggctggtctcaaactcctgggctcgagtgatcctcccaccttctttccaaagcactaggattacaggtgttgagccacagtgcctggctaaggtttttcttctttaggatagtatcagaccatgcttaagtgctcctttaggtttcttgctaactcaagaatattaaagaaaagsctcctcccttcccagagctatcttctaatagcagctattttctttttcagcagaatctctttaaaatggacatagaagactgcaatggccgctcctatgtgtctggtatgccttctgtgtgttctatttgttaggggctggaagcagacactctcctgtagagcagagcagagagccttcagcctaggcacacagcctctaaatgtcctagtcacacagctaacactcatgcttggtggcccttggtagtgtgcaattattttggtgatcttacattccctaaatagtaattttcttttccagacttcttggggtatagaggaagggaataggaggggaatatgagcagacatcattagaagaataatttgaagcaaatagatggaaacaagatgtggttccttctcctttgctctgaagtcaccagccaaacatgaaatcctgttctatccagatagagcggcacaaggtttcaaagctcaaaggcctgcaagggccaggtagtcatgtgaatgagtgaagtaaggttaggataataagcagaaaagaatggtgggggctgtcatgaagtggagaacatatgtcccacttaaagggacagcagctttcagtgtccactagaacttgtcakgcaggaatgtgtatctagtgtggccaaaacttctaaatttttaagagataccagaaatccaaatttttatatgaaatgtctccattttaaaataatgactcaaggctgggcatggtggctcacgcctgtaatcccagcactttgggagacaggcagatcacctgaggtcaggagttcgagaccagcctgggcaacatggtgaaaccccctctctactaaaaatacaaaaattaggccaggcacgtggctcacgcctgtaatcccagcactttgggaggccgaggtgggcagatcacgaagtcaagagatcaggaccatcctggccaacatggtgaagcctcatatctactaaaaatacaaaaattatctgggcgtggtggctcacgcctgtagtcccaacttctcaggaggctgaggcaggagaacccaggaggcggaggttgcagtgagctgagatcacgccactgcactccagcctggcgacagagtgagactccgtctcaaaaaaaaagaaataatagaaaccaaaactgggttttgatgtgatgagtatccctatcagaaacccaagcaccattttggaaatgacctatagcttattttttactctaaagtaggaccaatgaaggaattattggcatgcactaaaggagatagcaagatgggtcagacacacatatgagagtcattggcaacacccgggtaatgtaaggtaagatgttgactctgacccctttcttgtttaaggagggaaggagttggaatgggtaaaggcattcaatatctgccacatgcttgacagaatgacagggatcaggtagactcatttaattggaagagactttattagaacaaaagtcatggccttgtgaggagcgagccagtcctcctacctcctgctcagttaagcctattcagaaaaccactactgagcaacaagtacacttgggaccctgctttagtgctggggaacactcagatggataaaatccagtccctaccataaagcaggcaaatgagaaactacaaatcctgtggagctcttttcaaacctgtttatggagaatattggatactcatggaggtgatttgcttcaccgtgctatgaaaccaagttttccctgctttcagcagattggcatgtcctagataagaagtggcctctgcacaggatggtttttgaatggaagtggaggccaggaactcctcctctgtactttgagaattttagatgtcagcagctaccttagaaagggaaaagagaaagtcaaagtaaggctaccattagccctgaaaagtacccctcttaggactgggcatagctgcgctcatcactgacccatctctcctggaagagtcatatggaagcagagggaaaggctgcagcatgcagccctcccgaagcacactgcgggcctccacaggccatcatagttcttctgctccacgccaggtgaccttccctcatcaggccacttgatgaaaagggtatctctcctgttcttccaagagatttgaattcctcacagaatgtgattcagaaaatccatcttttctccccttttctctttttaaaggtacagatcattcccttctggggcagggaaaagggggagataagcaggagtctattaatttatggcacagataaccaccccctccattttcctatctttcaagggaaacagagttgctgaaacccagctcctgccattaattgactgagcagggcttgccccaagttttctgagactgtgaaatgttttagagaactttagtagaaagggattcaggggtaggcagcccgaagtttcacagcccctcccacccccaaattcttggaatcagaaaatgtagtcttccaaagtaggtcagtttgtcagtgagcagctcctctgaaagggaagggagcagaggccttgtcctgatagagggcggattcatccagggctttcggctgctggggccccaggggcacaggaagggggggaaatggggagaccgtaccagcctttttgcccgggatctgaaaggtctcagggccacggagcaacactagcctgacaccagactctgctgggccctctcactgctggaaaggaggaggctgtcagtccccacatctagagagcaaccttcctcctggaggaggagggaaagagttcggtgggggaggggctttctgcctctctgagagccttgaagctgtccgtgtcctgggccccatgacctctggggccttggcttccccagctggcagaggattgggccttccctagggccccccctttctccctcccacccgcaggcccatccatctctctctctctctcttgcacacactcttgcctctctcaggcatttgttgtgcagttcctctttgtctgctgggcacgaggggcaacagcatctgcctttccctccctgtgcacacacccaccacccacccccttcactgtcttggaaaagggatgctgtagcctagcatctcccccactatatacacatatacattctctccagccccctccccaagcacatccaagcgtgctctcccctctccttctctccctctctctctctctctctctcwcacacacacacacacacacacacactcaacacacatacaccctgggctgagctgctcttgctggctgcagccgtgggcctctgctcaccgtgccgctgctgctgcctgcgaaatgacggcggttcccctcacttccaggaatccacgcttcctggaaggtgagtggctgggctcacccctgcctgccactgagacgcagacatgcatacaccacccgcactccctcgccgtttccaaggcggcggccgcgttcgcaccccagggtctcaccggcaagggaaggataatgtaagttcaggcagaaggcggctagtggagggaggaaggggggtgctggggctagggagccaattcagtaactactcccaagcctgaggagatggagaggatgggggckgtgtgtgtgtgtgtgtgtgtgtgtgtgtgtgtgtgtgtgtgtgtagcgggggagggggcgttcctccttatacttgcggaggatgggaaagggtgtttggtgttgctaagcaaagacggcgacttggacagtgggagcctatggtgacatcttgattaggccttggggatagaggtagagctgcctggggtgaaatgccgagacaggcctgggtgggaaggggtagtggagaaaatcaaggtaaggaagaggagccttggcaagcagatgcctcagcctggaacagagatctgaggggcctcagcttcctccccacaaaagagctgaggatgggcgtctttctttgctcttgtacccactattccctgctagcaggctaggatcctgccaccctggagcccgtggtcaagaaagggaaagcagttatgatgaggtgccttgcagagaagtgtggaggttctccatgttctccaagctcatggctattccctagatgtagccactatttaaaggtctcaaggaaaggcagcaggagtggaggctagcctcctttaacatatgaaacacctttagcttgtggcctgtttcccagttcctttctctccctcctgcttttcagcctttacctacctcccagttcctctaatgtgaacctcatgatttggctttgccctctgggggttcagccaatctatgatgactttgagcaagaaaatttctcagagacctaagagcagccttaattcttggctttgacagtctgggatttcttgggagtcccagacttttgagattccctcactggggtttctggggctgagagaggaactgttaaacttcctaaatcttactctagtcccctcacccctgagctrgaattcaaaatccttggtgcccaagaaagcctttctgactcctgaaacagattcattatacatatattttagccccatgaaagtagacttgatcctgtttttccccttaccttaatcttagggagggcaacagcatcaaagagcctcttgaattactggtgtgactcctgcttctcttcctgtttctgggccttaattgggaaagccacaaaggatgcttttccctcagtgtttcttttttttttttttttttttgagacggagtctcgctctgtcgcccaggctggagtgcagtggcgcgatctcggctcactgcaagctccgcctcccaggttcacgccattctcctgcctcagcctcccgagtagctgggactacaggcgcccgctaccatgcccrgataattttttgtatttttagtagagacggggtttcaccgtgttagccaggatggtctcgatctcctgacctcgtgatccgcccgcctcggcctcccaaagtgctgggattacaggcgtgagccaccgcgcccggccgccctcagtgtttctaagtgtacttttaaatatattttcctccacmtagcaagtcgctggcctcaagaggcagcctcagccgaataagctgggaccagtgatggatttccaacaagttcactcatccttttagggtcaaggcctcaaagccaagtgccctgttcttccctgatagtaacatcaagtgatttagggcaattcagcactaataaagggaataagaagataacattttcagcccttttaaccctagtaaaccctacacttagttgaaaggatatatttaaaactggctctgagtctacaagtctcaacccacaatcctgakatgctcacttcatgatatgtgtgtggttctgatttcgggcaacatttttaggtaaccatggctcacctaaaaagccccagctgggaaaactcagattcaagccataaggctttttctatagatagtgaacatttttcctcaggctttgacgggatagaatggggaaaatgggactttaggagaggatatgaaygggaaatggtcccaaagtcctgagtggttgttttcttcccactgaccaaagctggagagggatccctcaggagggtgtgttccggatttcttgcctcaggcccaagactccaaccattttataatggaatctttattttgtgaaagtaagtatgtgcatagctgggcaattgggtaaagtactaataggtggacttcagggatgaattttaggcttcctctctctttcttgcactctcccttgctttctctttctctcttccatatttaggcctgtgtgcacacatccatgcatgttcatgttagcagataatgtagaaggctaccagtatgtttatcccaataggtatgttctctttatatgtatctacatatgtgttgtgtctctgtgtgtgtttatctacatgtatttttatttcacctatatatttgtgtagaagattgtggggaggagggatttttttaaaaaagacattcatatcttcctttaggtatgttatctgattttgaaaaacattatgaaagcctcaaaaagcatttttacaaagcaatttatcagaaaattaaaacaaatatactgagaataagttgatcacttaactgtcaatgaatatcaaatagtaaacacgtgattggaatcagatcagtaggagactttctagagtaatcaaatttttgctgaatttagaaagtctaagaggcccaattcttccctactaagattgtgaccaccaattggctgtgtaggtgctggttaaggacatggacgcttactgtctatgatcccagttccacactagcagctatgtaaccttagacaactaacataacctcttttgtacctcagttgcctcatctgaaaaaatcatgatattagcacctacttcatatagttgttgtgaggattaaatgaaattattcatttcaagtgcacagaataaagcctggcacatagtaagtactcaattaatattattagctgctatgatgattactaatattatcattagattcaaggacaattccagttacctttcctgcagatcctgaaccggctgggggctccagagaggaacagtagggaagaatgtctgtcctgaacatctgtcccttctgcagcccccattttcctctccgccctggcgcacccagcctcagccctgcttcctgtggacgtcaggcagtgatgctcttgccctcaggcctagataaaggtagggtaggcaaggcccagccactgagctcacagaaggcagcaccaggcatccagactggygggggcacaaggtatggtgcccagcatacaacactgctttgtacatggctatgaaggaaatgtttgtgaaatttaactgaatttttttaaaagattaggcaatggacagtagatatctccagctccagctttacctgccctcttgttctctcctccaaggtagcggggactcatctctggagaaggagttcctcggggccccagtggggccctcggtgagcacccccaacagccagcactcttctcctagccgctcactsagtggtaagtgtaacctcctaccacctcctggcagtaggcaccccctgttgcatttggccttcaattcaccttccactggcaaccatttccccatcgtcacctcctgctggtctcctgcttagtctctaagagcaatgaggagcccagtgtctagggtttttctggcttctgaaaggagagtgaatagtcagtcactggcagactagggtggaattaaaagaggtatgggtgggattaaggtaaaagtttcaaagagaaattatggaattagagaagcaggtagatagaaatggtcatcagatggagttagataggaaatagagagtagaaggacctccccatctccccacagctcattctcctacccagacagggtccccatgactgcctctccccagctggccctagatctgtgacattctctaaatggttggagtagccaggaatgtaggtcggagctagagccaaagccttctcctcaatggttcctccttcctttacccctcctgccctgcctcagagttttatggaggtggagggggtagagggattcaatctaatgaggtgggagggaactgtaagcatgtctgtcttccaggtttgctctctttggcctgttgtcccccttcagtcttcctagatctgttttcccgccactgttaacttgctggcttcctgcccagggccaagccagacatctttcttcatgacaagagagtagagaaaaaagctccccttagtcgcctcctctcctcagcgacagaagacatcctatgtacccccaacttttttctttttgagatggagtcttgctctgtcgcccaggctggactgcagtggcgtgatctcagctcactgcaacctccgcctcccaagttcaagcgattctcctgcctcagcctccgaagtagctgggattacaggcgtacaccaccatgcccagctaatttttgtatttttagtaaagacagggtttcaccatgttggccaggctggtctcaaactcctgacctcaaaagaatccacccgccttggcctcccaaattgctgggattacaggcgtgagccaccacacccggcccaacttttttctcttgaagcctatttgcctggtgggtgggagaaaaggttgtctcaggttccagtaggattctgatatcagcagcagggatactagggtgttagttccatttaaggcttgaatgtctcagggcctaaagacaccctcttaaactttaagagtgccattctgggccaggcgcagtggctcacacctgtaatcccagcactttgggaggccaaggcaggcagatcacctgaggttggaagttcgagaccatcctgaccaacatggagaaaccctgtctgttctaaaaataccaaattagctgggtgtgatggtacatgcctgtaatcccagctactcaggaggctgaggcaggagaatcacttgaatctgggaggtggaggttgcgtcgagccaaattcgtgccactgcactccagcctgggcaacaagagcgaaattccatctcaaaaaaaaaaaaaaaaaaagagtgccattctggcctgggagcagcttccccctttgcctctctctattctaaacaccatcccacccctcagccaactccatcaaggtggagatgtacagcgatgaggagtcaagcagactgctggggccagatgagcggctcctggaaaaggacgacagcgtgattgtggaagattcattgtctgagcccctgggctactgtgatgggagtgggccagagcctcactcccctgggggcatccggctgcccaatggcaagctcaagtgtgacgtctgcggcatggtctgtattggacccaacgtgctcatggtgcacaagcgcagtcacactggtaagtaagccagaggggctctgggaggagctcccagggtggggttgagaggcaggggcagtgctgggacaacagcaggtatggggctggaggaggtcatgcagggagtgggtagcctcagaaagggaagggtctcacccagcacattttccagctgacaaaacgaggcagggtgggggtgggtacagaatttgaattcccctcaatacctttagtttcctggcactctyctcaaccgctgttataaagaaaaggtgatatttttctcagtatatgagggaggggaaagtgtagactcaagaatgagccaatggtccaataggggtaagactcctgggtattctttgggccctcccatctaataattaaaaaacaacaacaacaacaacaacaacaaaacagaaaacaaaagccttctcttctcagcttccttgggccttgggctcctagggcagagtgggccctgtggggctcagtttttggtaacagtcttttggcctcgtgttccaggcccctctccctgccacacacctctaatccacaccttccccagggtaagaccccagggatccccaagggatcttcataaatcagggtttgtgtgcattgcacttctgcccgtcagcaatgtgttcagagcaccttcccttgggcaaggtagggcagagggtgggtgataggttcaaccttcaaagttcctcacatgcagtcctctgggatttgttctttcacttgcaggtgaaaggcccttccattgcaaccagtgtggtgcctccttcacccagaaggggaacctgctgcgccacatcaagctgcactctggggagaagccctttaaatgtcccttctgcaactatgcctgccgccggcgtgatgcactcactggtcacctccgcacacactcaggtcagtgtctgtccagtgggaggagggaatgaggctccaacacacccagtatgtagagctcagtgacttctcttgtatttggggagttccagtgtctgtcattgaggaggggggagcatttacagagcagatagggccccctgcctctctcacccatcctctgggcagcaaggcttcatgggaaatttgggagacaccttgatggggtattttacatccaccatatggatgtaaaatccatctacttggagcaaaaggaataggagcaatgttcttggctgttaacggtcacccttggcctggcgcggtggctcacgcctgtaatcccagcactttgggaggccaagatgggcggatcacgaggtcaggagatcgagaccatcctggccaaaatggtgaaaccctgtctctactaaaaatacaaaaaaaamaaaaattagccgggcatggtggcaggcacctgtagtcccagctacttgggaggctgaggctggagaatggcgtgaacccgggaggcggagcttgcagtgagctgagatcgcgccattgcactctagcctgggcgactgagcracactcagtctcaaaaawaaaaawaaaaaaaaaaaaagtcacccttccctgacttttgtttgttttttgttttttcaagacggtgtctcacactgttgcccaggctggagtgtagtggtgcaattttggctccctgcagtcttgatctcctgagctcaagccatcctcccacctcagcttcctgagtagctggaaggatactgccacacccagctaatttttctatttttttgtagagacaggatctccctatgctgcccaggcttgtcttgaactcttgatctcaagcaatcggcccacctcagcctcctgaagtactgggattacaggcgtggtgtcagccactgtgcctgggctttcctgacttttatattttagattgttgatgccacaatccatgccctattacccccaacatctaagcccctgggaaatccctcctctcactcccatctgcctcaggccccacacctgtcatcatcttcaccctccttcctcccacaccaccagaggtcttgagcaaccagtctgtcctctcctttacttccttctggctcctggaaatatccatagccctctcaaattgcaaaaaagggagcctaggacttccaaataggaaaagagtatcctatttctgttccctatcccaagaggttgtcaccttcccagaggcaagagaaagtccagagggtacctagagatcaatgtttggaacagtgctgggaaactggattaacaaggttttctagcccagtcaagactgtttgaatcagtatctgtctgaatcagctggacagatagcactttttaggcattttactaagctttaggcttttggcttggacttgggaagaggccaggagctgagctggcaggaaggagggagctcaagattgggaaaaggcaggaagaaaggaagggggaaagaattagtagggtctgtccttggaaactttcctggctatttttctcttcttaaactctcctgagccaggatttaaagggacagagcaatcatttcatcaccctctactttctccatccacttaccttgttccaggttctcccaccttgtaattgggacctctttatctctatgtatgtggagaaacagggagaaagatcatcgttgatacatgctttatatctacagagcatttcacttgtgtttctccatgtgatcctcataacaattccaaggtagatgtgattatccccattttgttgacaaggaaaatgaagctgttggggggaaaaatgagttgcgggtcacatagctattcttcagcctagctggaaccccatcaaggtccagtgccagaaatacatactccttttcctcagaaaaggggctgctccccctgctggtttggaacaaggatggcttggcccctagaattcttaccaactacacagtgaggtgaactgggtagattttggatgttgatctgtagattattaacaacagaagcagacacagatatactgtcaggtcccatctctgtgaagtgctttctgttgcaacccctattataagaaaaaagagactggatgcatgttctcactcatgtgggagctaaaaaagttgatctcatagaagcacggagtaggttgggtgcagtggctcacgtctatcatcccagcagtttgggaagccaaggcgggtggatcgcttgagcccaggagtttgagaccagccagagcaacatagtgagacttcgtctctactacaaaaamaaaaacaaaaacaaaaacaaaaactaggtgtggtggcacacacctgtagtcccagctactcaggaggctgagacagggaggatcacttgaacctgggaggtcaagacttcagtgtcctgtgatcatgtcattgcactccagtctgggtgacagagtgagaccccatcttggggaaaaaaaaaaaaaagccaggcacggtggctcacgcctgtaatcccagcactttgggaggccaaggcgggcagatcacctgaggtcaggagttcaagaccagcctgaccaacatggagaaaccctgtttctactaaaaatacaaaattagccaggcgtggtggcgcatgcctgtaatccctgctactcgggaggctgagacaggagaattccttgagcccaggaggcagaggttgcagtaagccaagatcgcgccattgcactccagcctgggcaacaagggtgaaactccgtctcaaaaaaaaaaaaaaagtagagagtagaacagtggttaccagaggctgactgagaagggttgggagtaggtggatagcgagaggctggttaatgggtacaagattacagttagatgggaggcataagttgtagtgttccacagcatagtagaatgactgtagttaacaataatttattgtatatttcaaaatcgctagaagagattattttgaatgttcccaatacaaagaaatgataaatgtttgctgggcatggtggctcacgcctgtcatcctagcctttgggaggctgaggcagacagatcatgaggtcaggagattgagaccatcctggctaacayggtgaaacccgtctctactaaaaatacaaaaaattagctgggcatggtggtgggcgcctgtagtcccagctactgggaggctgaggcaggagaatcgcttgaacccaggaggtagaggttgcagtgagccgagatcgtgccactgcactccagcctaggcaacagagtaagactctgtctccaaaaaaaagaagaaaaaaagataaatgtttgaggtgacagatatgccagttaccccaacttgatcattacatgtcgtatacatgtatgaaaatatcatatgtatctcataaacatgtataattattatgtatcaattatcaattaaaatttgaaaaaaaagaaagcggttggaggatcattcctctcccagatgttaaactgtttccccaagggtctttgggtggatagggaccatggtgttcatttcatccctaaaatacaagagtttacagagcctgagtaaaatccagtagattgatttagtcaaggcccagctttggcatggcaaggttaggggtgaatagtaattaccagcttcctagagataccttctcctgtctccctgctcaatagcagcaagatacatcaaatatacaatacgttgtttctctccacttttttctctcctctcacaaatatctcttaagagttatctttaaatgaagtaccactctgttttccaattttctttcttckgtagaaacaagacctttataacctgttccttattacaagcacataaacaaacaaacccaaatttggtgttctcttttttttactcttctttattttcttctctgttcttttattctttttctcttttcagaattactctatcagtgatgggctttctagacctctcttggtatctcagcgtagagagacagagagacaaaataatcagtaaaccaggctagggctggaggtcaaaatacaagtaaaggtcaatgaaaactgccccctccccacattggcagatctaagggctctcatttctgtcatgccagcccaccagtttcccccaaaccaaagcagatagttcataaaaagcaaaaaatccccttgtctgataaacagcacttacatccgcctgccaaatggaaaggttaaaccacagtctgggccccagactctgagatcctgcagtggggcctgcctgtctgctagggatgatcctctacaaagtccctgggtcctcacttcctttaagcaacaatttggccatcttgaacaaacccaccaccagtctgaagccacatgccctaggattcccttgcccccataactgcacattatccttcatcatcaaatattgttcatctgtccgcggttgcagttgaagttgggaaatgaaagacaagtagaagaactcaatttagcaacatcctttccttcccatgccagtgtatacttgctcttggctgaatctgcagagccagggcacagcgagaaatagctctgatgccatctttccactctcctccacagtctcctctcccacagtgggcaagccctacaagtgtaactactgtggccggagctacaaacagcagagtaccctggaggagcacaaggagcggtgccataactacctacagagtctcagcactgaagcccaagctttggctggccaaccaggtagggctattgatgtactactggggagttaaaaggggatggtgagagggagtgctagacaagggtgactccagtatctcccrcactgagggatgaagtctgtggaacaggggatgattaccccagtaaatctgccaaacaccccattctaggtaacccagttggtggagagccttgtctgtggtgggtgctttagggagatcgacaggtaggggaagtttgggtctatatccttggcctaatgggagagagagaacacaagaagtataaaaccaagggccagatgtgtatgattgtccccaaatgatctgaaattttattggagtgagctttaggtagggtaaacagagcccagtttcccaggcaactggtatgtccttccttggctactgacctgctggttttctccaggcaaaggctgtggggccaatgctacccctactcaactgctactactgtctccaccttcttcccactaggtgacgaaatacgtgacctggagatggtgccagactccatgctgcactcatcctctgagcggccaactttcatcgatcgtctggccaatagcctcaccaaacgcaagcgttccacaccccagaagtttgtaggtaagaatccagttggaaagacgtatcagctttaagccacagctcaaataaatctgagctgtgtggtctggagattcggtttggggaaagaaagcagtctggtgggctgggtgcagtggctcacgtctgtaatcccagcactttgggaggccaaggtgggcagatcaagaggtcagaagatcaagaccatcccggttaacacagtgaaaccccctctctactaaaaatacaaaaaattagccgggcgtggtggcgggcacctgtagtcccagctactcgggaggctgaagcaggagaatggtgtgaacccgggaggcggagcttgcagtgagcggagatcgcgccactgcactccatccatcctgggcaacagagcaagactccgtctcaaaagaaaaaagaaaaaaggaaagaaagaaagcaggctggtggcctctgatactgaaaatctatcctcaggacaggaggaaagtaaagagggaggatgtactcaaagagagtggagaagggttggcactgaagactctcgtggtggttgtaagggacagggtcgaggcatcgggctgtctcagttttttgtttgtttgtttgtttttgagacggagtcttgctctgtcgcccaggctagaatgcagtggcacgatctcggctcactgcaacctctgtctcccaggttcacgccattctcctgcctcagcctcccgagtagctgggactacagacgcctgccaccatgcccggctaattttttttgtatttttagtagagacggggtttcaccgtgttagccaggatggtcttaatctcctgacctcatgatctgcccgcctcagcctcccaaagtgctgggattacaggcgtgagccaccgcgcccggcccgggctatctcagtttttaagaataacaagaacttcagtctgtgtgggcccttagagagtcagagagaggaaataagtatgtggttccccctatccccagcactagtcatgagctctctaaggacctggagctttatggagagtaataaaatgaagtattaaaaatcaatgggctgggattgagtccttctctaagattatagcctagagtcagggagcagtcccacaaaggacctgaccctgcgaaagtaaatgccacgtagtaaataatgttacacccagccccacaggtaaaaaaacaaagaagtaatcctgaggagagtgtaggaattctccaaacccagccctgctgagttcctsttctccacaggcgaaaagcagatgcgcttcagcctctcagacctcccctatgatgtgaactcgggtggctatgaaaaggatgtggagttggtggcacaccacagcctagagcctggctttggaagttccctggcctttgtgggtgcagagcatctgcgtcccctccgccttccacccaccaattgcatctcagaactcacgcctgtcatcagctctgtctacacccagatgcagcccctccctggtcgactggagcttccaggatcccgagaagcaggtgagggacctgaggacctggctgatggaggtcccctcctctaccggccccgaggccccctgactgaccctggggcatcccccagcaatggctgccaggactccacagacacagaaagcaaccacgaagatcgggttgcgggggtggtatccctccctcagggtcccccaccccagccacctcccaccattgtggtgggccggcacagtcctgcctacgccaaagaggaccccaagccacaggaggggttattgcggggcaccccaggcccctccaaggaagtgcttcgggtggtgggcgagagtggtgagcctgtgaaggccttcaagtgtgagcactgccgtatcctcttcctggaccacgtcatgttcactatccacatgggctgccatggcttcagagacccttttgagtgcaacatctgtggttatcacagccaggaccggtacgaattctcttcccacattgtccggggggagcataaggtgggctagcaacctctccctctctcctcagtccaccactccactgccctgactacaggcattgatccctgtccccaccatttcccaaggagttttgctttgtagccctcactactggccacctgacctcacacctgaccctgacccctcctcacctattctcttcctctatcctgaccgatgtaagcattgtgatgaaacagatcttttgcttatgtttttcctttttatcttctctcatcccagcatactgagttatttattaattagttgatttatttttgcctttttaaattttaacttatatcagtcacttgccactcccccaccctcctgtccacaactcctttccactttaggccaatttttctctcttagatcttccagcagccccaggggtaggaagctcctcttagtactaagagacttcaagcttcttgctttaagtcctcaccctttacattatctaattcttcagttttgatgctgatacctgcccccggccctaccttagctctgtggcattatatctcctctctgggactcttcaacctggtactccatacctcttgtgccctctcactttaggcagcttgcactattcttgaatgaatgaagaattatttcctcatttggaagtaggagggactgaagaaattctccccaggcactgtgggactgagagtcctattcccctagtaataggtcatattcccctagtaatatgagttctcaaagcctacattcaggatctccctctaggatgtgatagatctggtccctctccttgaactacccctccacacgctctagtcccttcaacctaccggtctattaagtggtggcttttctctccttggagtgccccaattttatattctcaggggccaaggctaggtctgcaaccctctgtctctgacagattgggagccacaggtgcctaattgggaaccagggcatgggaaaggagtgggtcaaaattcttctctttctcctccacctctcaaacttcttcactatagtgaccttcctaggctctcaggggctccttcagtccccatcctatgagaaactagtgggttgctgcctgatgacaaggggttgtttcagcccctcagtcatgctgccttctgctgctccctcccagcaggattcaccctctcattcccgggctcctgggccctgttcttaggatcagtggcagggagaaacgggtatctcttttctctcttctaattttcagtataaccaaaaattatcccagcatgagcacgggcacgtgcccttcaccccattccacccttgttccagcaagactgggatgggtacaactgaactggggtcttcctttactacccccttctacactcagctcccagacacagggtaggaggggggactgctggctactgcagagacccttggctatttgagtaacctaggattagtgagaaggggcagaaggagatacaactccactgcaagtggaggtttctttctacaagagttttctgcccaaggccacagccatcccactctctgcttccttgagattcaaaccaaaggctgtttttctatgtttaaagaaaaaaaaaagtaaaaaccaaacacaacacctcacaagttgtaactcttggtccttctctctctccttttctcttcccttccttccccttccatctttctttccacatgtcctttccttattggctcttttacctcctacttttctcactccctatcagggatattttggggggggatggtaaagggtgggctaaggaacagaccctgggattagggccttaagggctctgagaggagtctaccttgccttcttatgggaagggagaccctaaaaaactttctcctctttgtcctcctttttctcccccactctgaggtttccccaagagaaccagattggcagggagaagcattgtggggcaattgttcctccttgacaatgtagcaataaatagatgctgccaagggcagaaaatggggaggttagctcagagcagagtagtctctagagaaaggaagaatcctcaacggcaccctggggtgctagctcctttttagaatgtcagcagagctgagattaatatctgggcttttcctgaactattctggttattgagcccttcctgttagacctaccgcctcccacctcttctgtgtctgctgtgtatttggtgacacttcataaggactagtcccttctggggtatcagagccttagggtgcccccatccccttccccagtcaactgtggcacctgtaacctcccggaacatgaaggactatgctctgaggctatactctgtgcccatgagagcagagactggaagggcaagaccaggtgctaaggaggggagagggggcatcctgtctctctccagaccatcactgcactttaaccagggtcttaggtacaaaatcctacttttcagagccttccagctctggaacctcaaacatcctcatgctctctcccagctccttttgcataaaaaaaaaagtaaagaaaaagaaaaaaaaatacacacacactgaaacccacatggagaaaagaggtgtttccttttatattgctattcaaaatcaataccaccaacaaaatatttctaagtagacacttttccagacctttgtttttttgtgtcagtgtccaagctgcagataggattttgtaatacttctggcagcttctttccttgtgtacataatatatatatatacatatatatatatatttttaatcagaagttatgaagaacaaaaagaaaaaataaacacagaagcaagtgcaataccacctctcttctccctctctcctagggtttcctttgtagcctatgtttggtgtctcttttgacctttaccccttcacctcctcctctcttcttctgattcccctcccccccttttttaaagagtttttctcctttctcaaggggagttaaactagcttttgagacttattgcaaagcattttgtatatgtaatatattgtaagtaaatatttgtgtaacggagatatactactgtaagttttgtactgtactggctgaaagtctgttataaataaacatgagtaatttaacacctctggttgtttttgcagacttcctttgccttgcttttctactaagagggaggggtcctccttgcagtatgttataccaactactgaacagtttaggaggtaaacaaaaacgaagaattttcagcctagactgggaaatggaggagattttcctaccaggaaggagtgccttcaggataggagagaaagtctgacttgcctgtctacccaaagtagaaattaatcaaacatttgttgagtacctactgtgcacaaaacacattctatgcccagggtgaaataatgcgaatgatgacaatcatagggtctaccactgcttgagcatctcataaatgctaagtactcattgaattgtagaaacacctacaaaaggatgatcacaattattggtaaaaaaataaaagcccaagagagaataaataccttatccaaggctcatcagccagtaagtgacagaaccagaatttgaacccaggggtgtgtgatccaaagcatgtgctcatcgctttatgccagggaatgcagccagtgaaacccctaagctagaaaaatccaaagtaggaacataaatttgtttctgtcttaaatagtaactattttctgttctcttcactctgaacttttttatgttctcttccatctacctcattgctattccatatagtaatgtctgccttctgttttccacaagattacagtgaagtgaaaattagagacactcctatctagagtctattattttccatgtcccactgaaactggcaaattcaaagtcaaaacagacaggaaagctggaagtggtggaggacacctgtcctcccagctacttgggaggatcacttgagcctaggagtttgagaacagcctcagcaacacagggcaacaccatctctacaagaaattttaaaattagctaggcatggtggtgcatgcctgtagtcccagctactcggaaagctgagacggcaggatcacttgagcccaggaggtcaagcctgcactgaactgtgatcatgccactgcagcctccagacccatcttaaaaaagaaaaaaaagcgctgggcacagtggctcatgcctgtaatcctggcactctgggaggctgaggcaggcggatcacgaggtcaggagatcaagaccatgtggccaacatggtgaaactccgtctctactaaaatacaaaaaattagccgggcatggtggtacgtgcctgtagtgccagctacttgggaggctgaggcagaagaatcgcttgaacccaggaggcggaggttgcagtgagccaagatcgcaccactgcactccagcctaggcaacagagcaagactccatctgaaaaaaaaaaaaaaaagtctgggcacagtggctcacgcctgtaatcctagcactttgggaggccgagtcgggtggatatcctgagctcaggagttcgagaccagcctgggcaacatggcgaaaccctatctctactaaaaatacaaaaattagctggggccgggtgcagtggctcacacctataatcccagcactttgggaggctgaggtggatggatcacgaggtcaagagatcgggactgtcccagccaacatggtgaaaccctgtctctactaaaaatacaaaaattagctgggcatggtggcgcccacctgtagtcccacctactcgggaggctgaggcagaagaatcgcttgaacccgggaggcagaggttgctgtgagctgagatggcaccactgcactccagcctgggtgacagagcaagagtctgtctcaaaaataaaaataaaaaaagaaaggaaaagaaaaaagaaagtaagaaaacagattttagccccaagaagtgggttaaaggttaaaagaaaccatgatgggttgctggagggaaggtgaatctggtgtgttcaaactctagagtgagtcataaatgaacaatggtttccatctgtaccatcctgggtctgaatgctaggaggtccccttgccaccctagtgtcttcaactttggagacaactgggtggttggctgtggacagccattcctgccaggctgaagcttgcttgctttttttttttttttttttgagacagagtttcgctctattgcccagactgtagcacagtagcccaatctcagctcactgcaacttctgcctcccgggtgcaagcaattctcctgtctcagtctcccgagtagctgggattacaggtgtgcgccaccaggcctaatttttatatttttagtagaggtggggtgtcactatgttgactaggctggtcttgaactcctgacctcaggtgatccgcctgccttggcctcccaaagtgttgggattacaggcgtgagccactgcacccagcctaaggcttaagtctttccgatggctcttcagaggtaaatggagcttacacataatctttcaattaggggtcagattcactaatgagtggtgaaataattttcgtggtttttgatcagcatttattaaaatagagaacagaaagattaagtaaaaataaagaatagaacataccagcacacctatgacaagggtaagtatcgtttcataaagcttgtgtttcagttttgcatgtgcatgtaatcgtgtttgtgtgtgtactgggtaccaatgtaaaatgtattcgtgctatgaatctgggtgaaaaacgtttaagtcattagtccaggctattcctccatccatttgttaggtgacatacagcatagtacagcggagccagaatacctactgcacgtcagttcttcaatctttttttttaattgatttatttatttttgagacagagtttcgatctttttacccaggctagagtgcagtggcgcgatctcggctcactggaaactccgcctcccaggttcaagattctcctgtcttagcctcctgagtacctgggattacaggcgcccaccaccaggccgggctaaattcttcaatctttaaagtgaggataataatagtagctacctataggcttgctcaaagttaaatgagttaatatttataaagacgcttaccacagggccaggcactgtgccagagataaaaagatgaatgagaaatagcccca

SEQ ID NO: 97811 - DNA, 23997 bp, Homo sapiens
  misc_feature (1)...(23997): n = A,T,C or G
cccgctatcatttggcctttataaacattgtggcagcaggaggcttgggatcctggtcatcccaaacactggaaataataattatggggcattcagagattggtacggcaaatctaacgtgtaggaaggcttttttaaaattatttttataccaaccctcttcagcaataactaagagaagggggaaagggtggtggaggctaacttaagtgcatctaatactgaaacttcctttcattttcactggttcccccctttcacccctgtattcccagagttggctggccaagactagaaggtgagtgtttaaggcaagttcagagggcccacctgagtccaaatagcccaaggccaagcctggtcaagcccacactggaggagagggtgagattagggctgggggcttcaagaaggctatcagagtcgaagatggggtactggcttggtcacatcctggaagaaagggtgagccagggctgccttggccgaaatccgcttgttagggtcgtagtgcagcatttgctagagggagagatgcatgttgacttcaatgatgtgatagtggactaaatgggcagcaggtgttcccagaaatcaggaaaccagaactccttctacccaaggcagaattctcacttccatcctcccatagctgaatcagtgtgccaacagggagagcaggaaccagggaaatgaaacactgaggcccagatttcagggtctcatccttccttcatcctggaaaagcccttccctgggagaaatgaatgagggaaaacaggtgcccactctcaccgataacaagctccgtccatcttcatccaggggaggtacaactttactaaaatcttgccgggcccacttggggaaacttggcttgtaatcaggcatagaagtaactcctggccacaccacctcatctggggtccccagagtccgaaagatccggaagagctggtcaatctcagaatctccagggaatagggcccggcgagtcacctgaaaatggggaaagaggaaataccaagacccacgttgacgtcagtcaaaactctcctctatacaaaggagttcccacagacagtaaaaggtcagcagggccccatgactccctccccagggcctttcatggggtcagtcacacagaacctgagacaatgaagttccttcatctgtctcctcgccccctccttccttcccccaaccatggctttgcagatccccaaggctgggtgggtctgggagggggtgaatgtctggggtgccactgacatgtagcaaaggtatcccaagccactcacggggtagggggtagacactgcggtcatcccccaaccttgtgatgcagccacttctagatacgagcacagcgggcagagactctgtcttccatttcttctgtgttccccacagcacctagcatggtgctgggtacccactaggtgcttaacaaatattttttgatgaattgagagaggaatacggacaattgtaaggtaatgcactggggggataaatgcacattacatatgtataggctaatggtctttaagctcttggttacaaccaagataaaagacaataaaacatattgctgatttgaagacagcctactgcaccactgtactgttatattaaaggagatgggagcttctacataaagccaggcttcaaggatccttcagtctgaaaagccagaggttgaaggggaacatgatctaaatctttttttttttttttttttttttttttttgagatggaatctcattctgtcgcccaggctggagtgcagtggtgcaatcttggtcactgcaacctccatctcccgggttcaaccgattctcctgccttggcctcccaagtagctgggattacaggtgtgtaatcccaagtagccacacctggctaatttttgtatttttagtagagacagggttttaacatgttggccaggctggtctcaaactcctgacctcaggtgatccacctacctcagcctcccaaagtgctggtattataggtgtgagccactgcaccctgcctaaatctgcagtttaaatgaaaggtgtgggtaaagtgaccacagttgtcttcactacattgctggcaccatacaacaaggtctacaagccttgaaatgaaggcctgaaataaaagaggcactaaatggaatcattctcccaaatatatgcagactacagctaaaacagctgcagaaatgctttaacttatttcagggataagagatgtataccaggtactaaggctgtttgaggatatcctaacactgtggttgatatcagggcaacagttgcatcctttcccaccattccccttggtgctactttagagagagaaccctgtgatagaagggccataggtctgggccaagaagcagttctgttgttcttggatgtggggaggagagggagggggctgggtggaacttgggcaagcctccataccatctcagcaaagatgcagcccaggctccagatgtccacagctgtggaataatatttgcagcccaggaggatttcaggagctcggtaccacagggtcaccacctgagggacgggaatagggaggggcggggtggtttatagggtatggaaattcccgcatctcagttcctcaacactactctgcttactcttggcctcttaacaagcagtttccttccctccatcatctttcccctcccactgatttccagtccatagttctggactgaacccctaatttgagatcttcctggaaaaacttgagacaaattggtcataattttatttctaaattttttctttttgtagatttgtagagatggggtctcgctatgttgcccatgatggtctcgaactcctgggctcaagtgatcctcccacctcagcctcccaaagtattggtattacaggtgtgggcccagttagcaacacagtatgaattccatgcataccctaagactctttaggatgtcaagagattatttctacctagtaagaaactgttagccagatatttttagtaactttgtgaataccctagttaacacctcttgggaagctcagagaaaaaagacataaagggactcacctcatgggtgtaagtacgaacagggactccaaaagctctggctagtccaaagtctgctagcttgatggccccctctgtgttaataagcagattctgaggtttaaggtctcggtggaggacccgatgagaatggcagaaagctaggccctggagcagctggaacagatagctctgacaaaggagaaagagaggactgtgtttctccattacagtgagcagactgggtttgctctgtgcccctaaaactctactaaagcctttattatgttggattatagttacatatttacaagctatttctcccaatggactgtcagcccagagaggataaggaccaagtcttactcaattttccatcccttttctacatcctgtgcattgaaaaaatgtttgttaatagattgaaagtagctctgggagtgaagaatccagccctaaaatagacaatagggactcactagctaggtcttccaccaaatggaagggctttttggaggaatttaccaagtgctctcaaatcccgtttatctgagtttcatctgacctcccacctgagttgctaggttgactcactagagtttcaactttgattgttcagtccaaccctagggttaatgaatataatgagcagggaaggagacacaaaaagaaggggagtgtgtgtgtataggagatgagggctcagaaggaggccaaaatcataaaatatcaccctgaattgcctgccaccagtcccccaagacatgcccatgatgagaggagctgatgagaagcattaccttgatgaggggaagaggaatgccagtgagagcagaggcatccatgaatttcttgagatcttggtgcagaaattcaaaaaccaggtagagtttattttctgtgtgaatgacatccagcagcctagagaaggaaagtttgaggaaatggaggtgtgtgagagagagaaatgcccacactgtacagacagaacttatcctcctttccagctggatcacctctcagacgcatacttacttgacaatattaggatggttaagctccttaagcagagagatctctcggatggcagtactgggcacaccctcagtctcacttggagaggttgggaaagcagagatgggaatatggttacaaatattcctttcccccccacctagtcatttctttcccccaaggagacaccacccagcaccccctaggaaagtgagagaagagaaagggtgatggtaagagctaattcttgggtagtcagggtgtggtttttggatatattaaggccattatctcctcttttcccaggggtaggtaagtaaagccgcctggtgaaggtgaagcagggagactgtaatggaggggaaaaaatgcaggagtagcccccagcctccccagaggggccagtgaggttcaactgccattctttggaaagaggagagaattctaaggtgagggtggggcagtgaagagggctcttcattcagaaaggcgattctcgccggttcccacataactccactccatggagagtcttggacctcatctcagagacctcctttctctccccgagtctgtagtcgcacatttgggggcacgatccggctcagtttgggaagaaagttttccatggattccacaccaccctatactctccccagggagtataagtatactcttcaccttctactggcccccaacccacctctccacttctaaagaagtccctccctgctctcttccggtccctggacggctacccgcccgtggggggttgggggggacaatcaaggaggtccccagttaggagtcccgggtacagaggccactcacgtgtccaggcggattttcttaagcgccaccacctctcccgtcaacttgtttctggctttgtacacaactccgtacgtgccctctccgatcttttccaccttttggaagttctccatgaagcgccagcgagtcgggtcagcccggccctggagcgggggcctgggaaccctgcagaaggcggaccctggctctcgggggccgaggagggggaaacagggcccagtaccgtggccccgggtcgggatggaacgcagtatacctctcgctcttgtcaatttggccaacttgaaacaatgttgccgcctcccaccgagttcccgaccgccaccagaggccccgcccctgcttcccgcgtttccctggctccgcccccaggcctttctattggtcaacgtcagagccggggggcgagcccagcgctcctccccgcaaatgatcccgccccaggcaagtttggttcttgggggctagacaagtttcttccccggtggggcggctgaacactcttcccaagtacctgctttgggtccaagtttcctacctatgtctctagtctgtagggatttcttgatttctaactcactattttcaccaatcctggggaaaatatgtatcgacctaaggttaaattccacctggcccaggagcctcctttggaaaccaggaagccgggaatctcgttgcaaaggaatcctgggcctcagaggagtcgttgcctctgcctcatagcataccccgacactgtctctgttttgggatgcagggttctgtttctgtctttttgagaagttcctggtttaattcactctcccatgataaactgttgtgtctggtatgtgttacgcagctgcctttcagttagctcttgcccgggagtgcatcaagatgagagtgacccagtgaaaccagaaactgtcattgagtagcaggatgggaaagcaatgtctagggaccaggatccctttgtcagtttttcctttttcctctcctccggcccctcccaggccttctctgagggagaagaggaagggctatgcaaatgagcacccttttcttatataggggcctatcccagtccccccagtgcctttggttgctggagggaagaacacaatggatctggtgctaaaaagatgccttcttcatttggctgtgataggtgctttgctggctgtgggggctacaaaaggtatgtgtggatatgtggacatgagcaggtgtgaacttggggatgaattccccctgctctggtttctgtcctccwaaygggagatagcggcaatatttcaggcgtctcccactcatttgatttagtgaggatgtgggcacctgggctccctccctacatggagatttgggattttgcctgaaaataatctcatatgcttggaggggcagaaggatagaaggtctctgtggcactgattctgaggcttccttggcagtgagctggagcacgggctccaaaggggtgaaatgtgcrggagactcttttaggaaacgtctcttggggtaggagatttaaagtggggagtcagagaatgtggtattgggtaagaacactaaggagatacaatcctctcctcttgggatgggtacgggtgaacacagcccagaccttttgttctggggctggagagataggcagaggggtctcagctgagcatcacatgaaagggctctgggggattgggcctcgtgacaggagcaaggggcgggggtggggtggtgagagggtctggaatgtcccgtgctgctctgaggagagttggaagtggagaaagaatggggtatcttatgacttctcttgttctagtggtgggatgctcaatagatgattccagatcctcccccagcagaatcaactagggttacagcacacattagaaagggaatgaggccgggcgccgtggctcacgcctgtaatcccagcactttgggaggctgaagcaggtggatcacgaggtcaggagttcgagaccagcctggccaatatggtgaaacccccgtctctactaaaagtacaaaaattagctgggcatggtggcacatgcctgtagtcccagctactcagaaggctgaggctggagaatcacttgaacccagaaggcagaggttgcagtgagccaagatcacaccaatgcactccagcctgggtgacagagcgagtctccgtctcaaaaaaaaaaaaaaaaagaaagggatgaggcccggcacagtaactcatgcctgtaatcctagcactttgagaggctgagacgggtggatcacttgaggtcagaccagcctggccaatatggtgaaactccatctctactaaaaatacaaaaattagctgggcatggtggtacgcacctgtaatcccaactacttgggaggccgaggcatgagaatcgcttgaacctgggaggcagaggttgcagtgagccgagatcacaccattgcattccagcctgggcaacagcaagactctgtctcaaaaaaataaaaaaagaaaagaaaagaaaagagataaggaggccgggtgtagtggctcacacctgtaatcccagcactttgggaggccgtggtcataggattgcttgagcccaggagttcaagaccagcctgagcaacatagtgagaccttgtctctacgaaacgtaaaaaaattagccaggcctaggccaggcttggtggctcacgcctgtaatcccagcactttgcgagaccaaggcaggtggatcagctgaagttgggagtttgagaccagcctgaccaacatagagaaacccagtctctactaaaaatacaaaattagctgggcgtggtggtgcatgcctgtaatcccagccactcaggaggctgaggcaggagaatcgcttgaacccgggaggcggaggttgtagtaagctgagatcgtgccattgtactccagccttccagcctgggcaacaagagcgaaactctgtctcaaaaaaaaaaaaaaaaaaaattagccaggcttggtggtgagcacctgtggtcctagccacttgggaggctaatgaggaagatggcttcagcctaggagtttgaggctgcagtgagtgatgaacgtgccactgcacgcagggtgagagagcaaaaccctgtatcaaaaggaaaggaaaggggaaagggaaaggaaagggaaggaagtttctgcaggaaagggaaaaatggggtgagggtagtttttgctgtgctgaactatatacagaaaggagaggagaggggagggaaggggaggggagagaggtttctgcaggaaagggaaaaatggggtgagggtagtttctgctgtgctgaaatacatacattatatcccagccctgctttctccctagatgtttagtgtcacagatttctaggaagttctccttgatgtgactttcctcgctgtgctgcagtttcaagtctttttcttttactatattccttaatgtatcctggaaagagtctgttcacacccacccacctaaggctcttaacaaaaagactgtacttatattttggatcctgattttaaaaatcataagacatttttccagatattcatgaaattttatatggactgagtttgataattttgtctagcatgaaatgacattgtgcttatgcaagaaaatactcatacattttaaatttgtagggttaaaataacacgatgtctgggatttgcttttacatactttagccaaaacaaaaacaaaaacaacaactagtaaggataaacaaagcaaatgtggcaaggtgttgatagttgttggacctgggtggggcagatggaggtnnnnnnnnnnnnnnnnnnnnnnnnnnnnnnnnnnnnnnnnnnnnnnnnnnnnnnnnnnnnnnnnnnnnnnnnnnnnnnnnnnnnnnnnnnnnnnnnnnnnnnnnnnnnnnnnnnnnnnnnnnnnnnnnnnnnnnnnnnnnnnnnnnnnnnnnnnnnnnnnnnnnnnnnnnnnnnnnnnnnnnnnnnnnnnnnnnnnnnnnnnnnnnnnnnnnnnnnnnnnnnnnnnnnnnnnnnnnnnnnnnnnnnnnnnnnnnnnnnnnnnnnnnnnnnnnnnnnnnnnnnnnnnnnnnnnnnnnnnnnnnnnnnnnnnnnnnnnnnnnnnnnnnnnnnnnnnnnnnnnnnnnnnnnnnnnnnnnnnnnnnnnnnnnnnnnnnnnnnnnnnnnnnnnnnnnnnnnnnnnnnnnnnnnnnnnnnnnnnnnnnnnnnnnnnnnnnnnnnnnnnnnnnnnnnnnnnnnnnnnnnnnnnnnnnnnnnnnnnnnnnnnnnnnnnnnnnnnnnnnnnnnnnnnnnnnnnnnnnnnnnnnnnnnnnnnnnnnnnnnnnnnnnnnnnnnnnnnnnnnnnnnnnnnnnnnnnnnnnnnnnnnnnnnnnnnnnnnnnnnnnnnnnnnnnnnnnnnnnnnnnnnnnnnnnnnnnnnnnnnnnnnnnnnnnnnnnnnnnnnnnnnnnnnnnnnnnnnnnnnnnnnnnnnnnnnnnnnnnnnnnnnnnnnnnnnnnnnnnnnnnnnnnnnnnnnnnnnnnnnnnnnnnnnnnnnnnnnnnnnnnnnnnnnnnnnnnnnnnnnnnnnnnnnnnnnnnnnnnnnnnnnnnnnnnnnnnnnnnnnnnnnnnnnnnnnnnnnnnnnnnnnnnnnnnnnnnnnnnnnnnnnnnnnnnnnnnnnnnnnnnnnnnnnnnnnnnnnnnnnnnnnnnnnnnnnnnnnnnnnnnnnnnnnnnnnnnnnnnnnnnnnnnnnnnnnnnnnnnnnnnnnnnnnnnnnnnnnnnnnnnnnnnnnnnnnnnnnnnnnnnnnnnnnnnnnnnnnnnnnnnnnnnnnnnnnnnnnnnnnnnnnnnnnnnnnnnnnnnnnnnnnnnnnnnnnnnnnnnnnnnnnnnnnnnnnnnnnnnnnnnnnnnnnnnnnnnnnnnnnnnnnnnnnnnnnnnnnnnnnnnnnnnnnnnnnnnnnnnnnnnnnnnnnnnnnnnnnnnnnnnnnnnnnnnnnnnnnnnnnnnnnnnnnnnnnnnnnnnnnnnnnnnnnnnnnnnnnnnnnnnnnnnnnnnnnnnnnnnnnnnnnnnnnnnnnnnnnnnnnnnnnnnnnnnnnnnnnnnnnnnnnnnnnnnnnnnnnnnnnnnnnnnnnnnnnnnnnnnnnnnnnnnnnnnnnnnnnnnnnnnnnnnnnnnnnnnnnnnnnnnnnnnnnnnnnnnnnnnnnnnnnnnnnnnnnnnnnnnnnnnnnnnnnnnnnnnnnnnnnnnnnnnnnnnnnnnnnnnnnnnnnnnnnnnnnnnnnnnnnnnnnnnnnnnnnnnnnnnnnnnnnnnnnnnnnnnnnnnnnnnnnnnnnnnnnaatcgcttgaacccaggagacagaggttgcaatgagccgagatcatgccattgcactccagcctgggcaacaagagcgaaactccatctcaaaaaaaaaaaaaaaaaaatgcacttcgaatgtgagaatgaatggagtgacatgaatagagtgttatccctgagaaggaactgaaaggatcctagggcccttcatggcacattccttttagtacccagaaaccaggactggcttggtgtctcaaggcaactcagaaccaaagcctggaacaggcagctgtatccagagtggacagaagcccagagacttgactgctggagaggtaggaacttggaagttccaggggagggcatggtgggagtgggatgaggaaaaaagcaagctgaactgcatcgagtgtagcttgggaagaaaaggaggggaaacgtatacagggaggggaagcccaggagtcccagctaatgtagctttccttcccaggtggtcaagtgtccctcaaggtcagtaatgatgggcctacactgattggtgcaaatgcctccttctctattgccttgaacttccctggaagccaaaaggtattgccagatgggcaggttatctgggtcaacaataccatcatcaatggtgagtacttctctattctaggtccttattcctagggctcaggttccctggtatgcccagtgagctcagggaatgccccttccttctctacttttttttttttttcttttttgagacggagtctcgctctgtcgcccaggctggagtgcagtggcgcaatctcggctcactgcaagctctgcctcccgggttcacgccattctcctgcctcagcctcccgagtagctgggactacaggcgcctgccaccatgaccggctaattttttttgtatttttagtagagacagggtttcaccgtgttagccagtatagtctccatctcctgaccttgtgatccgcccgcctcggcctcccaaagttctgggattannnnnnnnnnnnnnnnnnnnnnnnnnnnnnnnnnnnnnnnnnnnnnnnnnnnnnnnnnnnnnnnnnnnnnnnnnnnnnnnnnnnnnnnnnnnnnnnnnnnnnnnnnnnnnnnnnnnnnnnnnnnnnnnnnnnnnnnnnnnnnnnnnnnnnnnnnnnnnnnnnnnnnnnnnnnnnnnnnnnnnnnnnnnnnnnnnnnnnnnnnnnnnnnnnnnnnnnnnnnnnnnnnnnnnnnnnnnnnnnnnnnnnnnnnnnnnnnnnnnnnnnnnnnnnnnnnnnnnnnnnnnnnnnnnnnnnnnnatttcaaaaaaaaaaaaaaaaaaaaaaacagaaagcaaaaagaaaagaaaattacagttgtagtccctgctacttagcagtctcaggtgggaggatcatgsgcctgggaggtcgagactgcatgatcacgccactgtacttcagcctgggtgacagagtgagaccctgtctcaaaaagaaaaaagaaaattacagtccctaaagtggaggacagcagaattcaggggacctagaagttgaacagacctatatttaaacttgtccttgatatgtgaccttgggcaagttacttgttttgtgtttccatttctttttttttcttttcttttcttttcttttctttttttttttttttgagacagagtctggctgtgtcgctcaggctggagtgcagtggcaggatctcagctcactgcaacctctgcctcctgggttcaagtgatccttccgcctcagcctcctgagtagctgggagtagcctcccgagtagctgatacaggcgcatgtcaccatgcccggctaattcttttgtatttttagtagagacggggtttcaccatgttatccaggatgactcaaactcctgagatcaagtgatctgcccacctcactgtgtttccatttccgaagataaaaggattgttgtaaggattagaatgtgataatatgtgtaaagtacttaatgtagtgtctgctctagcctacagtaaaggctaaataaatgctatctagtgctgttatttatttatgtatttatttttgagacagagtctcgctgtgtcgctcaggctggagtgcagtggtgcgatcttggctcactgcagcctccacctcccaggttccagcgattctcctgcctcagcctcctgggtagctgggattataggcttccgccagcacgcctggctaatttttgtatttttagtagagacagggttttaccatgttggccaggctggtcttgaactcctgacctcaggtgatttaaccgcttcagactcccaaagtgctaggattacaggtgtgagccactgcgcctggccccctagtgctgttatttttattccactagctagagcaaatcactctaaatattttgatatgtggctatatatatatacatatatcttctttttcttttatttttcttattttatttatttatttatttatttattttaaagtcggggtccttctctctnnnnnnnnnnnnnnnnnnnnnnnnnnnnnnnnnnnnnnnnnnnnnnnnnnnnnnnnnnnnnnnnnnnnnnnnnnnnnnnnnnnnnnnnnnnnnnnnnnnnnnnnnnnnnnnnnnnnnnnnnnnnnnnnnnnnnnnnnnnnnnnnnnnnnnnnnnnnnnnnnnnnnnnnnnnnnnnnnnnnnnnnnnnnnnnnnnnnnnnnnnnnnnnnnnnnnnnnnnnnnnnnnnnnnnnnnnnnnnnnnnnnnnnnnnnnnnnnnnnnnnnnnnnnnnnnnnnnnnnnnnnnnnnnnnnnnnnnnnnnnntgtaaacccagcacttcgggaggctgaggtgggaggattgcttaagcccaggagttcaagaccagtcctggcaatatagcaagaccctgtctctacaaaaaaataaaattagctgggtatggtggtgcatacctgtagtcccagctactcgggaggctgaggtgggaggattgcttgaccctgggaggttgacactccagtgagctgtgatcacaccactgcactccagcctgggcatcagactaagaccctgtctctaaaaaaaaaatgtagtttccacaccctcaacccccaactaccaccccaaatggttatatcatggagaatgtactttctagctagggaatattcccagagcccctctctgataccctgggagcaattttaggggttttgatatacaaaaaagaatgccagggtttgagagtgactctgtatttatctttcagggagccaggtgtggggaggacagccagtgtatccccaggaaactgacgatgcctgcatcttccctgatggtggaccttgcccatctggctcttggtctcagaagagaagctttgtttatgtctggaagacctggggtgagggactcccttctcagcctatcatccacacttgtgtttacttctytctacctgatcacctttcttttggccgccccttccaccttaacttctgtgattttctctaatcttcattttcctcttagatcttttctctttcttagcacctarcccccttcaactctatcataattctttctggcaactcttcctcaattgtagtcctaccccatggaatgcctcattaggaccccttccctgtccccccatatcacagccttccaaacaccctcagaagtaatcatacttcctgacctcccatctccagtgccgtttcraagcctgtccctcagtcccctttgaccagtaatctcttcttccttgcttttcattccaaaaacttcaggccaatactggcaagttctagggggcccagtgtctgggctgagcattgggacaggcagggcaatgctgggcacacacaccatggaagtgactgtctaccatcgccggggatcccggagctatgtgcctcttgctcattccagctcagccttcaccattactggtaagggtttaggaaggggcaaggccakttgtagggcaagagaaggcagggaggcttggatggactggaaaggagaaaggtgaaatgctgtgcaaacttaaagtagaagggccaggaagacctaggcagagaaatgtgaggcttagtgccagtgaagggccagccagtcagcttggagttggagggtgtggctgtgaaaggagaagctgtggctcaggcctggttctcaccttttctggctccaatcccagaccaggtgcctttctccgtgagcgtgtcccagttgcgggccttggatggagggaacaagcacttcctgagaaatcagcctctgacctttgccctccagctccatgacccyagtggctatctggctgaagctgacctctcctacacctgggactttggagacagtagtggaaccctgatctctcgggcacytgtggtcactcatacttacctggagcctggcccagtcactgcccaggtggtcctgcaggctgccattcctctcacctcctgtggctcctccccagttccaggcaccacagatgggcacaggccaactgcagaggcccmtaacaccacagctggccaagtgcctactacagaagttgtgggtactacacctggtcaggcgccaactgcagagccctctggaaccacatctgtgcaggtgccaaccactgaagtcataagcactgyayctgtgcagatgccaactgcagasagcacaggtatgacacctgagaaggtgccagtttcagaggtcatgggtaccacactggcagagatgtcaactccagaggctacaggtatgacacctgcagaggtatcaattgtggtgctttctggaaccacagctgcacaggtaacaactacagagtgggtggagaccacagctagagagctacctatccctgagcctgaaggtccagatgccagctcaatcatgtctacggaaagtattacaggtaagagtatcagtgcgaatgaggttcacggaggtggggtaccctactctactctgtaagtcttacccaggactcagatgttacccaatcctttgcttagcactatggtcccctcagagttctcactggcctggctataaagccctccagtctctcttaatgacatggaataggtctggagttcaggaaaccaaggtcttcccctaggccatgaggaaagagcttgttgctttctctactgctgagaacggttggcgagaccagggaacagactgtgatcatttatataatatttatagctcattttctgttcaagcataaatgcacgaaaatccttcccagattccgagatcctgatccttccatttcccaaccctggattcccatcccaaagcaaaaagggaggaatgaaacagtgatgcttaaatgagttaacacacgttgaatgtctagcctaggacctgacatagtgtggggtgtgataaacatttgaggattttttaaaactccaatgccacccctaactgtgactctggaggagtcattttcttyttctgggcctcagtttccttatctatagaataaggtttcccaggtcttatctgattccaagcctgtgactccagaatccagtaactctggttcaacctgaaaaaatgcctgcttggcctctgcctccagatgagtcatctgtctcttgatcttgcctccttgatcctctcctgccaggttccctgggccccctgctggatggtacagccaccttaaggctggtgaagagacaagtccccctggattgtgttctgtatcgatatggttccttttccgtcaccctggacattgtccgtgagtcttgcctactttggtggctgatggaggcagctgtgtgctacctakggctggtcagtggaagcacaccttgggaggaattactcacctagataggaagaatacccaaatgccagagtcctcatttgaaagcacagggatgggattggtggagcagccctggggcttttctgtctctgggcttttggggaggccaggtagaggaatcctaatttgataagcttgcaactctgcagagggtattgaaagtgccgagatcctgcaggctgtgccgtccggtgagggggatgcatttgagctgactgtgtcctgccaaggcgggtgagtgtctcactagtgtgctggtaactctttggttgactgtttctccgctctctggcatttagtgtcccttcccagatccccttatatatgctgacacttcttccaggctgcccaaggaagcctgcatggagatctcatcgccagggtgccagccccctgcccagcggctgtgccagcctgtgctacccagcccagcctgccagctggttctgcaccagatactgaagggtggctcggggacatactgcctcaatgtgtctctggctgataccaacagcctggcagtggtcagcacccagcttatcatgcctggtaggtccttggacaagagctaagatgaggaagggagtggatagagggcagctggcaagcagcagacactgagtgaagcagtgcctgggattcttctcacaggtcaagaagcaggccttgggcaggttccrctgatcgtgggcatcttgctggtgttgatggctgtggtccttgcatctctgatatataggtaagggcctcatcacacagctcagacccccttatcccttattatcactactcacttttcctcaaggggagaagaaaccacctctccctttgaggaagcatggtgtccaggaaagagcccaggcttttaagttagacagacttgggttgcagtcttgcttgtaggacctgggggaagtagcttaacctgtctaagcctctgaaaagtaggtaaactaatacttgccctgtggggctgttgtaaagattagaaacaatgagtaaagcacctggctctgaagcaagagtgcaataattgatattaatgactgttgttaataatatgaagagtgggggcagtttgggtaaactgagttttctttttttttttgagacggagtttcaccctttttgcccaggctggagtatagtggcataatctcagctcactgcaacctccaccttccagtttcaagcgattctcctgcttcagcttcccgagtagctgggatttcaggcacctgccaccacacctggctaatttttgtatttttagtaaagacagggtttcgccatgttggccaggctggtctcaaactcctgacctcrtgatctgcctaccttggcctcccaaagtgctgggattacaggcatgagccaccgtgcctggcctggggtgaactgagttttctacctgcaagaagggcagatcccccaggcctggggtggcatggtcctcaggcaggaaagcttacggggtgagggaggaatggacagaggttaccacagaaataagagagggtaaaccctggaggtgaggagaaggggaggaagctaggatcaaggctaagcagactgggatatgggtgtgttcccttctttggagaagcacagacaagctacctttgtccattgctaaccagtttaccccttctcccaatatcaggcgcagacttatgaagcaagacttctccgtaccccagttgccacatagcagcagtcactggctgcgtctaccccgcatcttctgctcttgtcccattggtgagaayagccccctcctcagtgggcagcaggtctgagtactctcatatgatgctgtgattttcctggagttgacagaaacacctatatttcccccagtcttccctgggagactactattaactgaaataaatactcagagcctgatgctggtttttctgttgcttcttgggagaatctacgtcatttaaggagtgaaggtataaaagaaggaagtgtaccacttacttagcagatcccaaaggggaaacacaagtcattttattcagatgaggcactttcaatgtatgtgttttggggtgtgtgtatgtgtgtgcgcatggggaacagtgaggtggtgcaggataataaatactgtgagggtgaaggaacactcccccaagctggcaggagtatgtggcagcaatgtacagagcctcgggagtagagtccagggacagggaggtgggttcaaggctggcttggaggccaagggtgtcccccttagctcaagaagccaaagaaattggtggagcgggggggtgggcccatgagcatgggcatctggttcttgtgggtgatcttgatctggaagggaagggagcacattcagaggcaggacctgatactttggggctgtggcttcagagatttagagggaaatctgtggggtttggggtgggttgctaggttcctagagaggccacgatagggaaaccaggggctgagaaatcagggtttaggatgaatgatgtgcaggggaagttcaggcatcagaagggtgtaaagaagctgtggaatggggatttaggatccatggagcccaagggtttaatttttggctgggatcgtcaatactcactgtacagggcgtctgcatccagggttctccgtcaatttgcatgggaagggtttttgtggtgctataggaggccaaggaacattggtgatttccttaccaatcgaataccaaaactctgcttcttaggttggctttgagaccttttgtcattgagggagatctagtaaagcccctccccaccattcccatgacccttctgctgccccagccccacaccttccctcagggaccctggtggagtcttccttactggaaggtgatctcagagcacttggccagccgacgtccagcattcttgagcttggtatagatttggcccatctcaattgcaccctccagcccaaccacttccagtctcttgtcacttaggtctggggacgaagtagggagtaaagttttacataaacagggtatccccatagggagtcacactttcccttcgtcctgcccactcagctcccaaggctgctcctctcacctggtacacaggttttcaggatatcagggtcggtgatgactttagctgtagcacctaaggcctggttgatcccatagatatccccatggggtctcctggtatcaccccagaggttggagccaccatgcatgctagggatgtttagcactgcgatgccttctagggacaggttgctcagatccagcggtttcccacagatctgagaggagggggcacagtcccagttagggagggtacagatcctcacctcatggcatgatcatagatgtgatcgctccctccaccagatgacaaactggagaaggcaggatttggaggtgtgcaaggaatggaaatagggactagtgtatcttgaggacttggagaattggggtaggagagctgggaggttaaagaagcataggttcaagaatatgggaagttcctaagggtgccatggagggagaaacttggctattaagaagctgaaaaggatgtagggttaagtcttattacacacacctcaactgtcaaagactcctccagctttttgcatgttgagaagatggattcagatgtggcaaattcgaagtaccatagcttgttcttcattctgtgtcagccccaacacaaggcccagtagggagggacaggttacacagtgctggcaggggtggtacgtgacagggaagggcatcaacctcctaactttagtcccatggggaacaagggtggctttggttggggggacctcctagaggtgccactgttcttctgagcaatctgagtcaaacttggtcaaaacctggctcctgacactgtgtatgcccacactgccccctcctttccctaacctgctgttgaacttctccggatatttctctcgcatgatgtggaatcgatgagcaatagaggcatcctggagagttcgggacatgaaggtcagtacagagctcaatctctccctcccggtctcccctctttcccaagtccccatgctgctccccacagcatgtcccaagatcttcccttgcaactcagcactgtactgcactcccaatttccctgtgtcacaggtcacttaacctccccctccttttctgctctcctccagcctctgactgcttggccccccctttctcccttctccccaggccccattccactgaccacgccaatagagaagtagttattgatgatttgaaaggggactgggtcacttttttcttcagtttgttgaggtatcacctccacagaccatcgatccatatgtaccactttactcatctctaaatccttgaggatctttgccagattctgtccttcataacctaggagtggagaagacaggttagcactgagctctgggtcccagagaggcctcttctcagctcccagctccacaaattcccaggggccttctgccctgtttctacagagcctcccagccctagccagtgacagggcagggtgcatggtcacagctcccatggacctttcctccatgctgtgtggagggtgaatgtttccaatgtgtgtggatatgcaaagatggtgccaacagtcatctggaaggttggagagaatagccaggagaatgctgaaaaagatgggtgacaaatggggataatcctctctcacccttgacccctgatgctttcactccccattcagacagaccacagtacaaagcaaccatgtgtaaacagtgttatacaggcagagtgaatgcaataaaaggttcaatagtaaagaatagagagcccccaaatagactcaagtatatatagaaatttagtatgtgatgtcatttcaaataaatggggaaaagacagattattcaataaatggtgctggggaaagggaggagcagcatgaaaaactacctactgggttctatgctcgctacctgcatgatgtgaccatccataccccaaacatcccaaagtgctgggattacaggccactgcgcctggccagaatttgtactagaagaaaacattagtaaatgtttttataatctttgaatggatacaaaactagaagcccaaaagaaaaagatagataaatataattatattaaaatttaaaactagacggacatggtagcctctataatcccagctacatggcaggaggattgctcaaacccaggagttcgagaccagcctggccaacatagtgagaccccatctcaaaaaacaaacaaacaaggccaggcacagtggctcactcctgtagtcccagcactttgggaggctgaggcgggtgatcccttgagaccaggagtttgagaccagcctggacaatatggcaaaacctcatctctacaacaaatataaaaattggccaggtatcagtggctcacacctgtaatcccagtactttgggaggccgaggcgggcggatcacgaggtcaggagatcgagaccatcctggctaacatggtgaaaccctgtctctactaaaaatacaaaaaattagccaggcgtggtggtgggcacctatagtcccagctactcaggaggctgaggcaggagaatggcgtgaacccaggaggtggagcttgcagtgagccgagattgcgccactgcactccagcctgggtgacagagcaagactccgtctcaaaaaataaaaaataaaataaaataaaataaaataaaaattagccaggtgtaggccgggcgcgatggctgatgcctgtaatcccagcattttgggaggccgaggagggcagatcaccaggtcaggagtttcagaccagcctggccaacatggtgaaaccccatctctataaaaatacaaaaaatcagcaaggcgtggtggcggacacctgcaatcccagctacttgggaggctgaggcaggagaatcgcttgaacccatgaggcggaggttgcagtgagctgagattgcgccactgcactccagcctgggcaacaagagtgaaactctgtctcaaaaaaaaaaaaaattagccaggtgtggtggcatgtgactgtagtccaggctaccctgaggtgggaggattgcatgagcctaggagttcgaggctgtggtgagctgtgagctcaccactgtactccagcatgagcagcagagcaagactatctcaaaacaaagaaagaaacaaaaaacaaaaaaggaaaaatgtgcaaataatacaaacaagcctatgatagaagaaaaaatacaaatggccaatatgcataggaaaggtgctcagtattactaacaatttcaagaaccataattaaaacaattagctaacttttgttgcatatcaggttggcaaagtataaggagattcagaaaaccaaatgctaatgagtttatgaataaattggcattctcatttgctgttagctacagcatgacttgataagtcatttttggaaagcattttggcaaattttatcaaaatgttatccaattttatcaaaacatatttttcgctgggtgccatggctcatgcctataatcccagcactttgggaggccgaggtgggcagatcacctaaggtcaggagttcgagatcaacctggccaacatggtgaaaccctgtctctgctaaaaatacaaaaattagctgggcatggtggtgggtgcccataatcccagctattcaggaggctgagacagggagaatcgcttgaggccgggaggcagaggttgcagggagctgagatcgtgccattgtactccagcctgggtgacagagtgagactccgtctcaaaaaaaaaaaaatgtctgtttatgcatatgtgtgtgtgtgtgtgtgcatgcatgtaaaaacagaaaaatgactgtaaataggaaacaatgtttatctctgaggaggtacatggagttttgtggggagtctttaaatctttacggtgacaacgtactgatgacttatttatgtaagtttttcttttttttttttgagatggagtccggctctgttgcccaaactagagtgcagtggcatgatctcagctcannnnnnnnnnnnnnnnnnnnnnnnnnnnnnnnnnnnncagcctcccaagtagctgggattacaggcgtgtgccaccaggcccagctaattttttgtatttttagtagagacagggtttcaccatgttagccaggatggtctcgatctcctgacctcgtgatccacccaccttggcctcccaaagtgctgggattacaggcgtgagccactgcgcccagcccatttgtgtaattttttttttttttgagacaggatcttgctctcttgcccaagctggagtgcactggctcactgcagcctcaacctgccaggctcaagctatcctcctacctcagcctcctgagtatctggaaccacaagcgtgtgccaccatgcctggttaattattttatttttcatagagatgaggtctcactgtgtagcccaggatggtctcaatctcctgggctcaagcgatcctccagccttggcctcccaaagtgctgggattacaggtgtgagccaccatgttcagctatttgaatagttttttaaaaagaaaataccttttttttttttttcgagatggagtctagctctgtcgtccaggctgaagtgcagtggcatgatctcggctcactgcaacctccgcctcctgggttcaagcgattactcctgcctcagcctactgagtagctgggattacaggtgcctgccaccacacccagctgatttttgtatttttagtagagacggggtttcaccattttggccaggctggtcttgaagtcctgacctcatgatccacccgccttggcctacccaaagtgctgggattacaggcatgagccannnnnnnnnnnnnnnnnnnnnnnnnnnnnnnnnn

SEQ ID NO: 97812 - DNA, 13859 bp, Homo sapiens
cctctctagtgatttcattgtggatgaatggagatgcagtcctcaggaactaggtgactatccatctctgcttccaccatacagaatctctatcccagccccctactcagaatgccaggtcagcatgtaacccagctccattgtgtggacagtttcagcaggacaaaggccccagcatagcacaagccagcccagcagcccctttggctagctcctgaggccctccccaccccctgcccttctccctctttctctggttatgctttgctgactgctgactactggcaaagtccagaacaatcaccaagcactgagtgcatcatctttctcccatccatagttaagggatccaattagcacttggatcaggccaggattcccacaaattagaaatggggtaatccaagaaatcaagtaataaagagattagcccaccttgcctcctcctttcttttcctagggagtcagatacaacttcaagccaagcagaccggtgctcactatggtcaggttctgttctaagcattttatatttatctcatgtattggtattttttagggttgtaccttccgtttattccctacttaccctataccctctctttggatgacctcatctacatctacatccacttcatccttgagatgcatatccatatatctatagaacatttcatttagcctgtccaaaactgaactgattatcttctcatccaaacatgcttctccttctgcattcccttattaagtcagaaagtcagaaacttatgaatcagctttgacaccttccctcatcctctcacttccatctaatgtcaccaaagctccaagaattctacctctcagttaactgagtctgcaccacatttcacctgagaactttagtggtctcagaccctgtttgtccctgtttctagtctcgtcccttccaattcattctccatattgctgccagctttatctttatatggtacccataatttgtaacttctctgtgttcccttcaacagttcctgaatgcctgaaagacagtctaaactccttctcatggcatgtaagccacttcatcatccagcctcaagttttccaactgctttccttgtctccccaacatgagactctggcaatattgtgttccttgtggttccttccaatactctgttctaaatttcataacccagtgcgttagtctaagctgttcctgttgcctcaatgtctttcccgttttgtctgttaagtaaaattctatcatattctaattattttgcatttaagttaagaattataggctgggtgtggtcagcactttgggaggctgaggtgggcggatcactggatgccaggagttcgagaccagcctgggcaacatggtgaaaccccgtctctactaaaaatacagccaggcatggtggtgcgcatctgtgatcccaactacttgggtggctgaggtaggagaactgcttgaacccaggaggcggcgtttgcagtgagctgaactgcactgcagcctgggtgacagagcgagaatctgtttaaaaaaaaaaaagaattataattacaatgagcaacgaggcagctaaatcatctgaatgaggaaggtgagtttatcaaatgaatggtcagcctgtaaaaggtaaataatacaagagatgacaagcaaggctattccctgaataaggaataaagtaatggatgtgtcttaagtgacggtgtgagggatgtgtagtgattgcttcagctctcacaggaaccaaaggggaaatcctacagaaacacaatcctggaaccttcccattactaccaaaatgcaaagtattgacagagcaggactttgctgaaggaaatctctaagctctcttctcacgttatttagctgactgaaaagtctgggccatgctgacccctggtggagacaatgggccactgcactccaaactggtggcgaggccgggcgggaggccaagacgggtagatcgcttgaggaaaggggttcaagatcagcctggccaacacggtgaaaccccgtctctattaaaaatacaaaaaattagccaggcatggtggtgcatgcctgtagtcccagctactcgggaggctgaggcaggagaatcacttgaacctgggaggcggaggttgcagtgagttgagatcacgccactgaactccagcctgggtgacagagccagactctgtctcaaaagaaaaaaaaaaaactggtggagagaatgagccactgcagtccaaaaaatatgggaacaaaactttttttttttttttttttttttttttaagacagggtctcacttcgttgcccaggctcactgtagcctcgacctcctgggctcaagcaatcctcgtgcctcagcttcccaattagctgggactacagccgtgcaccaccacacctggctaattctaaaatttattttgtagagatacggtctccctatgttgcccaggctggtctcgaactcctgggctcaagtgatcctctcacctcagcctcccaaagtgctgggattacaggcatgagctaccatgcccaaccaccctctccttttatactcattcgttttaatgagcacatattctgtggtaaagggaacactaaggccctggggcaaagagaacacagtatttaatcacctttcttaagaattcatgacctaagccgggagtggtggctcatgcctataatcccagcactttgggagactgaggcaggtggatcacaaggtcgggagttcaagaacagcctgaccaagatggtgaaacccccatctctactaaaaatacaaaaaaattagccaggtgtggtggcaggtgcacgtaatcccagctattcaggaggctgaggcaagagaatcgcttgaacctgggaggcggaggttgcagtgagccaagatcacaccacggcacttgagcctgggcaacacagtgagactctgtctcagaaaaaaaaaaaaaggattcacaacctaatgggtgatataggtttcactcagcagcactggggagaatggagacaagttagacggctgatgcagttgacagtgggggctggtaggagtagggggaatgtgatagggattcagtgacaatcagatatgtgagaggagacagacaagccaaggactccatggtttctgggcaactggctgaatatgggttgcaattcatgagattccctcacttgcttaaccatttctgcttttcaagccataggtatggcttttgggaagtctcttcccaccactctcaaatatactaaatcagaggtttctcctttgtttcctgagcatcctgtatgacttcaatcatggcacctagtgaattatactgcaatggccctgtgaactcttgaagaaatcatgttttgtgaaaacgaacaaagaaggtaggcagtagtcatatcatgtaaagccttgtgaccatgtaagggaatttgaggcaggcacattaacagatttaagcagggaggttgcatgtctgactgtaatgccgacattgaattagaagcagacagatagaagctggcagatcagcttagaagctactcacatttctacattgaaatgagaaagccttgtccaggcgcggtggctcatgcctgtaatcccagaactttgggaggcagaggcgggcagatcacctgaggtcaggagtttgagacaagcctggccaacatggcaaaactctgtctctactaaaaatacaaaaattagcagggcgtggtggtgggcgcctgtagtcccaactacttaggaggctgaggcaggagaattgcttgaacctgggcagtggaggttgcagtgagccgagattctgccactgcactccagcctgggtgacagagtgagactcagtctcaataaaaaaaataataaaataaaataaataaataaaagaaatgagaaagccttaaggccaaggatgacagtggcctgaactagggccatgtgcatcattcaaggcagttaccactctgggagaggaggaagaatttttggttagttatttaggcttttaaatatctaggccagaagccaggtgtggtggctcacacctgtaatcccagcactttgggaagctaaggtgggtggatcacttgaggtcaggagttcgagaccagcctggccaacatggtgaaaccctgtctctactaaaaatacaaaaattaggccaggtgcagtggctcacgtctgtaatcccagcactttgggaggctgagatgggtggatcacctgaggtcaggagtttgagaccagcctgaccaatatggtgaaacccgtctctactaaaaatacaaaaattagccggacgtagtggcatgcgcctgtagtcccagctactcaggaggctgagacaagagaattgcttgaacccgggaggcggaggttacagtgagccaaggttgcgccactgcactccagcctgggcaacagagtgagactcagtctcaaaaaaaaattagccaggtgtggttggtgggcatctgtaattccagctactcaggaggctgagacaggaaaattgcttgaactccagaggcagaggctgcagttagccaagatcaaaccactgcactccagcctgggtgatagagtgacactccgtctcagaatatacattttaaaaatatatatctaaaatccttttttgaggggtaggaggatggaggtgggatgtatgttgctattgcactggccagcagaaccttgagaagtggactgattaaaaaaatgtaggcctggcatagtggctaacacctgtaatcacagcactttgggaggcaaaggtgggaggatggcttgagcccgagaattcgagaacaacttggtcaacaaagcgaaacccccgtttctacaaaaaagttaacggggcatggtgcgtgcacatgtggtcccagctacatgggaggctgaagcaggaagatcgcttgtgcctcggagatgaaggttgcagtgagctgtgtttgcgccactgtgctgcatgcagcctgggtgacagaatgagaccctgtctcaaaaaataaaataaaatggaatgcagatcgaaatgttcaatataggctgtccatagtctcctacctcataccctgaaccaaaatattgctactcttggttaagttcagaaaactgaatgctgagttaaaccatccgttcctagccttgaacatacaaaaccaacattaacagtatttatgtatttactattaattataaacaactgtgaattacccaatggttgctatttgccaatatatatctagattaattattattattttttgagatggagtcttgctctgtcaccaggctggagtgcagtggcagaatctcggctcactgcaacctcccactccctggttcaagcgattctcctgcctcagcctcccgggtagctgggattacaggcgcgcgccaccacgcccggctaatttttgtacttttggtagaggcggggtttcaccatattggccaggatggtcttgatctcctgacctcgtgatccgcctgcctcggcctcccaaagtgctgagattgcaggcgtgagccaccgcgcccggcctagattattctcacttaattattactaaggtctgtatataatttctattttataaattagaacactaaggctcagaaaagtggagtgagttgcccaaactcacacagtgaagccgggatcaaagctaattacagtactgtctaattttaaaatctatacttctaagcatctggctacactatatctctaaaagttttacgtagttcaaatgtgagcagcgttcgtctacgcagaaaaactgaataagcagcattaaccgcgggcagaaacagaacagaaaccactaccttggcggccgcccgcccccgggcgtcgcctacgtcataacactgcgcggccgcccctcgcgcaccacgtgctaggggagcgggcgggcagatggctgtgtctgtaagcgggaggcgtgcccggttcatccaaggcgcaagatggcgctgctttttgcacgttctttgcgcttgtgccgctggggagccaaacgattgggagttgcctccacagaggcccagagaggtaggattatctctttttactcttttacctccagaatggctgccgtctattattcccagaccccactccgagaagcaactccaaccctctcgggtcttttccttccccacctgccttggtcttaagattccaaacctgtgataccatttggtttctttaaattccgggacttactcaatccgagtttttcagctccgtgagctatccgtagtaaagcgacctcgcgactctcttgcccgcttggcattctgactcttccctagttgctcgtgtatcatggctgcctgcctcatatctgaatatatcaccagccctagggttctagcccctgttattatcccgtctttttgctctgcccgcaggcgtcagtttcaaactggaagaaaaaaccgcccacagcagcctggcactcttcagagatgataygggtgtcaaatatggcttggtgggattggagcccaccaaggtggccttgaatgtggagcgcttccgggagtgggcagtggtgctggcagacacagcggtcaccagtggcagacactactgggaagtgacagtgaagcgctcccagcagttccggataggagtggcagatgtggacatgtcccgggatagctgcattggtgttgatgatcgttcctgggtgttcacctatgcccagcgcaagtggtacaccatgttggccaacgagaaagccccagttgagggtattgggcagccagagaaggtggggctgttgctggagtatgaggcccagaagctgagcctggtggatgtgagccaggtctctgtggttcacacgctacagacagatttccggggtccagtggtgcctgcctttgctctctgggatggggagctgctgacccattcagggcttgaggtgcccgagggcctctagtatgtccattactggagtccctaatcacgcctttggccagcctccttttgaaagtgtccgaagcctttttactttgcctcaagcaacctctagctcccacaattcagtgttgggtcctctgtgcaatatcatgatcatcttcctcatcccctaycttgtgaaagctaggcatacagccaaaccctccttttccccacccaccaactactgccaatttcctaggctaccatgggtgtatcttccttgacctgcttccttcagtccctctgcctccctttgcccaggcctttctcagactgtattccatcctggggtcttatcattcagctttgtttgaatttattaatcaccatgatacctctccctccctttgtccacatgtaacttgttcttggggctctaccagatsgctgaagagtaaatcctttctacctctggctgaaggagtggtgcagtcaatgacttggccctttttctacagcacatttagagtttgggctctggctccctcagtaagtgctttattaactcagtgtgtcaaaatgaaaacagagccctccttccccagtagctcagtgccacagaccttcagccccacacagctgtagctatccttaccctgagtccatctaccttaaatctgtacctctgacacccagccagtctgtcataatcattatcccagttataaccttgaccaaaggggaagagagacacttgggggatatctaggggatgagtgctagaaactatttatttatttttgagacagagtctcactctgtcacccaggctggagtgcagtggcatgatcttggctcactgcaaactctgccttttgggttcaagcgactctcgtgcctcagcctcctgagtagctaggattacaggtgtgtgccaccatgcccgtctcatttttatatttttagtagagatggggttttgccatattggccaggctggtctcgaactcctggcctcatgtgatcagcccaccttggcctcccaaagtgctgggatttcaggcgtgagccaccacacccggccaaaactgtttattcttgagaagttccatcttcatttctgccacagttggaacttcccgaggaaggaaggaggcctgaggttttgcacaatctgtttcagagcctgtttagactcaaacctatgcttcccttggcagcagaatacacttaacctaaagcagtatttggagttgagaaaaacctggtggggtaagtgaatatgtactgtttggtagggtaggtagagaagctgtgctttgaccctgtgattccatctttttctaccttctatgatggtgatgaagctagatacccctagggaagaaagaaggactgggtttagcaaaaatgatttggtaattaaagtttatttgaacacaaaatactttctctgtctataaaattggctgttagcagtagcagcagcatgtcctggccaaggggagtagatttctccagactactaaagccatgtatatagccattcccacttcccatattctgtggatatgtacatgtgcatggtagctagagtccctccaccagagtatctctctcatgatggtttcttcagggagaggaagaggagacctgggtgaagagctgggatggttttgagtggggcaagccattaggctgtaccttgaagcccagtctctctggatagctgtactgcaggtgtcctctgaggcccttctctgtactctgtctgctgagggaatggggtattttgactcccatagaaagcactagcctaagtcaccaaatgactgcttggtccccactgaagcagtgtagctctccatagtatttttggtggttatggattacatgtgtggccagctcatgctttttcttgagcaggggctgtccatgacctgtgctcataccatgctttctaagttctctttggacagggcctcagctgctgcctcagcctgagtttcagagagtgtgtaggagtcctggtaatcttgaagcagtttgaccacctccagatggttgaactgcacagcatcatccaggggaatgttgccccacctgagaggaataatgatatgatcaggcaaaggagacgtggagagtggtggttgtatatatttgcatggtggctggagggtaggtggagaagctgtgcccaccctcctccacttttagcctattcctcacctgtccttggcaaaaggattcactttgcaagcctcgatcaggaatttaacaacttcgatgtgtcctaggaatatgggcagaaggaaaatgagaaggcgcaggtcttgaaccctttggtgcagacacttagccactgaagtctttaccaagaggggaggggaaaaggcctcttcccattttgtaccctgcagcactcagtcatagtctagctgcaaaccgaagggtgtctagataaaactagttgctgcccctataaccttgagggcacatataatgaaggtacttttggtgaaaaagaaagggtcttatgattaccctcctcctcccctccttaacccttcagtaccttcagctgcagcaacatgcagagctgtgcgcgagtcatagtctttctgttccatatccatggctgacaaggcaaacctgagggtagtgggaaagcagctagagttgcctagatcagactggaatcacaggtgttctttgtgaactggtgtcagactggatgagtttcagagaaagtgaaacagcctatagccagatttgttggctctgaataatcttttttccatatccagatgagactgttatactcatattagagagatgggaatgtgatccttccagaaatatcactcactgcctacctgtggtaagtgcccatttgaggcagggtacctacttcctaggacactgctcttaacactcaataacaatggctaacattaattatcatagagcagacagtttactttttttaaaaaaaatctccttttttaaaaaaatttcatttaaatgcaatctatatccattctaattccaaagctgaagcacttaactattttgttacgctgcctcctagtaaaatctctgaccaggagtattttattgtgtatatttggtcacagtagcattaccttcgaagagctgagacatcgccactataggcagcaaataacaggttgaccacagtcttgttctggaacacaaatcatacccacatgacattaattgaactcacctatgccagctgtgccctgtgaccctcctccatggatgcttagtccaagggtattgctgaagtgttatggaatgtgctactctgaaatattcttttttttttttttttttttgagacggagtctcgctctgtcgttcaggctgaagtgtagtggcgcgcggtcttggctcactgcaacctctgcctcccggtttcaagcgattctcctgcctcagcctcccaagtagctgggaccacaggcgcgtgccaccacgtctggctaattttttgtattttcaatagagaccaggtttcaccgtgttagccaggatggtcttgatctcctgaccttgtgatccgcccgccttggcctctcaaagtgcagggattacaggcgtgagccaccgcacctggcctttgaaatattcttacaagccacctggagttttccttacccgaatttctgccccttcacgccgtgggtctaacttccgagcacagtgcctcaggttgtcatagttgtggaaattgaagagagacaccaacttctagaattgtaagccaaatatattgtttatttactccttacacttagtaggagctcaaaattgctttattatagtaaaagtggtaccattaaacaaatttattgcttcaaaaatagtaagtactatatgcaaagcatctcacctggcagaagctggtccccctatggctgttccccagcttgtccaatgggggtgacaggcacatcattcccatgacattgggtaccaccaggaggatggctcctgatacagctgacttggctggcaggcccacctggggaacagaactgaagctgaggataaagtgggtgtgccccaaatcagaaaataaacaagttaggctgtactcttaacaagtttacaaatgactgcatgaccacaatccacctcaaccttttggcttgttaattagcttcttttattactcctgtcctttccttcccttaaattcattgattcagctagaaaatattttttgaaatacttacagcattctgtgctagatgctgtgctagaactaggaacttccattctggtgttaggagataggtaataaacaggtaaataaatagacacgtaatttttaaagtaattgtgataaatagtgagaagtagggtgctgtaaatagaggtagaggggggccacatgagatagggtggtcagaaaagtctttctttggaaatgacatctaagctgagaccccaaggagaagagccagcaatgtgaagcacaattcaggagctgcaacacctctggttgtttttctttttcttttttttttttttttgagatggagttttgctcttgttgcccaggctacagtgcaatggcacaatctcggctcagtgcaacctctgcctcccaggttcaagcacttctgcctcagcctcccaagtagctgggattacaggtgcacaccaccacccccggctaattttttgtatttagtagagatggggtttcaccatgtaggtcaggctggtctcgaactcctgacctcaggtgatccacctgcctcggcctcccaaagacatctctttatatattcgaggaacttggtgtttttgagaaactcgtctaaggagtctcaacctaattgccttcctggaagttagtgaatgagaggcaggaacaagcttccacctctatcttgagagagtcagtgttctctcttcttagcactgggctcatgacagatggatagcagagccagaaactcacgtggaaggcaaactggccagagaagtcatacatgccgcaggaatgcatgaggctgagggtgttgcgcactgcttcagcactcagcacactctcgcctgtgatggggcagatcccaccgttggcgagggtggctgccatgacactgcctgattcacaagtgacctccacagaacacagctatgaaaacaaagaataggtgaagatgtgacgtgaacctgcacatgggaccctcgggtgtagggaaagggcaagggcaaggacagtctgtcctgttccctcggccctgagcagtgttttcttacctggaagtagagatcaagggcagccatcatgtccacccccttaggaaagcactgcaaggaagagaggggagagcatttctcttcaggacatcagccctttcacactgtcagggtctcagctgaagcccccaacccctactgcccttccactagcagcagaattcccagggactttctcttccggcctcttctggttaccttcttttccttgagataatagccgatggcataattccgatcccctgtttccttctctgactggaatctgaagcaaacacccaatttagtacttgaagttggaggagtgggtgttgggagaaggggaaaaattaccttccctggagagacagaactacatcacaccacaaactaaatgaacccctttataacttctcacagtaatattagaggaaatttctgaacctgagcaaacactcagcatagttttgttataaagtaaacccaaaccaaacaccccaaactgtctagtcatctaggaaaactggtgaagtttttggctttgaaagtcttggcaagaaagggcttaggcacaaaccatcacactgcctctctcattatgtactaattagaaatggaacaaattattttacaagataaacaaatgtttatgaagggactcagaggaagctggagggccaaagttcccctgggatttcttcctcctaagattctctctcccccattcctcttgtccccatcctaagtacacacacatacaccacaatgctttcagtcagtcctctgagtagggacttacgtggcattgctgaaacccatgtattcattcccagccattttgttgagatactgcaacacctggaagagaaaaagggacattgaggctccacttggttaagaagctctattaatacctcacaggttgactagcccttctgaactcaggtcttgtcaagaggctttcctctcttgaggccagcagatttccacatttctggaaataaggcttctagtatgggctggtgcacctggtagtggggttagagagccactggggcagctggagaggacagcatgccatggcgaaatgcagccaggggctaagtagcaagggaacttacaaaatcaaacttctctgctttgttacagtccatctgcagagaaagagagagatgtcagcattctaagtgtaggaggatgacagagggaagggtcagaaggatctagtggagttctagtgttagtctggtcctgctgctgcaaatgtgttcaattttataatggccctttttttatccttctgaaaacaccgcacttccattggctcctctctttctctttcttttttttgagacagtcttgctttgtcacccaggctggagtgcagtggcacgatcatggctcactgcagctttgacctcccaggctcaagcgatcctcccacttcagcctccaagtagctcggattacaggcatgagccagcttgctgggccatcccacttccattctcaatccaaaccctcatccctgactcccacgttcattttcctgactcgaatcctgtctcctagccccaccctatccctgatctccatccccattccttacaccccatgctggagcttta

SEQ ID NO: 97813 - DNA, 15789 bp, Homo sapiens
agctccagaatatcagtatagagaaacaggcatttaatatttgatgactgatgatgatgatgaagcagcagcagaaaccaaaggtagcaaaggatcaaatggatatgggtgttgggacttggctattgggtatgatgggccttccaggaagggctaaactaggatatggcccagaggataaggaggaggggcatacatggtatccattgcccaaaataactctaggtaacctgaggaattggagtcaggggttcagctggggtcacgtgcccggttctggctaggggatggaggtgaacaagagaggttgccagcctggttctctgggcaattggagggaggaggacgggctagaagagttatttttaatattatttagagcatcaaaagaggatttcccagtaggaaaaaaagggatttgatgtagggaacactgatactttcagggctcagggagacacacagggtatgggaggaggaggccagaagtggtgataaaaccttcttatatggacagtccttctggattgaactacaagcattcatatttgggtaactctagacagatggctgcctatttttaagcctcagttttccttcttctgactaaatgtgaggactcacccgatgtacagccctgtactaattggtcgggaggtcaaaaattagaagtaatggtgtctctttatgaggagcttataacttagtagatgaacatacatatacatgtgaaacaactacagaatataggatacatgctagattacatggcattatgtgttcagagtaatgttgaaggaagggttcagtcaagagggtcttcctggaggaggtgtgttttgagtcagtacttgaaggaagttattgatgtagaatggtggagacatgggaagaaatcggttgtttcaagtatagggactaaactaggaaagtttaaatggcagtaattagttaaaccaattagtaggggacaataagcaaattggcttggtaggcctattggaccttggggattctgtagcagtcaacttggttaaggcagagtgataatgaggtcacagttcagttatgtatccctgttaatttctgtcttttaaccaaccagatccttactcctcattcaaagcagctgtctcacatgtataagcccttagtcagaggcgggtggggctggacaagacagtggaattcgaaagagtaaatctgtcctttaaggtcatgtgcccatctgaaggtggctccagattaccatttgtgaactggaaggaggcactgtactacagtagtggaaaggaggactgggggatgtggacattttaacagactctctctggagtgcagaggcgaaaagaagagatgttaggaaagaaaataagtgagatcatcacccaacttggggtatcacggaagaggataaacggaaaggtggcggccgggcacggtggctcatgcctgtaatcccagcactttgggaggccaagcaggtggatcacctgaggttgggagttcaagaccagcctgatcaacatggagaaaccccgtctctactaaaaatacaaaattagccgggtgtggtggtgcatgcctgtaatcccaactacttgggaggctgaggtaggagaatcgcttgaacctaggaggctgaggttgcagtgagccgagatcgcgccattgcactccggcatgggcaacaagagtgaaactctgtctcaaaattaaaaaaaaaaaaaattaaaaaaaaaaagaaaagttgacaaaacacatttatagtccaggcatggtggctcatgcctgtaatcccagcactttggaaggccaacgtggacatattgcttgagttcaggagtttgagaccaacctgggcaagaagatgaaaccctgtctctaccaaaaatgtggtagtgtgcccctgtggtcgcagctatttgggaggctgaggtgggaatatcacttgaacctggaaggcagaggttgcagtgagccgagattacaccaatgcactccaatctgggtgacagagtgagacccccgtctcaaaaattaaatagataaataataaaacatattcatttggtcaataattattttgaattggtagtactaactgctatagaggtagaacagcttattaaaaatgggttttgatgatcacccaatggctcttgcttacttgaaatccagagaagatgggctcaaactttttttttgagacggagttttgctcttgttgcccaggctggagtgcaatggcgccatctaggctcaccgcaacctctacctctggggttcaagtgattctcctacctcagcctcccgagtagctgggattacaggcatgcaccaccacgcccggctaattttgtatttttagtagagatgaggtctctccttgttggtcaggctggtcttgaactcccaacctcaggtgatccacctgcttggcctcccaaagtgctgggattacaggtgcgaaccatctcgccccgcattttttttttttttttttttgagacagagtctccgtctgtcccccaggctggagtgcagtggcacaatatccactcactgcaacctctgcctcccgggctcaagtgattctctgccacagcctcccgagtagctgggactataggtgcgtaccaccacatctggctttttgttttgttttgttttgtttttgaaacggagtctcgctgtgtcgcccaggctagactgcagtggcgtgatctcggcctactgcaacctccgcctcccaggttcaggccattctcctgcctcaacctcagcctcctgagtagccaggactacaggcgcccgccaccatgcccagctaattttttgtatttttagtagagacagggtttcaccatgttagccaggatggtctccatctcctgacctcgtgatccacccgccttggcctcccaaagtgctgggattacaggcagtgagccactgcgcccggacatgttttgtattttttgtagaaatgggtttttgccacgttggccaggatggttttgatctcctgacctcatgatccgcctgccttggcctcccaaagtgctgggattacaggtgtgagccaccgtgcccggcccaagagctaccctgtttctagaccagatgtctcttccagattagttggacaagaattgcaacacagtctttttttgtttttgtttttgtttttctgagacagggtctcactcccgtcacacagactggagtgcagtggtgcaatcacggctcactgcagcctcaacctcctgggcccaggtgatccaactcagactcccaagtagctgggattacaggcatgtgccaccatgcctggctaaatttttttgtattttttgtagagacaaggtttcaccatattgcccaggctggtctcaaactcccgggctcgggtgatccaccaaccttcacctcccaaagtgctgcaattacagatatgagccaccatgcctggctacaacacagtctttatttactttatcccctgcccctctgcataaccaccacacacaacacttctcagggaaagatttcctgaaagtggagagcttgactgaagatttagaaagcaagcagaggaaaggcttgtactgtaatagcatgaatttcttaaaactcaacagcaggcaccaccattctcttgcacccacctagttctagtctctctttttttttcttttttatttttggagagacaagttctcactatgttgcccaggctggtcttgaactcctggcctcaagtgatcctcccacctcagcctcccaaagtgctgggattacaggcatgagccactgcacttagcccaatctctttctaattgttgatttctttcttcccttcctttttttcttttgtttgcctgactttttttttttttttttttgagatggagtcttgcactgctgcccaggctggagtgcagtggtgcgatcttggctcactgcaagctccgctccccgggttcatgccattctcctgcctcggcctcctgagtagctgggactacaggtacccaccaccacgcccggctaattttttgtatttttagtagagatgcagtttcaccctgttagccaggatggtctcgatctcctgacctcgtgatccacccacctcggcctcccaaagtgctgagattacaggcatgagccaccgcacctggcccacctgacttttatcaagagcattttttctctttcttgctcgcttgctttcttttcttttctttctttccttttttttttttttttttttttttgagatggagtcttgctctgttgctcaggctggagtgcagtggcacaatctcagctcactccaacttccgcctcctgggttcaagcgattctcctgcctcagcctcccgagtagctgggattagaggcgcccgccaccatacctggctaatttttgtatttttagtagagataaggtctcactatgttggccaggctggtcttgaactcctgacctcaagtgatctgcccgcctcagcctcccaaagtgctgggattacagacgtgagccaccatgcctagccaagagcattttttttttctccttgaatcatgaaaagtagtatagtggtatttaattgcgtgggtttctgtccatgaggtctcactcttcatcaagcgcacacttttcaaacaaagatggttctctgtcctaagaatatctggttcttcctacctcgacttctttctataaatattaaaggtaaaaactatgcagtcttagcccagagcttggaatgttaatctcctttcccaaaaatgtagaacacagcactaaccacttgtggaagctacaaagatgaacagtgcttctaactataaacaaggccgaatatgataaaggctctgtgatgattgagtgtcaacttgattggattgaaggaggcaaagtgttgttcctgagtgtctgtgagggtgttgccaaaggagattaacatttaagtcagtggactggaaggaagtgacccagtctcaatggtgggcaccatccaatccgctgccagcgacgctagaaaaagtaggcagggctaggcatggtggctaacacctgtaatcccagcactttgggaagccgagacgggtggatcacctgaggtcaggagttcgagaccagcctggccaacatggcgaaaccccatctctactaaaaatacaaaaattagctgggcatggtggcgcatgcctgtaatcccaggtactggggaggggggcggggcgggggtggtgaggcaggaggatcgcttgaacctgggaggccaaggttgcagtgagctgagatcgtgccactgcactccagtctgggcaacagagcgagactccgtctcataaataaataaataaataaataaataaataaataaataaaagtaaaagtaggtggaagaagctgacttgctgaagtcttccggccttcgtctttctctcatgctggatgcttcctgccctcgaacatcagactccaagttcttcagcttttggactcttggacttacaccagtggtttgccaagggctctcggggctttggccacagactgaaggctgcactgccggcttccctacttttgaggttttgggccttggactgatccaccactggcctccttgctcctcaacttgcagacggcctaatgtgagactttaccttgtgatcctgtgaggcaattcttaataaactccctttcatatatacatttatcctattcactctgtccctctagagaacctaaggctctaacagcgacgttcagaggatctacagatatctgcggtagacacgcccacgaagtcgcctctgtgcctacctatcgggtcctgtgaccacaggcgacctcagtccccgaaccatctttgcagcttctcaaacgcacaccccagtgccctttctcgccacaggtgtgaaactacatctcccgacaggcggcgttgtccccttccttccttccttcctctcccaggcccgagccatggcaacagcgtgacgtgggggtrccgagatctgcgggagcagcggtcccggcttcagttctagcctacccggcagcctggacgggagcaaggcgagaggtgctgccgcctcccgtcgcccctgcgctcagaggtcccgaaccagcccagccgctgcctcttgccgctccgcctttggagtgaggagggcgcagcccgcgtcagaacttagagggccaggcagggtcgcgcgcatggcctgggcgggctcgcggcgggtcccagctgggacgcgcgcggcagccgagcgctgctgccggctctcgctcagcccgggcgcgcaaccggccccgcccccaggccctctgccaccgccgcgaccaatgaggtgagagggaggtgaccgcggctgagggcagggggtcgctgcgaaccccggggttccgcggtggaggggtgctatactgggatgcaggcgcggcggggactggcagcaatcatgccctgggagctaacgtagagctttggataatgcttttgcaagttgtacgagaagggaagttctcggggtgagtgtccaacctcttcttggccctcgcgggcgccctggggtccccggggacagtgatgcttccttaaagtcttagctttcagcagtagtgtaggcccagtcaaaggcaactggcgcttcccacacacccctttttctcatccccctcaccccgcccccagccctgtccttagctgccctcgaccttttgcactcgtgactccctrgccagagagagcctagcgggctgcagcaggtgctggggggaaagcttgtttggacgaccttcgtctgggatgcactcttcttctccttcacctacaaatgatagaggattacgaagaactatacggttggctcctctttcctttggccttaggtttctgacctcctgcagcctcctcttgcctcgggctgcccagatcttggcggctgaggctggcttaccttcgagccgttccttcatgggatttgctgctcccttcaccaacaagcgaaaggcttactcggagcgtagaatcatggggtaagcattctctgccttgcatccttgcacctcccttttccctccaaataaccctgtccaggcaagaatgtcagggtatcatcggtgggcaagattcatccctagccatccccctccccagctacaatactgatcctcagtcctcccctgccactcttccgaccttaatttctcccttcttggttgctgtgcatgtgcttaagtgaaatgagactagggttggactatactttaagacaacagggcgtagctgggtgcggtggctcacgcctgtaatcccaggactttgggaggctgaggcgggccgatcgttttaggtcaggagttcgagaccagcctggccaacatggtgaaaccctgtctccactaaaaaaaaacacacacacaagaatcagcctggcacggtggcgggcgcctttaatcccagctatttgggaggctgaggcaggataatcgctggaacctgggaggcagaggttgcagtgagctgagattgccccactgcactccagcctgggcgacagagcaagactgtctcaaaaaacaaaacaaaaaacagggtgtatttttctggtgaccatttaaaaataatttttatgggtacctagtatgtgtaaattagcagcgtaacctttttagtatattttgagcataatagctaaattatcgagcacttgctacatgctagcagcttgacttagatgttttacatagatatttctcatttaattctcacaacaaacctataaatcaggtgagaaaatggagacacaggtaatttacctaaggccacattgttaaaaaattgttaagagctgggatctgatccttgtgtgatcaccagtaaaactgacagcctctgttctccctagatggtccctcttaaaatcaaaataaacaatgaatgcaaaagcattctgtaaactgcaaaatataaggtaacagtatcataaggatttacacgtttgcttttgggaagttattcatccaggcttatttgggatctgtagttcctgaaggtgcgtggttagtgggcaaaggtatgaattaggggcctatagcaaggaggaacctgacccagctggcagctccttggcctgtgattcttcttctcctaggtactcaatgcaggagatgtatgaggtggtgtccaacgtccaggagtatcgtgagtttgtgccctggtgtaagaagtctctggtggtatccagccgtaagggtcatttgaaagcccagctggaggttggctttccacctgtcatggaacgttacacctctgcagtttccatggtcaaacctcacatggtcaaggtgaggcctgtatgggagggattgacaagattttttgtttttagcagtttcatatgaaagtgctattttggccttccttgtaagtactttatgtccatgtgtcaagtatttccctcatatcagaaaagaaggaaaatggctttcaattcctttatattgtatcctatacttagtaatgttatttaactacctgattaccctattctaggctgtttgtactgatggcaagctcttcaaccacttagagactatttggcgattcagccctggtattcctgcctatcctcgaacctgcactgtggacttttcggtgagtcaggaggttgtgtagcagaggacgaggactgggtatgaggaagggctggggtactgtgacagggttattaatttatttgagatggagtcttgctccgtcacccaggctggagtgcaatggcacgatcttggctcactgcaacctccaccttctgggttcaagcgattttcctgcctcagcctcccaagtagctgggattacaggagcctgctaccaagcccgactgattttttatttttagtagagacggggtttcaccattttggctaggctgctctcaaactcctggcctcaggtgatccgtccgccttggcctcccaaagtgctgggattacaggcgtgagccaccgcaccgacctgacagggttattctttaagtatagctagcatttcccaagtcagttagtctgagcttgtgtcagactcgtactccgtgctcagtcccaagttagggctcttacggggatccacgaactggatggggagggggagaaaaggcactgaggaacagtttccttgcatttggccagggactatccaacatggtctggaagtttctgactgtctcttacccattcccagatttcctttgaatttcgttctctgctgcactcccagctggccaccatgttttttgatgaggttgtcaaacagaatgttgctgcctttgagcgtcgggcagccaccaartttggtycagaaacagccatcccccgtgaactgatgttccatgaggtgcaccagacttgaggcaagggattgctccctgacctcccttctaccccacttccctacacaattctcttatttatttggtttggctcctgttccaatttgaaaggagtctgtgttcataatactgtttctcctctcaatttcccagaaattgggttctatgctggctggaaatgttgggggaaagagaaggcaaaggatgtggaaatgagatgtgcttaggaaagggtcaggcccatcgtaggagcaccatatgcctgcagccttttcactacgaattagaataaggactatgtggttgtctctggaccttatcaagacaccttagtgtctgaccaggggacgatagtaacttttctaaggattgaataaattgagcttttcttctggcacagaggtactgagtggtaagtaacttttaccctgcctgagattcctcaggagaaaaggcaacctgcctccagcctgaaatacataaagcctcattttaagactgtaagtccatgctgcctggctactagagagcaaggggctttcttaccaccagtgctgaggagaaaagtactgaacggaaacggagttgtctttgtactcttgagttgtaccttattcttccacttggcctgagtttttataaaatttcaataaattgtgacagtgtgaatttggctttattatattgtttcttggggcaataatgtagatatagtagagtagaacgaagttatggcttcttttcctgggggagtgaaggtataagaaggcctcttggacacagtgtccctgctaactatagtagcacattctacaagccaggacctagtacccacccccttgtctatttatagactttttcagaaggtcagttgcagcagggatctcaggacagaatcatctggtcttggacctcccatatatgtgatgccctcaggaccacctcttgttatttttgggacctccttcagggaagctataaagagcaggcactccaagaagtaccagagccctctagtggctctggtcctgaggtagcagtactagcccattcgtccttggtagtttgttcctttctctcagtgggctagaccagttcttggattagtcacataagcaattgagaatctcagctatagcccttgagtatgttaccttacaacaaaattagcaaggttaggggctaaacatcaaggacttcctaaccttgaggaaggacagaaatctcctctggaaatttctcagggaggctttcctctggttaaggtaaaagaaagccaaacctgcctaaagataaatggatacagattacttataacccactaagttcaggatcttgctagccagattccttacctcataataaaggttcttccaggccttatttaataataggctcaagcattgttaataaaaacatttattttgcattttatacagaacaacctgaagtctccatcatgacttgacagttacccaggggtttacagtgtgtccaactcaacagtgtggttctgggactgggtatccacacaaacacaggcaggagtttggaggaaagatgggggcacagcaggagtgtatcttaatcctttctcaaagaaaaagaagtagagcattctgagttgctgaaaacctgtgcaaatggggcttctgaaacattgtactgtgagctctcagggaaagggaggaaaaagatgttgataaataaggaggcaatttcttgaggcaggggacgaggagggaggcttactatttttaatgccctcagccccagtacctgataatcagaggagaccatgtccaatcttgaatcaattccctgttcaaaaagaggtgctaataccccggggacaagactctgaaaatatcatgctggtcattccggagttctatgccccacagcatattaaaagatgggggttggtggggggtggggaggtcagaaggtagtggcttgtattctgtggaagtaaaaaacttagttcacattaagcactgataaaacccaatgactgggcccacagatctgttgagaggtctctagtagggaccaagagggggaggtccagaacatcctctgcctgaggtgcaacaggtgtagaaagtctgggaggaggtgagtattaaagtaatgggaaacagaacactcccagaccttaattttaattggatagttttaaaaaaaaaatcaaacattgggtgccagtcacaacaaatgccatgcctttatggtcacttggtagtataaaaaaattgccaaagcatgtccagctaaccaacaggtcttgctaggaggtgtttgtgtgcatgggagagggccaaggggcttggtacagctgactatccaacatgattcctatggaaacagaaggggcagagtcctggtttgctggcttattgagggcttggcagagaagctaaagctccaaagtgactacagattctctgcaaccggctttgacccatggaaacaggagccagattctcactctagagatagtgagggggccaaacctactcataccacatgcattagtcctggtcatcctccaggaccatgcgtatgatgggcaactcataccaggcaggggaagggagctgattagggaagaagggaccatttttcatcttttaaagtcttaatttatattttaacctcaaacatattatcagtgcctcagatataatttaatcttaagtctttaaaggccccctgaaacaaaagtatactttttatttaggcttcctcactttctggtagtcactttcacccagtctccagttttaccctgacttagagtccacaaacttcatcagaccctctgtgctcatggacttgggcctttctagagggaagcctaaggctcggctccagatgagctgtgccagtacacccaatgctcgtgacaccccaaacaggaccgtgtagtaattcatctccgtcatgccataatactgtaaggtagaagagaaaaatatttcatttaaggcagaggcagtggcatgtacaagtcctaggtgatagaaaccttaaaagctaaattttccatttttctccaaggacttagcccagtcaaccttaaatagaaatgacactgagaaaagtatagcaattgggattctgaaaacagagcaaccccaacccccaaccctctcatagtcaactttatcaaaatgctctgtgagggaagtccctgctctgactaggagttaattgactttgtgcatggcagataacaatagggtttggtacaaattagagggaaaagagggaaaggaggacttacctggagcagcaccccactgtgagcatctacattgggccaaggattcttggctttaccctgctctaagaggacattgggcacaatcttgtacagctgagcaaccaacttaaacatggggtcattaggcaggtgtttcagagcaaactctcgctgacaggtatatcgcggatcagtcttccttagtactgcatggccatagcctggaacaacctgtaaagagtgaggaaaaaagatagtattctcagtagaaattcttttatttttcgagacaggatctcactctgtcacccaggctggagtgcagtggcatgatcacatctcacggcagcctcgacctcccaggctcaggcaattctcccacttcagcctccagagtagctgggaccacaggtgcacaccaacacatctggcttttttttttttttttttggtaaagatggggtctggccgtgtgcggtggctcatgcctgtaatcccagcactttgggaggctgaggtgggcagatcacctgaggttgggagtcctagactagcctgaccaactgaccaactcggagaaaccccgtctctactaaaaatacaaaattagccgggcatggtggcgcatgcctgtaatcccagctactcgagaggatgaggcaggagaatcacttgaacccgagaggcggaggttgcagtgaactgaggttgcgccactgcattctagcctgggcaacaagagcaagactgtctttaaaaaaaaaaaaaaaaaaaaagatagggtctgtgttgctcaggctggtctcaaactcctgggctcacgagatccatccaccctggactcccaaagtgctaagattataagcgtgagccaccacactcaacctatttaaaactgttttttagagaatggggtcttgctgtgttgtcctggctggagtgtagtggctattcacaggagtgatcttagcacactgcagccttaaactcctggcctcaagcaatcctcttgcctcagcctcccaagtaggtgggactacaggtgcatgccattgtgcccacctagaaattcttttctaaattcttcaaggtagataaatgaagaaaaaaaaatctctaatttagggacctctttcattcttttcttaattcttccaaattgcagaacttgtgtcttggtttctttcctagtcgttaagcatctctgcttacccgtcctgagttgagtgtgttccagatgtagtctcgtaacttctcatctgacacatctttgccaacttccttctgcagctgtgttagccagacaagcacttcctatgggtaaggtttggggaaaaagggaatgttaatacatatgccagaagagaatgccaagatcagaaacaaagcatggggtaaggaaaacatgtagcaggaaaataaaaagaatagtcttacctgatttgccagtccatggagaggccctgccagcccgttcatggctgctgcaaaggacaggtaagggtcggaaagggcactgcccaccaaatggctggtatgggcacttacattgccaccctcatggtcactgtggggaagtaagaagggagagccaagggaagaaagaaggggcagattatggaaactttgctgttctcttatttgccacttactagcctagttatgggctcatgccagcctatagccagtcagttatacctaaactcttgtaaaagacatcctaatcttggccaggcacagtggctcacgcctataatcctagcactttgggaggccaaggcgggtggatcatgaggtcaagagatcaagaccatcctggccaacatggtgaaaccccgtctctgctaaaaatacaaaaattagctgggcatggtggcacacatctgtagtcctagctacttgggaggctgaggcagcagaatcacttgaacctggaggtgcaggttgcagtgagccaagattgcgccattgcactccaacctggcgacagagcaagactccatctaaaaaaaaaaaaaaaaaaaagcatcctaatctcattaccagcttttgttcactcatccacagagctggagaggttactggttgatgatgcctgtatgctctgctccatgactccaacctagctttaatagcaatggccccaaagagcgagctcctggaaagctgaaggaccatctaatgtgagcagctagtaccttttcccagccagaagcaccatcttgttcttagcatggttacagtaatttctttaggcctcctgaccttgcttactagacccctttcttgccttggatcatcctttatgccacgtttctgtcttcttgctgcctatcatctgttctcagaagatgagaacataaaggagcttttaaaaaaatttcccaccaattgaggcacctagtggctgtggttgctgggtctagcttacctgtggatggtgaggtacaggcgcgtgagctcagtgaactgatgatcagtatagcctaacatgttggtgaaattgtgagaccagtccaggttagagtcaatggccccaataccgctgccttctctgtagagatttcggtagatctttgctgcaacacaaggtagctttgcgattagatccatagagtcttcataaatcaactgacagaagaggagcaagatggagaaaaaaaaaggaattatcagcaaagaagaattaggcagggatatcgtctgtcctccatgaattggggctatttgggttgatggttagttatatgatgggttgttatatattgagtatgtttgaaagtagagaataacaatcataaccatttcactgaataactattatgacccaggcactaagtgatttgtaatactatctaatgtacactaaaacattattcccaatgcttactactacaaagtatataatgactgccattttaaagatgagtaaactaaggctcatagtattaggttaaatgctaaagtcaagtttgaactctgatatggttttctgagacagagtttcactcttgttgcccaggctggagtgcaatggcgcaatcttagctcactgcaacctccgcctcccaagttcaagtgattctcctgcctcagcctcc

SEQ ID NO: 97814 - DNA, 32644 bp, Homo sapiens
taggctgctggatgtcattcacacagaaaataaactctacctggtttttgaatttctgcaccaagatctcaagaaattcatggatgcctctgctctcactggcattcctcttcccctcatcaaggtaatgcttctcatcagctcctctcatcatgggcatgtcttgggggactggtggcaggcaattcagggtgatattttatgattttggcctccttctgagccctcatctcctatacacacacactccccttctttttgtgtctccttccctgctcattatattcattaaccctagggttggactgaacaatcaaagttgaaactctagtgagtcaacctagcaactcaggtgggaggtcagatgaaactcagataaacgggatttgagagcacttggtaaattcctccaaaaagcccttccatttggtggaagacctagctagtgagtccctattgtctattttagggctggattcttcactcccagagctactttcaatctattaacaaacattttttcaatgcacaggatgtagaaaagggatggaaaattgagtaagacttggtccttatcctctctgggctgacagtccattgggagaaatagcttgtaaatatgtaactataatccaacataataaaggctttagtagagttttaggggcacagagcaaacccagtctgctcactgtaatggagaaacacagtcctctctttctcctttgtcagagctatctgttccagctgctccagggcctagctttctgccattctcatcgggtcctccaccgagaccttaaacctcagaatctgcttattaacacagagggggccatcaagctagcagactttggactagccagagcttttggagtccctgttcgtacttacacccatgaggtgagtccctttatgtcttttttctctgagcttcccaagaggtgttaactagggtattcacaaagttactaaaaatatctggctaacagtttcttactaggtagaaataatctcttgacatcctaaagagtcttagggtatgcatggaattcatactgtgttgctaactgggcccacacctgtaataccaatactttgggaggctgaggtgggaggatcacttgagcccaggagttcgagaccatcatgggcaacatagcgagaccccatctctacaaatctacaaaaagaaaaaatttagaaataaaattatgaccaatttgtctcaagtttttccaggaagatctcaaattaggggttcagtccagaactatggactggaaatcagtgggaggggaaagatgatggagggaaggaaactgcttgttaagaggccaagagtaagcagagtagtgttgaggaactgagatgcgggaatttccataccctataaaccaccccgcccctccctattcccgtccctcaggtggtgaccctgtggtaccgagctcctgaaatcctcctgggctgcaaatattattccacagctgtggacatctggagcctgggctgcatctttgctgagatggtatggaggcttgcccaagttccacccagccccctccctctcctccccacatccaagaacaacagaactgcttcttggcccagacctatggcccttctatcacagggttctctctctaaagtagcaccaaggggaatggtgggaaaggatgcaactgttgccctgatatcaaccacagtgttaggatatcctcaaacagccttagtacctggtatacatctcttatccctgaaataagttaaagcatttctgcagctgttttagctgtagtctgcatatatttgggagaatgattccatttagtgcctcttttatttcaggccttcatttcaaggcttgtagaccttgttgtatggtgccagcaatgtagtgaagacaactgtggtcactttacccacacctttcatttaaactgcagatttaggcagggtgcagtggctcacacctataataccagcactttgggaggctgaggtaggtggatcacctgaggtcaggagtttgagaccagcctggccaacatgttaaaaccctgtctctactaaaaatacaaaaattagccaggtgtggctacttgggattacacacctgtaatcccagctacttgggaggccaaggcaggagaatcggttgaacccgggagatggaggttgcagtgaccaagattgcaccactgcactccagcctgggcgacagaatgagattccatctcaaaaaaaaaaaaaaaaaaaaaaaaaaaaagatttagatcatgttccccttcaacctctggcttttcagactgaaggatccttgaagcctggctttatgtagaagctcccatctcctttaatataacagtacagtggtgcagtaggctgtcttcaaatcagcaatatgttttattgtcttttatcttggttgtaaccaagagcttaaagaccattagcctatacatatgtaatgtgcatttatccccccagtgcattaccttacaattgtccgtattcctctctcaattcatcaaaaaatatttgttaagcacctagtgggtacccagcaccatgctaggtgctgtggggaacacagaagaaatggaagacagagtctctgcccgctgtgctcgtatctagaagtggctgcatcacaaggttgggggatgaccgcagtgtctaccccctaccccgtgagtggcttgggatacctttgctacatgtcagtggcaccccagacattcaccccctcccagacccacccagccttggggatctgcaaagccatggttgggggaaggaaggagggggcgaggagacagatgaaggaacttcattgtctcaggttctgtgtgactgaccccatgaaaggccctggggagggagtcatggggccctgctgaccttttactgtctgtgggaactcctttgtatagaggagagttttgactgacgtcaacgtgggtcttggtatttcctctttccccattttcaggtgactcgccgggccctattccctggagattctgagattgaccagctcttccggatctttcggactctggggaccccagatgaggtggtgtggccaggagttacttctatgcctgattacaagccaagtttccccaagtgggcccggcaagattttagtaaagttgtacctcccctggatgaagatggacggagcttgttatcggtgagagtgggcacctgttttccctcattcatttctcccagggaagggcttttccaggatgaaggaaggatgagaccctgaaatctgggcctcagtgtttcatttccctggttcctgctctccctgttggcacactgattcagctatgggaggatggaagtgagaattctgccttgggtagaaggagttctggtttcctgatttctgggaacacctgctgcccatttagtccactatcacatcattgaagtcaacatgcatctctccctctagcaaatgctgcactacgaccctaacaagcggatttcggccaaggcagccctggctcaccctttcttccaggatgtgaccaagccagtaccccatcttcgactctgatagccttcttgaagcccccagccctaatctcaccctctcctccagtgtgggcttgaccaggcttggccttgggctatttggactcaggtgggccctctgaacttgccttaaacactcaccttctagtcttggccagccaactctgggaatacaggggtgaaaggggggaaccagtgaaaatgaaaggaagtttcagtattagatgcacttaagttagcctccaccaccctttcccccttctcttagttattgctgaagagggttggtataaaaataattttaaaaaagccttcctacacgttagatttgccgtaccaatctctgaatgccccataattattatttccagtgtttgggatgaccaggatcccaagcctcctgctgccacaatgtttataaaggccaaatgatagcgggggctaagttggtgcttttgagaaccaagtaaaacaaaaccactgggaggagtctattttaaagaattcggttgaaaaaatagatccaatcagtttataccctagttagtgttttgcctcacctaataggctgggagactgaagactcagcccgggtggggctgcagaaaaatgattggccccagtccccttgtttgtcccttctacaggcatgaggaatctgggaggccctgagacagggattgtgcttcattccaatctattgcttcaccatggccttatgaggcaggtgagagatgtttgaatttttctcttccttttagtattcttagttgttcagttgccaaggatccctgatcccattttcctctgacgtccacctcctaccccataggagttagaagttagggtttaggcatcattttgagaatgctgacactttttcagggctgtgattgagtgagggcatgggtaaaaatatttctttaaaagaaggatgaacaattatatttatatttcaggttatatccaatagtagagttggctttttttttttttttttggtcatagtgggtggatttgttgccatgtgcaccttggggttttgtaatgacagtgctaaaaaaaaaaagcattttttttttatgatttgtctctgtcacccttgtccttgagtgctcttgctattaacgttatttgtaatttagtttgtagctcattaaaaaaatgtgcctagttttatagttcatctctttcctcctcttatttactgaaagaatggtgggagacagaatatgaatgtgtgtatgtgatcattgatttcagaccccttttcctaatctctctgtgcatggctgcccaccccaccccattttggctagtgctgacggtgaacaaagtggttattatcatccctatttatggctggggaaactgaagcctatatacttcctacttcactttctccacacaccagcaaacctcctttcccccagccaacataccacacacacaccacaccacacacacatcatatacacacatataccacacacaccacgtatacatataccaaatacacacacaccacatacacaccatatatgcacacacaccccatacatacacacacccatgcacatacatagcggcaggaagagggctcccggggaatttgcctttcgacactgcatttcccagtaagcccgccgtttttcctttctgtttcatatcacagacagaaaagttttccaaagattcttttatttacatttacatacgattctgaaaaagcgtctccaagctaccacttcttgtagttgccattgtctcattccaccaaaaaacatctcagaccgcccgcggccaccccaaatacgcctgtccactgaagcctcactaaaaggaggaagcgctgatgtcagggttacttaaattcccaggctccggatccctagaagaggtatttccctttacgcccgcgaatttgtcatagaaggcagggcactagagccagccccagccaagtccagggggaggggcgaaggtcagtagcggccttcctaaggcttccttcaacccctccttgcctgccagtcaagtaccgtattttcgcagtactggttaaagtttcactttgacccgcctccatcactcacctgattagatgtttatgagtcaaaaggcggggtcatggggtgtcgagattttattggtggatacatacgcctgtcggcagtgtaccgccccctgtcttcaggagcttgctctttaatggctccttacctcgtccatcttcgaggtttctccctcgctattggcttgtggccccgcctgtcgcgtcccttgctcgtacttgttggtgacagcgcccaaagagactcgcctttctccagaggattggtggatgagtgcacatatagcccaccctcgaaggtaggcgggtaatcgagctattggctggagccccgccccagggcgaggaggagaaggaggggcaggagggtttggttgagctgcagctgtttgtctgttcgacacaggcttggggccgacgggggagacggagccccaggtaccgagctgatggagcccaaagggcaggggcggaagcgcccgggagatgagagcagcctggcctgagagcggaggcgggtctggtcctaagcgaggggttagagtggcccaccggagaggggagaagggggccgggccccggcaggcctaatgggggtcgctgaggaggggactgggcggcctgggaccccgaagttggtgagtcgggaaggcggctgggctgtggcggcggccaggccgagggccgggggctggaggcctggagcttgagtgagggcaggggcaggcctcattaagcagcgctgaagagggaggagctggggaaaggaacagggcagcgggtgaggtaagcccatttgccgggaggtgaggagggtcagacctgtcgcccgagccccgggggtgactggggctgggtccctgcagagaggttcattggaagggcctgagaagggttcttagttgggtaagaagcgttcttttcagggaaagtgcctattgtaaaaagaactgagggtgctatggtgttgagctgagagagatttgggttcagtgagggagaactggggaaaatgaagaaggctgtattaatctagaagactaaggtagttgaagtaatggaagcagggcctggtatcagttatgggaacttctgggaatgctgaagggtgggctgggggctctgggtcttgggagtacacactcttttgttccctttagtgtttagatgtggtaatttgaagctttttaaaactcccagggtagggatgaagatcaaagtaatttttttttttccatgactgttggctgctccaaactcagcccctacactttctgttggcctcatagctggtctatactgcagtctgtttcttaacttactgtttcatgtcctatgaaagagctaagaagttggattgggggcatgttttgtccacttctttcccacttaataatgtggtctatagcaaataccatgtctcctagaactgagaatctatttcatatctatttcattatctacatgggaaaggggcttagagatcctcagccatcaggagatcttctgatcatagttggtgaaacttttgtgggacttagacttgacttgggtatttcccaggcaggtaatggagttaacaggtccgaaactatgcggtgatatcactgaggaagagatttggggaagagtgagaaattccatttcaaaagcttggcatcaccccttgttctttgtctacttcaaaagcccagatttctgtgctgttagaaagttgggtcaaactatgaagtatctggggaagatggtgagtagagaaaaagatacagaggtgcagtagcccacgcctgtaatcccagcactttgggaggctgagacaggaggatcacttgagcccgggagttcgagggtgcagtgagccatgatcttcccactgcactccagcctgggcaacagaatgagaccctgtctccaaaaaaaaaaaagacaaagattgccaaagcagaggagtggagtaccctcctccccamatatttttaatggtctgctagccttcttagtccctcatagattggagcctrttggattttcccttactgtacttcctccttttctgcgtctctaccaatatattttatcactacatttcttttttttttttttttttttttgagacggagtctcactgcaacctccacctcccaggttcaagagattctcctgcctcagcctcccaagtagctgggactacaggcgtgcgccaccacgcccagctaatttttgtatttttagtagagacagggttttaccatgttggccaggatggtctcaatctcttgacctcatgatccgcccacctcggcctcccaaagtgctgggattacaggcgtgagccaccacacccggccatcactacatttcttaattacaaaagttaatatgtacatattttaaaatatggaaggtgtacagcagtttaagaagtrtaaatcctcccacacataccttattcatatttcatttaggaaggtcaaggatcagagacagcaaatcagactaatcttgctttgctttgggggatgtgtcacaaaaggcaattgtgttttcatgttctcatcaaactctagtcttattctttctacagttttcccttctgggatgatactctgttatttattgtgttcctttcacagttcattttgtcttctaccaagtccgacaagcagagggctgtactgtgtgttattcaccttgagtacacacaaacacacacaccccaagttgtgtgctgggtgtcctaggaagtgcccaaagagatggaacaaaactttatggggagaaaggatcattttggttgggataattgttggcatctctgctaaagaaaggaatttcagacccttatctcaaattcatggtctctggatgttcatggtctctgcatgttcacattacttgactatccctttcttatccatgatgatgatggttctcctaagaggcccctgtatttgtctttcttttcttttcttctatttttagagacagggtcttgctttgtcacttaggctggagtacagtgtgtgtctttctgtagggatctgagaagctccaagcttatctggatttgaaatcggttttcctctaaatctcagagtcagagtacagctggggcatttcatactaccaccttattaattgaatttgtccttactagctttaaaagccctctgttgtacccagcctttgtacagcgcccattggaaacctcggttttttcccccaaggaacttttctcacctgcaagccagtcctagagacagttgtgtaggagtatgtgtgtgtgtttttagacggagtttcacttttgtcacccaggctggagtgcagtggcatgatctcggctcactgcaacgtctgcctcctaggttcacgcgattctcctgcctcagcctccagagtagctgggattacaggcgtgcaccaccacgaccagctaatttttgtattattagtagagacgggatttgaccatgttggccaggctggactctaactcctgacctcaggtgatccacgtgcctcagcctcccaaagcactgggattacaggagtgagccaccgcgcctggccgtgtgtgcgtgtgtgtgtgtgtgttttaatcctatctaatttttccaacagttttttgcatcctaagagagtttaggagtagaattatcaataaggaatttcatacatagacctggagttgcaaaaatatatttggagaagagagctttcccattgcccttcaagtcatacctcatatcttttaaaatttttttcctggacaatccctactgcataacatacctcatatcttctaactcttactttacctgggagcaaatattgcttattggtatgaattttacttctgagaaggaggcatagggtagaagaagcaagcgtatagtttgctccctaatcctaaagcatttcagattggaaggtaaccaaagtgtgagacaatgaacttataataaggaaatgcagcagccctcttggaggaaggataccataaaaccctacatggtatactcccacttccgttttgggaaagatttagccattgactcaacagtaactgaactgaataaggagctacccaggtgaacaaagtatgtgtacatttctgggcaaggttgtagcttctgttcagggacagtgggtaccttttcagagtgtctcctggttctgtggtgttatggctcctttttttaaacttgtgtttctcaagtcaggaattaatagatagtggcccaaagcttttgaccgttcaacatcaactgaaaattcagcgaactttgtttttagctatagttgcctcagtgtttgggtgggagggccacatattgggtgtgattaggccatctgaggcatagtaacgggtgacaggaaaagcagttagcccatgcgagttgcaatagtaccttgtgggcaagatcccaagggggccctccatccaagggagatcacagaggagccagggagagaattgattctgaggcctattaaaaatattcccaaatggggccgtgtgcggtggcatgygcctgtaatcccagcactttgggaggctgaggcgggtggatcacgaggtcaggagattgagaccatcctggctaacacggtgaaaccccgtctctactaaacaaaatacaaaaaattagctgggcgtggtggtgggcgcctgtagtcccccagcttctcgggaggctgaagcaggagaatggcgtgaacctgggaggcagagcttgcagtgagccgagatcgcgtcactgcactccagcctgggcgactgagcaagactccgtctcaggaaaaaaaaaaaagaacccaaatggaattgagtaagatctgtccagatggtacagaaagggaggagttgattgggggagagaagtagaattacttagccttaatttagggagcatttaatgagcacctactagggatcaggcagcatgctgtgctctgaagattttaagataaactcccacttttaaagaagttcatagtttagcagagcagacagacacaatttatatactgtgataatgtgatacatactattatagaaatacagtctttttttttttttttgagacggattcttgctttgctgtccaggctggagtacagtggtgcaatctgtgctcactgcaacctccgcctcccgggctcaagcaattctcatgtctcagcctcctgggtaactgggattacaagcctgtgccaacatgcccagctaatttttgtatttttagtagagacggggtttcaccatattggccaggctggtctcgaactcctaacctccagtgatccatctgccttggcctctcaaagtgctgggattacaggtgtgcgccaccacacctggccagaaatacagtcttaatactgtgggaccctacgggcctctagagaatgattaattctgtgggggagagggtgattatgtaatttcactgaagtaacatttgagcttggtcttatgagatatatagaattttgctaggcagacaagtagggacgggcattccaatcttacctaggtcaataatagggagtttgtactaccatactgataagaggtaagtatgctttttgcctcttggagaaatataagggaaagggtgcgagatgtggaaggaatctcatttaatccaatgactcattaggtaacactggatcaacaaaatgaagagctgagccaagtggtagaactctcatttcaagattttggtgacttgggtttaaacagagttggagagggagatgaaggtatttactggtttctgctctatcttccctacttagtaaaactctcacattaatcgcagggcccaccaaattctgcaaaagttaccgcttgttttcctattgcctctcattgaattgcttctatttcaactgtcctggcagggtttggtcatagaccttctagaaaagagtagtgatgaattaattcttctgtcagaaagatatgggactgcatcccagttgccaaggaaggcctgggtcttcttaatttgtttttagtcccaaagcaagtacttacctaaactgaatagaggcaggaactctatccagtctaagctctcgatcctgtcctggtgttctctttagagttcagcatttcctgcttccttaagaagtatagtggtataagaggcaggagtacctgactaggagtcctacatttactgcttagcagttggctgtatggtaacacttgacaagttgactaattttattttattttttatttatttatttattttttgtgcaaatggtggcctttaataccaagaaagaccatgacaagtgacagaacaggagcaaattccctagtgtagtgccgagctagccctttgcaggaccctaaaacctgatctagtaacagaataaatcagtgtatttacatttatgtttgccctgaaaacccaggtaaggtctgaagcctgaggcatctctccttcctttcctcctccctctcttcctacctccttgccttcgttcacttcctcaattcattcctctcccttctcccttcctctcttttccttcttttcctttctgcttttcccttttctcctttttctcctcattctctttaccatctacctatgtgtccctccaagcccctctgctatttctcccctgctcactccctctgctgttgtctccctcaggttcagcttccggggtggggaggcaagaaagggtcctcagctcagggagcacttgttggtgttctttatgtcacaagttttcaggtcagtactgggaggcttgttgcygtttcctgatctccggcctcctgacttgagcaagatgtcccgggccagggaactaaaagcctcatccacattcatactggatttagcactagtttcgaaaaatcggattccatgctctcgagccaacttatcggcctgctccttctgcaccttcctcttggcctccatgtcacatttgttccctagcaagaggtgctccaccccagctgaggcattctccatgatgcttttcatccagttctgaatattctcgaaagatttctcatccgtgatgtcgtatgctaggataatgcccatggctccacggtagtaggcagtagttattgtcttgaaccgctcttggccagctgtgtcccagacttgtagtttgatcttcttcccctctatatccacagtgcggatcttgaaatcaattccratggtggagatgtaagtgttgttgaagttgtcctctgcaaagcgaatgatcagacaagtcttgcccacccccgagtccccgatcagcagcaacttgaagaggtggtcrtaggctttggccatggcggacaccgggggagccggggaagggatggggctatttatttatttttgagacggaatcgctctgttgtccaggctggagtgcagtcgtgtgatctcggctcactgctacctctgcctcccaggttcaagcaattctcgtgcctcagcctcctgagtagctgggattacaggcacgcaccaccacacccagctaatttttgtatttttagtagagacaggttttcaccacgttggccaggctggtctcaaactcctgacctcaggtgatctgcccatctcgccctcccaaagtgctaggattacaggtgtaagccacsacgcctagcccaaattgactaattgtatgtgtctcggtttcctcacctataaaatatagagactggactaaatgacctctagactggctctgatctgcctgactgaccttaaggctgacaactggtactgggttggactccagtggctatatataccgagaactctgtctctgttgataggtgatagacttctggagacttcatatgtatttggtttagggactcaaagctaacaagtggaagggggcttgaggaatggagtcttactctagctgggactgctaagacacttttactgttatgcctactttgctgcactgcttgggagagttgcccacattaaagaacatcctccatgggtctcctgcatctagtgggctaacccatggtcaggcctcaatcctccctagttaatgggtcattttataagtcattcttgtagagccgtacttctttttttttttttttgatggagtcttgctctgtcacccaggctggagtgcagtggcaaagtctcgacccactgcagcctctgcctcccaggttcaagcaattctcctgcttcagcctcccaagtagctgagattacaggtgtcagccacmacacctggctaatttttgtgtttttaatagagacggggtttcaccatgttcgccagactggtgttgaattcctgaccttaggtgatccgcccacctcagcctcccaaagtgctgggatttcaggcatgagtcactgcaccyggcagagctgcacttctaagggaagttaaatctgatttcttctcttctgagctaaaaaggttgaaaggaagagaaacctgccccatctcccttttttttgtctcgggtttgaaggtaataatcatcataccacttgactggtttaccaaaaaaaaaaaaaaaaattagtatttttgtgggaaaaaatgagaatagaaaataaataattgaatcttatatgtattatttcatttctgtaccacagaatttttgagagtctagctattatattttttaaatgatacccttataaacatgataagattaaagatcaaagcttagaggtggctcaacaattgctgtgaacagggaggaaggcaggacatattctttctttttcagaggtgggatctcactatgttgcccaggctggtctcaaactcctgggctcaagtgatcctcctgccttggcctcccaaaatgctggtattacaggcgtgaaccatgatgtgcagccagaacatactcttaaggctacatattagggtacgaggtagtcttttctaagtcagtagttactgatctctgagaatccaaggttgcttagtagcaagaaagcttgctgaccacatctgggctctggcttgacttcccatctctgagagttagtgacagagactttgcaactcaagcgtgtctgcaattgtttcctgtctttacactcccccagagctcaagtgatatgtttagccatgagaattcagtccattctaactcccacattttcctktattgtagagtagtaacattgaggcttaatattctaccccttggatcacatgctttgaaatacataaaaatgtaagggagtaagttgaaaaaaccagtaactttttctattgtttcttgagagtatagcatatatatgtcacctgaaggaaacttgatcagcttatcatctgtccttttttttttattatggtgtcacctgtcttctcttttatttattttttattttgagagayggagtcttgctctgttgcccaggctggagtacagtggcataatctcagctcactgcaacctccgccctctgggttcaagcgattctcctgcctcagcttcccaagtagctgggactacaggcatgtggcgctacacccagctaatttttgtattttttagtagagacggggtttcactatatgttggccaggctggtctcaaactcctgacctctcaaacaccagagtgagactctctctaaaaatggaaaataaattttaaaatgttataattaaagatactcatttaaattgaataaatttagctttatgaaaaatttgctgtatcatctttattttgatcctttcgtcataggccattgaaaacttaatcataaaatggtacatgtatatctgaatttttaagactgactgaccaaggggactacagaatacccagtagaatcaaagtaattgtcatgttcctctgtattaatctagtctactttgggaccttgagttctcacctctcattcttttgctaacttcctctttaccctttagttatgtctccttttttttttttttttttttccagagatagcgtcttgttctgtcgcccaggctggagtgcagtggtgtaatcagctcactacaaccttcaactcctgggctccagtgattctcccaccacagcctctggagtagctgggattacaggcacataccaccatgcccagctaatttttttaaatgttttctagagactcagtctcgctatgttgcctaggctggtctcaaactcctcacctcaagcaaggcttccccttttatctcccaaacccctgggattacaggcatgggccgctctgccaggcctgttttttctctttttctttctctgtaccactttcatattgtggcttcttccctgcccccgatctcccccctacccaccccaggtggagtcttgctctgttacccaggctggagtgtggtggcacgatctcggctcactgcaacctccgcctcccgggtttaagcagttctgcctcagcctcccgagtaggattacaaatgccggccaccaaccacacccggctaattttttttttttttttttagactgagtctcgctgttgctctgtcgccaggctggagtacagtggtgcaatctcagctcactgcaacctccacctcacaagttcaagcagttcacctgcctcaacctcccaagtagctgggactacaggcacgcgccaccacgcccagctaatttttgtatttttagtagagacggggtttcaccatgtttgccaggcttgtctcaaactcctgacctcctgatctgcctgcctttgcctcccaaagtgctgggattacaggcgtgagccactgtgcccgccttttattttttgagacggagtctcgctctgtcacccaggctggagcacagtggcgcatcagctcagtgcaccctctaccttctgggtttaagcgattctcctgcctcagcctctggagtagctgggattacaggtatgcaccaccacacccagctaattttttttgtatttttagtggagacggggtttcaccatgttggccaggcagggctcgaacttctgacctcaggtgatccacctcagcctcccaaagtgctgggattataggtatgagctactgcacccaggctgtggctgctttttaggaatatattgataacaactaatattgagatatattttaatagctattagcactatgctaaacacatctttcacttattatttgtagctatgaggatggtattttttccattttacaaaggtagaaggtaaggcttagagaggtagagaaattctctttatatcatattagtaatgattagtagcttaatatttatttagcacttagtatctatcaaatacttaaaatactttagttatttatatgcattatctcatttaatccttacaacacccttatgaagtaggtgcttataaggctattatctcattttacagatgaggaaatgaatgcacacatatatttagtgacttgctcaaggttcatagctagtaagtagagctgaaaaacaaaygtggagaattggactccagagcctttattcctctgaattgcctcctgtatgattttctgtctttacgatctagtaagtggggttactgaaawtttttaaccccagtttaactccagtcccactaattgtggtgacaaaataatgatgtttccccacatatgccatagagtatgatgtctgtgaagtcactaggatctgctttggaaaagcgaaagagtaatttgaacaagcaaagtacaactctcaagcaatgcttaggtttgggagagaggtttttgcatgctctgcctatgctaacttccctttgaatttcatagttcctttccgctyagagtcaggatgatgaaatgtattcagatttagacgattagaatctcaaagtcccaactcttctctctgttccctgccccaccagcagctttcttagccctcttagaagatagaggagctgattcagtstattctttcatcaaatactgattgcttgcagacttaacgccctataccatcctctggagacttctgcatgtctttagaaggtatacctttctctgcctctaatttggagggctacagctgttaggcccctttggtgtggagggtaatctaatccctaggcaccagcaagacagctgcaagttgagagtaggtcaagcttactgattcttgatagactttcagatttggaaagatggcagaaacaaagtgaaaaaagagttgttaatgaaacaaagagttgataatgaatgtgatctgttggttgtatttctctctttaccttcaaccaaaaatgagaaaggatagattttgtggcaatgggaccctggttagatctttagaaatgtcttatcagggagaccggtcatatataaaggatacagcagcaactacccttctgcccttaggagtggtgactcttatcccacacccctagagtgaatctctcattttgacaaagagctaaggaaaaatgaaaagaaggccaggcacrgtggctcatgcctgtaatatcagcactttggaaggccaaggcgggcagatcacctgaggtcaggacttcttagactagtctgaccaacatggagaaactccgtctctactaaaaatacaaaattagccaggcgtggtggtgcatgcctgtaatcccagcwactcgggagactgaggtgggagaattgcttgaacccgggaggcagaggttgtggtgagccaagattgtgccattgcactccagcctgggcaacaagagtgacgtctcaaaaaaaaagaagaaaaggaaaagaagagcacagcaccaggatgccaaggagatactggggatctagggtaccggtgggtggatctggatattcttcaggccagctaaaggttgatcactttgtgtgactcaaacaaaaaactttgaagacctggtggggaattactggggaattaaaaactctcagttttcagtctctctatttcggctcccttggcagttagagattatgtggtagggcagactccagaagcagttcttattttgctcttcccaactcttaccactgaggatcagctgcctgggaccttctcagagctaagtcctcatagaagcaaggagatgaagaggttctatccttctctgaaaagsgattgcagcttcaatggacgtatgtttaattttattcacttttttttcttgcaggagtgttgaagcctggaaatcccctccccttccccctcccccctttacagtatccccctccctccaccctttcccattctgataatctggccatgactagcagaagcacagctaggcccaatgggcaaccccaggccagcaaaatttgccagttcaaattggtcctgctgggagaatctgcagtgggaaagtcaagcctggtattacgttttgtcaaagggcagttccatgagtaccaggagagcaccattggaggtgagtgccttggggtaataggagattgaatgtttggtaagggtttttttttttttagatggagtcttgctctgttacccaggctggagtgcagtggcgcaatcttggcttactgcaacctctgtctcccaggttcgagcgattctcatgcctcagcctcccgagtaactgggattacaggtgcacaccgtggcacctgtctaatttttgtatttttagtggagagggggtttcaccatcatgttggccaggttggtctcaaactcctgacctcaggtgatctgcctgcctcggcctcccaaagtgctgggattacaggcgtgagtcaccacgccgggccggtaaggcttttgaaaagagatataagacctgattatggagctggccctcttartcccattcttttccccagaaatggaaaccctttataaaaacagaggccggtcccagtggcccaccactttgggaggccaagatgggcggatcacctgaggtcaggagttcgagaccagcctgcccaacatggcgaaatcctgtctctactaaaaatacaaaaaattagccaggcgtggtggcaggcgcctgtaatcccagctactcgggaggctaaggcaggagaatcacttgaacccagggggcagaggttgtagtgagccgagattgcgccactgcactccaccctgggcgacaagagcaaaactccatctccaaaaaaaaaaaaaaatcaaaatctggtaaaataggctgggcatggtgggtcacacctgtaatcccagcatttgggaggccaaggcaggcggatcacttgaggccaggagttcaagaccagcctggccaacaaggtgaaatccccgtctctactaaaaatacaaaaaattagctgggcgtggtggcacatgcctataattccagctactcaggaggctgaggtaggagaactacttgaacccaggagatggaggttgcagtgagccaagattgcgccattgcactccagcctgggtgactagagtgaaaatccgtctcaaaaaaacaaaacaacaacaacaacaacaaagattagccgggcatggtggcacatgcctgtaatcccagctacttgggaagctgaggcaggagactcgcttgaactcatgaggcggaggttgcagtgagccaaaatcacgccagtgcattttatcctaggcgaaggagcgagactgtttcaaaaacaaaaaaaaatctggtaaaatagaggctggaactaatgcaaaatacaaagggtgtctgtctttctcatctttgctaccttttccccactactaccccaaaatagggtgctaattcaataaaggatcttttatgagaacttccaaattattccttccccttgttatttttatttatttatttatttatttttgagacggagtctctgtcgcccagactggagtgcagtggtgcaatcttggctcattgcaacttctgcctcccaggttcaagtgattctcgtgcctcagcctcctgagcagcggagattacaggcacataccaccatgcccggctaatttttgtatttgtatagagacagggtttcaccgtgttggccaggctggtctcaaactcctgacttcaagtgatccacccgcctcggcctcccaaagtgctgggattacaagcatgagccaccgtgcctggcctctttcccctttttattagtcatcttggaaatgtattcctggacctgcagcagattatatgaaaaagtaacagccaaataatattgataatgatgggacttgccatcaagctttaaaatcttctaattaattcttttttttttttttttttttttttggatactgagtctcaccctgttgcccaggctggagtgcagtggtgcagtggttgcccattgcaacttccgcttccccagttcaagcacttctgctgcctcagcctcccaagtagctggaattacaggcgtccatcaccatgcctggttaacttttgtgtttttagtagaggcggggtttcactatgttggccaggctggtctcgaactcctgacctcaagccatccacctgccttggcctcccaaagtgctgggattacaggcatgagccactgcgcccagccaatcctctaattaattcttttgtttgtttgcgtttgtttgtttgttttttgagacggagttccgctcttgttgcccaggctgaagtgcagtggcgccatcttggctcactgcaacctccacctcccaagttcaagggattctccagcctcagcctcccgagtagctgtgattacaggtgtccaccaccacgcctggctaatttttgtatttttagtagagacgggttttgccgtgttggccagactggtctcgaactcctgacctcaggtgatccacctgcctcagcccccacctcccaaagtgctgggattacaggcgtgagctaccgtgcccagcccaatcttctaattaattcttgatgtgacttttatctgaagctattttctctgtcatttgttattctcctattttggttagaagaaggatgactcgtataagtgccagttcttctgtccctcttagtttatgatgtacccccattccttagctagtgacatttctggcaggaaggacttagccaagggcagtcttaatcctggtttcaagacttacatgtaaggagaactcaaaaccttttcctgtagctgactatcctgggtggtgactggtcttagtgtagggcagttacattttgaagggggggagggatgttcccattcatcctcccacttacagcatcttcccctccattctctcatccatagcggccttcctcacccagtccgtttgtctagatgacacaacagtgaagtttgagatctgggacacagctgggcaggagcgatatcacagcttagcccccatgtactacaggggtgcccaagctgcaatcgtggtttacgacattactaatcaggtaagtgagctaagaagactgtccttgttggctggacatggtggcttacgcctataatcccaacactttaggatgccaaggcgggaggatcatgaggtcaagagattgagaccatcctggccaacatggtgaaaccccgtctctactaaaattacaaaaattagttgggcgtggtggygsgcgcctgtagtcccagctactcgggaggctgaggcaggagaatcgcttgaacccaggaggcggaggttgcagtgagccgagatcgagccactgcactctagcctcggcgacagagcaaaactccgcctcaaaaaaaaaagaaaaaagactgtccttgcttatatttagaggagttagtttggggcagggggtaagggggcagaaaacgggttcttgaaatagcaaataagagtacaaattatgcttccaagtgctaagaagacagataatgaattatcagagacctgtggtttcactgagggaagaccacctagaagaggtgaattttgagactcattttaaaaggtgatggatatggattggcagtcattccagcctactcattctcttcatgttttcctaggaaacctttgcccgagcaaagacatgggtgaaggaactacagcgacaggccagtcctagcatcgttattgccctggcagggaacaaagctgacctggccaacaaacgtatggtggagtatgaagtaaggtggcccgtggagttcctctctaacacttcctctgttcctgggacctctttttttccaaaccagccctctctgaaaacgtcaacagaggacatycattgtctcattccccagttctacaccaagttaaatacagcaacactgtgaccctaatgacagccaggagattttcaaaggagtcaggagaaaactccagagcagagggttagggargtaccagctgtgggggtaccagtgtgaaaacaggaaggagggagcaattaaatttgtggtaagggactattcaagtgtcacaacccaaaagcccccaactaacttaccctctcccctataattaagctttctgacatttgtgtgttggactgagtggacatggggtcatcttgagggagttgtcattaaattatgcatctaggctagctggctcaaaggggtattaattaaggggagggaacctaggattttgcctagctgttgtgctgcatgggagtggaaaggcaatactcgttcccaccctacattctgagcactaatacatcccactccttgcaggaggcccaggcatatgcagatgacaacagcttattgttcatggagacttcmgccaagacagctatgaacgtgaatgatctcttcctggcaataggtaaggtcagaacatcctgaggtcctcctttttccctcgtttataggcaaaattatagctaacccaaatcaaggataggtgcgagtatctccttttgcaaaaactttaggtatggaaataccttaactttctgttatgacctccatccttggctgcagctttagctcccttgtcttcaatgtgtaagtttgccggccaggtgtggtggctaacacctgtaatcccagcattttgggaggccgaggcgggcggatcacgaggtcaagagatcaagaccatcctggccaatgtggtgaaaccccgtctctactaaaaatacaaaaattagctgggcgtggtggygcacacctgtagtcccagctacttgggaggctgagccaggataatcacttgaacccgggaggtggaggttgcagtgagccgagattgtgccactgcactccatcctggcaacagagcgagactccatctcaaaaaaaaaaaaaaagtttgcaaatagtgaaccctcccatcttcagaacattcttttaatctctcaaattctcccttttccccaattcagtagccgtttttggcgggtggaggcagaggggtagggaagtaaagtctaccatactttgttctcttctctttttatctctagctaagaagttgccaaagagtgaaccccagaatctgggaggtgcagcaggccgaagccggggtgtggatctccatgaacagtcccagcagaacaagagccagtgttgtagcaactgagggggtggctagcagcaaacaagtatggagctagcacaagagctaagaaataacckccatccctacccctcagcacacarcccctacggtaacagcacactgagccctggctcccaagggctgcctcctgacagctccgtcatggcactttttaacgcttcagcaacaaacaccaggcagctgttgccactggcctcctaccccctactctggggcttgggggtcaactccccccaggacttaccttccaaaacaaactttcttcactttgtattataggtacaagacagcgacttaygtatcttttctcctcctccctagtgttcctccccattttttcagaaaacrcttctgactcctgtcccttccccttctgcttttggtcagtccctgttcttgagcctcttttctcctctccccaggatgcwgaaagtggtgaacccaggaactgaggaaggaggtttccagttcatttacattaagggccctgggggagaataaagctcagagcaggagggagtaaggaaacatttcctttttgtttttatttggttggagtttctcatatttgaaaacattgcggtatccatgatttggccttgtggagggtgttcctaggtagaggtgagaatggggaggcaagatctcaggcaccargcaggaggtgcckkgtaagctaactgggcggaggtggaggtgcagtgtcaactgtggctctgtaactcttcaaaggcccagtttcccctcacgcagcctcttaggtagcgtttcccctaatcgtgggggttggaccccagagtcttccaaagaattttcactggttgcctrcrtctttggctctgctgtgatctgattggaggagggacagtttctggtacccatcctctgatttatacatatgcrttttttcccctctggcctttagatggcctcagccccagccaccatatacccctgcagtttgcactttaattgatggtagttcagttggggtacttgttttatggaagttttgattgatttacttgccctcccaccttctttttaattcaatgaaatctgaggttaatgcgaggttcgaggagaggttatagataaaactaccagtggcagctactcaagtcctatctccactgttagcttcctccaactctaattattaacctatattcttgccaagctaactattgactataggtttgcctttcctggagaattaattgagcaattgaggagtgtctcaggatagcacaggccaaggtaggggagtaaaaaggaggtcaggcaaaagggaggagttttctgtcctttcccaggtttcacactcaatttgatatccattaccatgtcttttctacttccttgtaaataggtatgatctttattcccactgtacagtctgttctatcctctgcctcccatcaggccctgtttctttgttcctttgttaatatcttgaatttagtccctccatccttaatccccccatccctccccatcatgcaaccagtggtttaatccatgtaccaataggggctagtaccacagaggcctcctgtggtgccctcgtatcataccacctgttcctgtggagagggaatgaccggcactgaaggtaccttacaactggctcatattatcagaggaccttggtcctttctaaatctctagtctctcttcatatccttcatcaggtgttttaagatgtctctgagaagccatcaaggcaaaagagaactttaagttccttgttccagcccggagttttgggaaagaaagaaaggaaaggtcacagtgacctaggattggaaccttcctgcccttttggcttgcagactgccttctatcccagaacagctgagaaatctatgaagctgagattctgaaggacccagcttaggttcttccacttaggcctcaattcccttccttttccaggggcagccttagttcccatggccctgaaacacacacatttcccccttcctttcccagaagccactggccccccatagcacccagtgcatcctttttacaagtggaagaactaggatggctttccaaagtcttctagaaatgaagttctttctctgtgcagctttcccccttggagcaggagtgaagatgtttcattatcttgggcctgggaaaccacttccccaggcttctccctccccccacccccataggaacaggatttggccttagcttytgggcstatcggctgccttccctctacttcctaccacctcttctgccttcctttgagctctgttgggcttggggatcttagttttcttttgtttatttcccagctcatttttttcttctggtcmgtttttttaagggggggtgttgtggttttttgtttttgttttgcttctgagaaagcatttgcctttcttcctctcccaacataacaatcgtggtaacagaatgcgactgctgatttaccgatgtatttaatgtaagtaaaaaaaggaaaaaaagaaaagggcattggagtgttgcttttttttattttattgttattattattattatttttgctatttgtcaggtactaggaatttggaagaaaggatacccagtaatgttctactgaatcagaaacacacctttccctgcatcttgatacatctttattccctttaatcttttcttaaacatctagtttagaaaatagcccttctattgctatttaatcacccctcttctaaggccactagattgttcatcaaatcaaaccctattatatctttttaggccctcttaacagaatgtatatgtgtagggtatggtctgtggatctttgggcccactgatcagattagagagaggggtgctatttgaagtagtatacaaaaatgtatgtgcatatttctttttttttttttaattgagacggagtctctgtcgctagcctggagtacagtggcacgatcttggctcacagcaatctccgcctcctgagttcaagtgattctcctgcctcagcctcctgagtagctaggattacaggcacgcaccaacacacccagctaatttttgtatttttagtagagacggggtttcaccatgttggtcaggctggtcttgaactcctgacctcgtgatccacccaccttggcctcccaaagtgctgggattacgggcgtgagccactgcgcccggccgtatgtgcatatttctaggatccatttctatatgtttctcaaaggggtccatgacccaaaggttgaaaaacatcactgagttagttttcttgtagcttccacctcaacgggaaaatttcccctggatctgctcttgactcctagtgtacttcaaacccttcagtccaccacagtctaaaggtcgagggaagggaaatgaaataggattatgtgtggttgcagtaggctttaaattccaaagaatctgaaggtggataggaaagaggactggtgccagacaaatctgacattctaggcctgtctctgtcaacttaaccagctgtggccttgatcaagttagttagtgccttccgcctcgtttcttcatctgtaaagtaaaagctgaagattaaggtcaattatgtaaagtatgtgtgtcacacaaaagtagatgacactattaggaaggaggcttttagatagtccctaactgacttctctgtatcttcctttggctgagacttttttttttttaggttgaagctcgctttctctctctctccctctttctccctctctctctctctctcactctctctctctccatatatatatacatatatatatatatatatattttttttttaacaactggtaggataggttgggcattagccttcttcagtgatttgattgtatacagattgaaatcctttccatttccaaacacttaagagccaaagccaacttgccaacttttcactgtcggttcccttaccttatatctcttggtaataccccccacccccgttccctgattcctggtaaaagctctagttggagagccgaaaggaaaggaaatgatctttcaaaattaaaggtgaacaccttcacttaaactgattaaaattgcagctccaccgtccggcctctagagggcagtgtatggatacatttgtccagattgggggactaggtttgataaattttgtcctgcatcaaatgacaaaagggtaataggaaatgtattatatttatgccccttactttgagataagagactacaaccttcatacttcggggtgttaagctgccattgctcttgttaaggggcagtttgttttttaagagatggggtcttgctctgttgtccaggctggagtgcagtgccgcgatcttggctcagtgcaacctcgaactcctgggcttaagcgatcctcccgcctcagcctcccgagtactgggactacaggcgtgtgccaccaaggggcgattattattttttttttctacgcaaaataaaagacggctattcagtgttgttgtttcatttttgtttggggagaaattcgactagcccaaggaatctcaaattcttggaaccactattttaggcatttctgttatcattcctggaatacgagaactaagcgattgactttgctttccctaaaagataaacagggtagttgtagttgcaacagagtagatagaggtaggtctaccctgggtttaaagtggagatcacagccggggaaaaccggactggatcccgaggcctcctccagggaggggcggcaggggtgtctcaaaatctcccacctgtcagcccaacttttggattccttgtcaccttccacactgcccgagctccggacatacagccctggtgcacaagggtcccattctttgcacaccaggggtataatggactccggactgttggcgagagtgacagcaaaaagagccagcctcttctcccaggcttcttagcaacctgcctgtctcggctccaggaggcgggttccagccaatggttgagccacccgcttccagccaatggctgagggataagctgaggggagtgagaggtcacttactgcagccggacataacggcgctggccccgccccttctcgagaactcgcagagctgggctggtaaaattgcagtgctgaagacactggacccggtaaggagactgggggtggtaaagaagctggggaggaagggctgctgagctgggcagcggagggggccttggtgtccagctgtgctccgaacctcaagggcaacaaaactatcagtacctgcctccactccttctgtctgggtgctcttgagatcgcggggtgttgccgcaagacccttttgtgcctggatgccggacgtatgttcctacctaacgtgcccatggggagtgaggggtcatcacctgcaccaacgggtggcatttctgtattacagcaaaaggctgtccctcccaaacctgggattctgggctcactgagttcacctgcgagtcagccctacctgcactgctctggtctagtacaaacaggctgctggcattgaggtaggtggcagagagagtaatggtcccatggcccaggggcaaggtgaagactgctcctattcccatctctaggtttcctttcctccctacccacgacccacccaccccagcacattggtctccagcatctcatcagcagtttagacatttgtcacccctcctcactttggccctgctgggtcagtgctctctgttcagcaatttgaggaagaaacttgcagggcagagagcagaaaaattaccttccttctccagcctgcccctgacactctggccattaactcctcaatttgctgagctcactacagtggcacagagaagattgaggtggtccgggaccctaggttggggtccagttcccagctgggttcaattttttttagggtgaatggagggagagttggggactgaaaagccttcaaagacaatgttattacagcagtctccccttatccaaagtttccttttcctgagtttcagttagctatggtcaaccgcttggaaaatagttgaacacagtacaataagatattttgaggctgggagtggtggctcatgcctgtaataatcccaggactttgtgagaccaagtttgaaggatcacttgaacccaggagtttgagaccagcctgggcaacatagtaagacctcatctctacaaaaaaaaaaaaaaaaagaccatgcatggtggcacacgcctgtggtccccgctactcaggaggttgaggcaggaggatggcttgagcccagaagtttgatgctatagtgagctgagatcacgccactgcactccagcctgggcagagcaagaccctgtcaggggcagggggaggggaggggaagccggacagtggctcatgcctgtaatcccagcactttgggggctaaggcagcaagaggccaggagttcaagaccagccctgacaacatagactcccatgtctacagaaaaattagccaggcttggtgacacacacttgtagtcccagctgctggggaggctaaggcaggaggatggcttgagcccaagaggttgaagcttcagtgagccatgatcgacacttgctccatcgcccaggctttttttttttttgagacaaggtcttgccctgttgcccaggctggagtacggtggcgccatcataattcattgcagtctcgacctcctggactcaagccatcctctcatctcagcactcctctccccaccaccccggtagctgagactacagacaggcaccaccatgcccagttaatttgtttttttttttctagagacacagtctcactatgttgcccaagctggtcttgaactcctggagtcaagtgatcctccttccttggcctcccaaaattttgggattataggcatgagccaccatgactggccaaaaaaaagtatattttgagagagagaccacattcatataacttttttttgtttttgttttgagacagggtctcgctctctgttgcccaagctgaagtgcagtggcacagtcagctcactctgtaacctcaaactcctgggcttagatcttctcagcctccagagtagatgggaccacaggtgcgctccaccatgcccaactaactttttattttgtagggacggagtctccaactcctggcctctagcagtcctcctgtgtaggtctcccaaagtgctagtgtgtccggaattggtgggttcttggtctcactgacttcaagaatgaagccgcggaccctcgcagtgagtgttacagttcttaaaggcagcgtgtccggagtttgttccttctgatgttcagatgtgtttggagtttcttccttctggtgggttcgtggtcttgctggctcaggagtgaagctgcagaccttcacagtgagtgttacagctcataaaggcagtgtggacccgaagagtgagcagcagcaagattcattgtaaagagggaaagaacaaagcttccaccgtgtggaaagggacccaagcgggttgccactgctggcttgggcagcctgcttttgttctcttatctggtgccacccacatcctgctgattggtagagccgagtggtctgttttgacagggtgctgattggtgcgtttacaatccctgagctagacacaaaggttctccacatccccaccagattagctagatacagagtgttgattggtgtattcacaatccctgagctagacataaaggttctccaaggccccaccagagtagctagatacagagtgttgattggtgcattcacaaaccctgagctagacacagggtgctgataggtgtatttacaatccctgagctagacatgaaggttctccacctccccaccagactcaggagcccagctggcttcacccagtggatcccgcactggtgctgcaggtggagctgcctgccagtctcggtgccatgcgcccgcactcctcagcccttgggtggttgatgggactgggtgccgtggagcaggggtcggtgctcctcggggaggcttaggccccacaggagcccacggcgaaggggggctcaggcatggcgggctgcaggtcccgagccctgccccgcggggaggcagctaaggcccggcgagaaatcgagcgcagcgctggtgggccggcactgctgggggacccagtacaccctccgcagctgctggcccaggtggtaagcccctcattgcccggggccggcagggccagccggctgctccgtgtgcggggcctgccaagcccacgcccacccggaactccagctggcccgcaagctccgcgctcagccccggttcccgctcgcacctctccctccacacctccctgcaagctgagggagccgactctggccttggccagcccagaaaggggctcccacagtgcagcggcgagctgaagggctcctcaagtgccgccaaagtgggagcccaggcagaggaggcaccgagagtgagcaagggctgtgaggactgccagcacaatgtcacttctcactagg

SEQ ID NO: 97815 - DNA, 12715 bp, Homo sapiens
cagtgggttactgacaggacagaggatggatctcagtcttaccacagctggccatcacttttcccacagtaccaggtggcttatgaagagagtgtcttacgatttttttgaactaaaagaagaggacaggtgagaaggcctgtggtgaagagcccctgacctgtgtgagaagaagatgcctctgcgcaggaagtggtgtggtctttggccggtggctctctctattcggtttattagctctttgtcaattttactacttccaaaccgaactggaaaaaaagaaaagatgactttcttaggtggcaggaggtttagtgatcagatattactgaaatgaagatgaaaagtgagtgatccatgcacaatcttaatgaacacaaacctctttaggccttctgctaaaggtccttacccccaacatgaagtaaaaggtctttggattaaaacaacagctgagatcaacacaaccaacaaaacaggaaataaattacaacacaaaatgctgttttgcctgagactgggttctgatgggaaacatattcagaatgcagtccagctagcaacttttgacaacaaaatataaacatatacatatataaataggtatatatatatatatttgtttattaaggtaaaatttatattcattgacaaccatgatttctcacattctttatttgttgaactgaattaatgtcggtcttcaagtgaattttccctcattgatagtctatactgaaatcatggaaaatggctttgacttagatgaaaacatttcagttctgtttcttctctgataattagcaatgatctcagagtaaagacttcaatggaatggcaacagtctttcctgagcaggaaggccctcaaggaagggcatgacagtaagaacttgcccgatgtgagaagtcactgctcttaagctgacttccagccttctaggtccatagtcagtatcactggaggtgaaacctaagtaatctatgattgacttgtagccactaaatgttataaatggccatttcaatagacctttcccaagttctgaagtgctcaaaaaaagggaaaaccttctattaagctgtctactatagatcattattttgaaatatattttatattgttattttattttaaaataatcctttgggaatataatgcacaaccaaaagattttagtatccattttttcttggcattgaagcttcactgaatttatgattaattcaaaatttaaaaacatcaatggaatcaactcaatgggaccacttctaaaagttgcagctttttctgggaagaaagcagaggacgtaccaatgagcttatcrtagtctatgccttttgcactgcttgtctgtactgtccatgggtccacaaaatcctcttcagcttctgtggcatctgggccatgattactggtaggtgctgggttccctggaggacagtcagccttgtaatcctcccccrmggcagmtttgtagctcatttttaatgacaccaacatctttactgcagaatcaatttcatcctgagagaggaaataaaagggatggctaaaagtattactaatagctgatatgtgctgaatgcctattctgtggcaggcactgtgttaaatgcttttacacgtgttaccttagttagtgtcacaaccctacaaggcaggcattgttgtcactgtccttttccagctcaagaatctgagactcagagaggtagaggagcttacccatagaatcacagcaagtcattggcttgaaaacacttcatttttatctgttattctagtgctaccatgaacactttgggacagtagcagtgacacaatatacactgtcatttatgacaaagttcatatgctaaagatttctcaaacaccactgatgccagagaacgtgtgtgacaagctcctttaattgagattcctggagttctgcattggaactagtttttacataccacacaggttgagatgaatatttacgttaacttaaccaatgatgccactaaggatagtaagagcaactaaaacagataaaagcaaggacaaaaaatgtaggctctcaggttataaattaaggagggattcactgggaaatagttacatcatcacattttggagtcttatcaaactatcttgaaaaaaaaaaaacaaaggtaaaatgtacccttgggtagtctggaaatgtattaaagactcttttgcaggagtccatagtggccacccctggaagcctggtgtttagaaaagcaggcctaattaagctgattagtcatgctatgccctaaagctctattctggtaattggccttgctggattagatcacaaacaaagaatatacacagcccaatttgcttaccaagggaaatacaaacatttccacttacagtttatacagaacattctttcttttaaatctccttaaattccttttaccatatacagaatgttytataaacaccaacctccattcagagataactattccatcagatatagcacttgggccataaaggactgtgattctggagtaatctgtgtttcaaactacaaaattatctgagactcatcattaaaatgagccagatttgtggaatcagtaacccaatggatacgattcatagatgagatgtttgcccaggttagatagttaagtatgttccacccatctcatttctgtagtacctaggctcagtacttgcaaaaaataacagtttagtacgtataatctatccaattatctatgggaaggcttaccttgctttgaagtacactgcagtcaatatcacttaataactagctttgttgacatttcatactctatctggtctaattctgcttgtaactaggaggctctgcgaaagtcaaacatttaaccaatgtccctgctcaaggaccatctgcattttggaatagcaccaaaataagacaagcaggcttaccttgtctattttcttataatcagtcttaatcagtgtctgaaccaggacactgaaacaggattcaaaagctgatgttagctgggtgcagtggctcacacctgtaatcccagcactttgggaggccaaggcgggcggatcgcctgagctcataagttcgagaccaccctaggcaacatggcaaaaccctgtctctaccaaaaatagaaaaaattagccaggtgtggtggcacacacctgtgttcctagctcatcgggaggctgaagtcagaggattgcttgagccagggaggcagaggttgcagtgagccgagattgcaccactgcactccaacctgggtgatgaagtgagatccccaccccacaaaaaacccagaacatcagttttttttagacagggtctcacttcagtctcctgagtagctgggactgcaggtgtgtgccaccatgtctggctaatttttaaattttttgtagagacagggtctcactatattatccaggctggtcccaaactcttggcctgaagcgatcctcctgccttggcctcctaagtgctgggattataggcatgagccacggagcctcgccaaaagctgatgttcagaaaaaaaagccagacacaagactgtattacatacagttcaaacccaggtagagctacccctggtgggaggagtcatggcagaggctgaggcgcgtgagggtggcttctaggtgctctctgcttgctgttgatttgggtgctggttacacaggtgtggtcattttgtgaaaattcagtgaggtgcctgcttgtgcttatgatcagcatgtttttctatatgaatggtatattttgattttagaagttacttaaacaaaaaggagaagaagaaaaaggctctgctctctttcttaatacctaagacctagcattgcttctttagtcctgctcaaactatttcccctcacagccctcagatgctgacttatttccccctaggaaacttgccgctttaatgagctgctgctactgaaggatgtggatcttattctttagatacactggagcagaaaagaccttcaaggtccatggcctagataaatggcaggagaagaaagagctcaaggtgccctctcttagaactggcactcccaatgtggctcacactattttgctaaaagttaatttttaaaatttccaaaacatcaagtgcttctactaccaagacatttcagggtcagatacaaatgtacttctgaatttttcaccacttaactctggtctcattgtgcaacctctgatgtcttcaacgtgtgccagccaattgcattagtcaaataatacacttggaagagttattataaaatgtattaagttgactaaaataatgaacataactgcagtcactaagaattactaactaaaaacatttactaaatgttattcaaatttaatattaaatggacaaaaataccactgtcaacttcccaaaatgatgggcttacataaccccactgggtcttttatttattttataattttgttttaaaacaacttggtttaatcgtttgaggcctacctggtgagtaaatctctttctgtaaaaaagtaacttttttttgacattactttctttcagtactatttatttcctttaaaatatgagctgggtgcagtggcttgcatctataattccagcaacttggcaggctaaggtgggagcccaggagtttgagggtgcactgagctaggattgcaccactgcactccaacgtggaaagagcgagaccctgtctcaaaaaatacacacacacacacacacacacacacacacacacacacaaataatgatttaaatcagggtcccaaatagtcaaagtaaactactggggaatgtgagatggttgacacaatctggtgacaagcaaggtgtttgaaaagataacagataacaggagttaaaagtgtcggaagtcgggccgggcgtggtggctcacacctgtcatcccagtactttgggaggctgaggcgggcggatcacctgagatcaggagttcaagattagcctggccaacatggcaagaccccctctctactaaaaatacaaaaattagccgggtgtggtggcgggcgcctgcagtcccagctacttacgaggccagggcaggagaatcgctcgaactcaggaggcagaggttgtagtgagccaagactgtgccagtgcactccagcctgggcgacagagtgagactcagcctcaaaaaaaaaaaaaaaaaaaaagtgatggaagtcatggagaagccggagtggagtcaccccagaaggaaatgaaatgcttatgttctagttaaagatgcgtattgatgatgatatttctgaaatctactacaacaaaagcagagatcttcttttttttttttttttttaaagcataatcccacaaggacaaaggaaacaagaagaggatgacagcaacaaggtttcagaagccagaaagctgatgaatgatcagtgcctaacagcatgagagaaaaacaaatgctaagacatcatggaaatactggaaggtgaccgagtgtacactgttacggaatcacccaaaggttcgggccttagtgaccttgggcacttacaggagtgggggcaggaaagcgggttatgaaaacaggagcgctggttgaagtctcttcaagaagcagttattgagaatccctctcccctcggccaagggagcgtcacagtttcccctccattccaaggtttcatgtcaagagaggacagagttacaggtgcctagactgggggcagtctgcacagttggggcactggcagcacacagagaatagggagcttcggggaaggatcccacagcccagcccttctctcccactcagccgtagaactctggcagcgggactcaccccctctgaacagtggactgggggagctttctctggggaatctcacttaactttaaagaaaagatctaaagaccttgacacgaaagattccccaacaaaaggggagcagcctggtcactctccaggaagtggaacctatgttgataagctcttccccaatgaagagtgcatccagcagctttcagtgcaccccccaaaacaccagcaaatagccaagaaacaccaaacagttgagaattgcctctaatatgaaaggcaggtagaaaacaaattaagatggaagaaactgaggttataaaggatgtagaggacatatggaaaactaccattaagatctcagagagagagagttgagtgtcctgagaggtcagattgctgtcagacatggcccatggacatggacatgagcatggacatcgtaaaatggaacttctagattacagacaacggaagacagaagggacaccattagaaactatccagaagaagctggctgaaaaagggctaagggatccgtggggccacaatgaagcttgaagatacatgggtggctttgcaaagagtgtttccttttttgatgtattgtttaaaggattcaaatggggatttgctgcatttgtggtagctgtaggagctgaatattacctggagtccctgaataaagataagaagcatcactgaagataatacctggaagtatcatagtggtttcttaactctccaaaataagatttcttcactgtagcctactcgtctggtttgtcccttacagaatattagtaagatttaatacagtaaaataagattaaaaaaaaaaatctcagagagaaaagggtggtactgtacctatgagtcagggcagagtgctgtgaggaaacttcagggagcatacatgctcctggaagttaaaaatgatagcagaaatggaaaacaataggagggttagaaaatcagagaaacagtctctgaattaaaaaaaaaagtctgtgaagagagaaaacagaagagatcaaagaaatcatgatttctgagaattaacggccatgagtttctagtctaaaaggcaggctgagtgtggtggctcacgcctgtaatcccagcactttcggaggccgaggtgggcagatcatgaggtcaggagtttgagatcagcctggctaatatagtgaaaccccgtctctactaaaaatacaaaaattagcctggtatggtggcggatgcctgtaatcccagctacttgggaggctaagacaggagaactgcttgaacccaggaggcggaggttgcggtgagtcgagattgtgccaccacactccagcctgggtgaaagagtgagattccatctcggggggcgggggtggggtggcaaaaaaaaaaaaaaaaaaaaaaagaaaggcatactgaacctgcatcccatgaaatttcagaacacgggaacaaagaagatcctgctaacttccaaaaagaaaaaacaaaggaatggcaactgacttctctgcagcaagcccagaagctaggtgccaatagagcagtggcttcagcatttccaggggaaatcacttccatgctagaaccctacacccagcctggctatcaatcatgttttaggtaaaataaatacgctttcagatgggcaagatccccctagaaatatttcctttgcaatatttttttcagaaacaattggaagatttgctctgcccaaagagtaaagcaaagaggaataagatgcaggagcaggaaacggggcacccaatcgacaggggtgaaagaaccccttgggtcgacagtgaagaaagacgccaagatgggcagtgtaggaagcaagagcccccacttcagagggaagcaggcagaaggttttgggagagatcgcctcaagaagatgaacttgatagactagttgatgtgtgttgaaaggagattcactggacagggaaagggcttggagatacattatcattagtatcattgacataaaaaagtcaagcaaacagatattaagacaaatattaactccagagaaaacaaaagctgggcgagaaagttagagtactcattctatccgtgatggttcagctgtccacgtctatttccatggtcataataatgtcagtgtacagatactgacctaactacaactgcaatacagatggggagactgcctggacgggaagtggttgtgaaggtacgaatgcttcatttccacctgaaagaccccaacttgaaaatcaacaaggaacaatatgataagcagaatatttacagatatggggagtacataaccaaaagatcggctaaaagaattgagcaggaaatagggagaggtgggctggagggccactgtatttcacaaaggctttgagaacccctgactctttagaccacaggcatcccaatgttgataaaggaaaaatacatttaaaactataaccaaggctggcgtggtggctcatgctggtaatcccagcactttgggaggccaaggtggacagatcacctgaggtcaggggtttgagaccagcctgaccaacgtggtgaaacccccatctctactaaaaatacaaaattagctgggtgtggtggtgcatgcctgtaatcccagctacttgggaggctgaggcaggagagtcacttgaacccgggaggcagaggttgcagcaagcttagattgcaccattgcactccagcctgggaaacaagagtgaaattccctctcaaaaaataaaaaattataaccaaaacacctcagtcattgaggaaaccatctattctagaggaacacaaccctacagacttgggaggctcagctgccttcgtggagaacccagcaaaatcatgtacctttgacgcatttcccgctttgagggaccttacgagctccccttgtgtggcgatgctgttgaacagctccagcagagatgcgggctcactgttgggcatgtttgctatctctcaggaactacgttcacagccggcctgaggtcagaggatttgttcagcagacgagtcaagactggggtgggggcggggaaggagagagaggaaaaaccagaggttaacacaacatcgcggctgtttttcctttcctgtattgagtccttttttccgaaaaggttgtgaggtgagttacagtaaaggacatagataatataataaaaagagaaccagaaatttggggccatgaagaagaggaaaaccatcaaatgccagtgatgaagactaaaggagtggctaggatttactgacttaaggtgtgaatctacttgactaggaggggccctcctagtcaagatcaagtttgcatctggtgatgcccctgtgcccccacccagtgcccagaacacaggaggactcctgtttgctcagggtataaataccaatgtgttttaatgaacctaagttcattgctaaaaacttttggcaaattactatttgattttttttttttttgagatggagtctcgctctgccacccaggctggagtgcaatggtgtgatcttggctcactgcaacctccacctctggggttcaagcgattcttctgtctcagcctcctgaggctgcctgccaccatgcccagcgaatttttgtatttttagtagagggagggtttcaccatgttggccaggctggtcttgaacttctgacctcaggtgatcctctcacttcagcctcccgaaagtgttgggattataggtgtgagccaaggcacccatcctctatttgtggtttatcttaattgccttggggatgaattcttgggcttttgcagccataactaatatatcgctgagcaaatgtcttccactgctggtcagctgctctcagacaaagtgagctctggggtggaggacagggccttacctgtcctaggttccacatgaggtaaggactgtctccagtctgtccattccacgtgctgccttatttaactacaagcctttgcagaaggtgtgtctgcacctcctattagtcatgattcattataacccttgcaggaagtggggacatggcagacagagactgtatcgccatcaaacctttcttggctcaatcacttcctaagagtcaagtttcctaacctataaaatggcgccgccaggaacttcatctaccccaggctcttatgagaacaaaatgagaaaaaaaaggcatggtagcactttgtaaactgtaaagcaagatgtaactacgttacgagtgctgttattaaatttcttgtgtttcttaggattccaaagattggctgaactccagcttcattttaacttgctgtaaaaccttggagaaggaaaatgacaaggctagtgcctgagctgctaactttgaacacctctgtacctgttattgttctaagcaccgtatatgtatcaattcacttaagccttgcagcagtcctatgaaatagatttgtaatctccattttatagatgaggcacagaggggttaaaaaaaacttgcccatggctgggcatggtggctcatacctgcaaccctggcactttgggcagtatagtgagactctacaaaaaaatgaaaaaaaaaaaaaattagctgggcatggtggtgggcctgtaatcccagctacttgggaggctatagcaggaagatcacttgagcccaggagttcgaggcttcagtgagctacgtttgcgccactgtactccagcccgggtgacagagtaagaccctgtctctaaaaataaaaataaaataaaataaaacttgcccatgttaacatcacaaggaaatggcagagatgcgttatagactctagtagtttgactctagagcctacactttcaaccattatcttacaaatgacttatctttatgaaccaaacatatacatttgtggtgtcatttattttactctatcctatccatttgttaaatatttgctttaaaagtacgtaaattggctgggtgtggtggctcacgcctataatcccagcactttgggaggctgaggtgggtggatcacctgaggtcaggagtttgagaccagcctggccaacatggtgaaaccccgtctcaactaaaaatagagaaaaattagctgggcatggtggcgcacacctgtagttccaaatacctgggaggctgaggtgggagaattgcttgaaaccaggaggtggaggtttcagtgagctgagatcacaccactgcaccccagcctgggtgacagaaaggttctgtctcaaaaaaaaaaaaaaaaaaaagtaggccaggtgtggtgactcatgcctgtaatcccagcactttgggaggccaaggagggtggatcaagaccagcctggcccacatggtgaaaccccatctttactaaaaatacaaaaattagccaggcatggtggcatgtacctgtagtcccagctacttgggaggctgaggcatgagaatcacttgaacctgggaggcagaggttgcagtgagctgagaccatgccactgcactccaacctgggcaacagagagagactctgtctcaaaacaaaaaaaattccaaaaagtatgtaaatcacgggtgctgtgagcggtggctcacaactgcagtccaagtgctttgggaagcagaggcgattgcttgaactcaggagttcaagagcagcttgggtaatgtcaggtctctgagcccaagctaagccaccatatcccctgtgaccggcacgtacacatccagatggccttaactgatgacattccttcacaaaagaagtgaaaatggcctgttcctgccttaactgatgacattcccttgtgaaattccttctccttgctcatcctggctcaaaagctcccctgctgatcaccttgtgacccctgccacctgcccgccagagaacaatcccctttgactataactttcctttacctacccaaatcctataaaacggccccactcctatctcccttccatgactctctttttggactcagcccgcctgcagccaggtgaaataaacaaccttgttgctcacacaaaccctgtttggtggtctcttcacacggacacgagtgacacgagtgaaaggtaacatggatagtgagaccctgtctctccaaaaaatttttataaaataaaaaaacaaaaattgaaaaaaaagtatgtaaatcaaaacttatttaattcaatgaaactataatactgaaaaccgggacaggacagcagccagtttctttctcctccttgatgagaaccacctcagttcccagaaagggaggtttggtgagataactgactcagataagaaagcatccagtttagggaggaatgccggagtaccctctgcctagggctagagagaactctcaggctctcccattccctccccagcaacaagctgagcaaatcagtcgaaatccatttctctctaaggtctctgtccatatcaaataacgatcaaactcatgaaaattacttctagccacaaatcatcaatcatcatgtccagaaacctatcctgaattctcccaactctcaaagctgggtgttactctatgtgccctgcaatagcagacaagaggctgatggctccattaccagggagtagctaagccagaatctgattcccaagcccccttgctcatgtgctctctcagaatccctgctgctccctgctgcctgcctgcctgcctgcctgaaatgtctcacacccttctctgcctgaactctgctkattgattatctttccaatttgaacctcagctcttcacagcctctcctgacacctatgcttctgggaacaagttggttgctccatcctttgtgatccccaaacactcctttagtaactttatgaaagcactcacactgcagtttagttattcatgtcttccccagcagacagcaaaggtaagccs

SEQ ID NO: 97816 - DNA, 15969 bp, Homo sapiens
tcttagtggagaggtttccccttcaggagggccccagccgctggttcagaggctgaatcggcagcctctgtccctggttcatgtgggcagggggacttggtggaggcagccttggccttcgcctctgggtccagggagacacattcccatggagcagagagcagggaaccggggcagcgggaagggtgagagcagatggtgggtgctgttcctgggttcaggcctgtccttgccaccccctccctccctgccaactggagctccttgaggacagggactggctctcatttgcctgggtgtagcatcagcaaagtaagtgttttttgagtgagtaagagagggagctttgcaggtttcccaggcaggggtcctgagcaaatccaggggagtcgggaaagcccaggggacacagtgaaggcctgggcttggacctggagggcgagagctgtcacagccccatctctggaccttcccaggaggtgtttggatgtgatggggcagtgcccctgctctctggtgcctgtcacctcccgtgctctctcctgtgttttcctgacacctgggtcccgagggcactgggacaagggtcccgggggcagggagggagtccagctgtgtgccgcgtggcctcagcaggctctgcttccggtcccctcccctgccgcaggtatttaaggtctgagaggggccagctgggagctgttgaggccaccctggtggcaccaaagccctctcaggcaggcagacccagggcctccccgccacaccttgttcatggattttgtcgctggagccatcggaggtaacagacaggatggtgggctgtgcagacactgctgctcctgggggtagcaggaggaactgaggtccaggaaggtgctgggcagcagggtgggctttgaggagcccctcaccccccaggatctgccaggagcagagagcaggttcctgggaggctaaggctgggtgaggggtgctgcagggcctggggggctgcactggcctgggaggctcagacaggaggctgagggcaggctggggatggggctgtggtctaggcatgggggccgctcgggaggcagagtcagggaggctgggagtccttggtgtggggaggggtgattgagtcactggaagggaaagaagaccccaggagaggatcgagagggtggggagatgggtagggaagatgggcctggtcctgcagcagggactggaaggggcgggcagaggacggtaaggggcctggcgaggtggctccacctgccctgctgggtgtgtgcacctggctaggcctccagagcctgcttctcaggccagactctgctggagaaaccgttctccctcctggggaagggctcctggtgaaagactgattcagggagataaccaggccctgggacacgggctcagctccatcccgtgggctgtgggggctgttctgagtgggcactcctgcccttgctggtcttgtgaaacatcggtgggtggcgtcagtacttctggaaacagcatgggggttgggagagcggcccagctctggccctgggagaaggcagagtacctgccccattaacaggctttttcttttttttttcccttgagatggagtcttgttctgtcgcctaggctgaaatgcactggcgtgatcttggctcactgcaacctctgcctcctgggttcaagtgattctcctgcctcagccgcccaagtagctgggattacagacatgcaccacaatgtctggctaatttttgggtttttagtagaggcagggttttaccatgttggtcaggctggtctcaaactcctgacctcaagcgatccgcacgcctcagcctcccaaagtgctgggattacaggcgtgagccactgcgcccggcctccattagcagcctttctcagccccagctaggtgccagcctggggccagccgctcccttcctcagggaagctactggacttgcctgacatcacacagctggaaagggctcctgagtctggcatctttcctccggagccatgaggaggcctaggtaaagggctctcactctgtgcctggccctgggtcatggggtgtcagccctcggccgtgtccttggagaactccagttctggaggtggcggtggcatacaacagcaaggccatatgacaagggctctgctcaacatgttccaggcacagaggcagcccagagtacagaggccagagagggctccagagaggaggtagtgtcgtggcagggctttgatggatgagtaggagcctggtgaggtgtgtgaggtgtatgggagggttaagaagggtcgttctctccaagccacttggtcttttgccttacatttattcacttcattctttcatcccacatatttactgagtcctgggctacagtgaatagggtacagtccccatgtgcctattttcttccattggcctttaccacctcccctcaggggagagaatggtcctcccagggaccaccctgtttcccctctgacttccctgtggcagtgctggggcttggatgttgaggcctggcacccgaggcctctctgcaaggtgtggactcccggccctctctcttccacacacgcttgtggttccaggcagtcctggctcttcacgaaccccggtgtgggcttcggcttccctcctcctggcctttgcccaggctgtgcctccccctccttccacccacgcagccaaaacacagttaccgcctggctcacaggcaaaccctccatgggctgacggcttgagggcaaggtctgcctggctcagagacagggcccagctagggtaggatcaaacgttctctcagagcatgacgcccgtggggaggccggggcatgtcggcatgtctttggcccaaggcagcgaggacgaggcagtcccgggccaggactcagggaaggggaacttgcttgcaaagggtagaagacactcggaggctcaatttcctcatctctaaaacgggggtgccctcaggattgatgagacctggtgcagaccagaagggccaaatgtgggtctgcccttgggggagcccagtcagcgtgcgctctgcttctgcttccctgcaatggggttgaactgctcgccggccccactctcctcaccgtgggcctcttctttccttgcaggcgtctgcggtgttgctgtgggctaccccctggacacggtgaaggtgcggcaatagccagccccccaaccatcctaaggcccctgcacctgtccatggccaggagacttttctagaatgctaaacagacccacccctttcctacccaaatgccttcaatggctccccatagcccctgggactatgtcagtcccactttctcacccctgtgccccaggtttctcgtctaacacaaggctccctgtccctgctgtgccaccgtccagcatggctgggacaatcaagagtgtgactctgccccttccccagggcctgctggccttgccctaggcctggagccgctcgtgcctgaagcccacttctcctgcaggtcaggatccagacggagccaaagtacacaggcatctggcactgcgtccgggatacgtatcaccgagagcgcgtaggtctggggccaggggctgggtagggagacagggaggggatgctgggcctgcctccgctgcccagcaggtgatgccaggctccccgctgggtctcagctctctcaccttccacatgggaatagttctgccaatctcatgggttcctctgaggtctggagccaggacatctggcagctagaggggcctcagaaggaggttcccacctccagcagagggtctagaggtagcgttcaggtctttgaaagtcggaggagggacccatgcactgcatttctgtctcctccaggccaggcaccccttgaaggcagtgttgggtggagtctttagggtctagctcagagacctgtccggagcagtacttggcgacattctcctacgtggacttggggcttggtgcaggccaggggctagtttgtgaaagcagcagtggcagaacatgctgttactagttcattgtcaggccaggagcggtggcttacgcctgtaatcccagcactttgggaggccgaagcaggcggatcacctgtggtcaggagttcaagacaagccttgccaacatggtgaaaccccgtctctactaaaaatacaaaaattagctggaggtggtggcaggcacctgtaatcgcagtggctcaggaggctgaggcaggagaatcgcttgaacctgggatgcggaggttgcagtgagttaagatcgtgccactgcactccagcctgggcaaaaaaaaaaagttcatcgtcatcaagcagctgggctgggttgggcctggtcctctggctcttcaggtccccccttgtgacctccatcttacagcagaggaaactgaggccctgaggccgtgaatgaccttcccgaggtccgacagcggagtgcggagcagggctgagtgtgggctccctcgggtggctcctcctcctggcggggccctagcctgacctggatcctgtctgctaggtgtggggcttctaccggggcctctcgctgcccgtgtgcacggtgtccctggtatcttccgtgtcttttggcacctaccgccactgcctggcgcacatctgccggctccggtacggcaaccctgacgccaagcccaccaaggccgacatcacgctctcgggatgcgcctccggcctcgtccgcgtgagtaggggcagccagggtggggaaggcccaagagagactgcggggtctgagaggttatccatcctggcaggtggggaaactgaggcttgatgagggcagacactggaggccatgcatggagtcaggggctgtgggagaagaactcgcatcccgcctaggctgggcctggaacccctcagcagcacacagatgagggggtcgctgctgtcctgcccagcacggccccctcaggaagggggctgtgaccaaagggactctccctgtcacggtcagaaggtcacctagaagccaccatggggagctgaataggcaggccccgggcactcatggctccaggcacggagatgcctgaacacagtcggccattgctggatgtgggcatttctccatcctcaactgtgcatggagcacctgcagtgcccgcctgccctcagggagcccttgctcccgcaggggagacagactttcgcacttggtgacagcacggagccagctggagcagcccagcagctgaaggcctggcccaggggtccagaccaccaggcccagctctcagctctgaccctcatgagctgagcaaccttgggcaagcaagggagactcttggagcttctgtctctccatctgtaagaggcatgatgagaatttagtgaaatcatgagggtaaagcccccagcacacatatgtggagtccgacatgaatgagtacccacaaagtggcagccagtatgtctagtgattttttttttttttttttgagacagagtcttgctcggttacccaggccagtgtttagtggcaccatctccgctcactacaacctctacgtcccaggttcaagcaattctcctgcctcagcctcctgagtagctgggactacaggcacgcgccaccaagcccggctaatttttgtatttttagtagagatggggtttcacccatattggccaggctggtctcaaactcctgatctcgtgatccgcctgccttgacctcccaaagtgctgggattacaggcgtgagccgctgcgcctggccatggtattattttattgctgatatgttactaaatacgttcttgaacctgggtcatggaaattatcttacacgtcccaggagaagcctggcaggctggcctgggagagatgtggctgccgaggaagcatgggctttggcattgggtgggcggagctggctttgggccccgtggccccccagccctgggccagcctgcagggtctcggggcccaacctcctgaggtcaccgtgagcaacatgaggctggtgggaggccaggtccaggctgtgggcagagccacaggtggctgacccctgcttccttctctgctccaggtgttcctgacgtcgcccactgaggtggccaaagtccgcttgcagacgcagacacaggcgcagaagcagcagcggckgctttcggcctcrgggccgttggctgtgccccccatgtgtcctgtgcccccagcctgcccagagcccaagtaccgcrggccactgcactgcctggccacggtagcccgtgaggaggggctgtgcggcctctacaagggcagctcggccctggtcttacgggacggccactcctttgccacctacttcctttcctacgcsgtcctctgcgagtggctcagcccygctggccacagccggccaggtgagcaggggctggaacctggcagggcggggagcccagaaggatgaggaggtcaaggtgaggtcgtgctgcccgccagtacccgagtgggggcttgaacttggcctcctgcctcccagagtgggctcctcagttctcccaacaccaagagtcaggacagacttgctgtgtcacagagtcagtgtgtggttgtggacaagtcccattcccctctcccaagcctgttgcaaatgaggacgggccggaagygtgagtccagggtgcgctgccctgggcgccccratcaggctcccagtcaaggcactgtggtctctctgcagatgtcccgggcgtgctggtggccgggggctgtgcaggagtcctggcctgggctgtggccacccccatggacgtgatcaagtcgagactgcaggcagacgggcagggccagaggcgctaccggggtctcctgcactgtatggtgaccagcgttcgagaggagggaccccgggtccttttcaaggggctggtactcaattgctgccgcgccttccctgtcaacatggtggtcttcgtygcctatgaggcagtgctgaggctcgcccggggtctgctcacatagccggtccccwcgcccagcggcccacccaccagcagctgctggaggtygtagtggctggaggaggcaaggggtagtgtggctgggttcgggaccccacagggccattgcccaggagaatgaggagcctccctgcagtgttgtcggccgaggcctgagctcgccctgcccagctactgacctcrggtcgaggggcccgccagccatcagccagggttggcctagggtggcaggagccagggaggagtgggcctctttgatgagagcgttgagttgcatggagtcggttgttcatcccagcctccccatggccctcgcctcccatgtctttgaagcacccctccagggagtcaggtgtgtgctcagccaccctctgccccattcctagaccctcacccccaccactgttcctgtgtcttcaygagctgtcccttacaggcaggggcttcccacaggctgggggcctcggggcggggagcatgagctgggctggcaccaygactgagggctyccggcycggcttcttccccacagcaggctgctcagagggggtgctgccgggactgccatgcccacctgagaggggcctggggtggccgtcctcggccggttagggaatttggggtgaggttcctcaggagccctcactctgcctgtggacgctgcacctgccacttaaagaccccaaagactctgttgggaactgttgtcaataaaatgtttctgaggatgttcagggctgtggctccatggccgtgggctgactgttccctgcccccagcagctttgcaccctgtgaggcctgcccacccgtcctgggaggtgtggggctgtggccctgtcctgctcccttcctgctggatgagccctcgaaacctgagctgctggtgctcccactgtgcagatggccacactgaaaccccgcctggcactctggcgggctccactctctcggccttctgggctgtggggcctagcctatggtgctgagtcctgccgcagggggctgtttagcagggtacttactgtcctcaccaccctatcccaaacccacccgctttctgagcgaaagctggttccagccaggccctcccacctgccctgaatgtgagctccccttccagagggggctgcccgtgggagggcgccaggtgccttgcacagctcaccacagccacctgacagctccaagagggagggggccttgcctgccgtcacgcwtcagggaggggtgggtggactgcagccagtgcttctgaggctccagcaccccccctcctggcatcatgtggcttccaatgatgggggctatcaggggctagggctggcaggtccagcgtgaagccaccgggtctccaccacagcagccctctggcagggccagaggccacctgcattgactatattcactcatggacactgaccttgactgtgtctgtggactgaacgctgtcctgtgttctgccgaacaaaattcttctgctcccagagtaaggggtggaacccctcttgttacgccagtccccatatgtgtggtgctgtgggcacctgaccttatgccctgtgccctctgccaggaataccctcctactgctctgcctggctggctccacaccccaggcgccacctcctccaggaagctctccttgcctgaccactgggctgctcccaagcatctcttgctctgctcccttggggacctggttgggtgtgtggtcactcatctgcctctccccggccacaagagcytgcgggctgtgcaaggactccatctagctccagggctgctgcatagtagggggtgtgggatgaatgagcgagtgaatgaatgaatgaatgaatgaataagtcctgcagtagattccaggaagtgtgtccagcttaggagttgcagaggctgagatgttgtggccgaatgccgggaaagggcaggcgctgacaggtttccatggctcatcaaacactgaccccgggaccgtttttgtcgagaagaccccacctgttcggccttggcaggagggttcctggcagcrctcctggcccggctctggcagtggctgcactctgggaggtgggggcctttggctctccctgagcccgtgtcactgagcagctggctctgcgtgtcactggggagggggtttgcaggaaaggcctctgtcctcactgttttttttttttttttgagacggagtctcgctctgtcgcccaggctggagtgcagtggcgcgatctcggcttggctcactgcaagctccgtctcctgtgttcacgccattctcctgtctcagcctcccgagtagctgggactacgggtgcccaccaccacgcctggctaatttctttttgtatttttagtagagatggggttttaccgtgttagccaggatggtctcgatctcctgacctcgtgatctgcccgcctcagcctgggattacaggtgtaagccaccgcgtctggctgtcctcactgtctttacaacctctatggtaatgaccagagagtcctgggcctcaaggcccagccagtgtgaccctggggagggcacatctgctggtgctgcaggcgggcactgggggccagaggcaggcctgttgcttgccaagtgccgtcctggagcaacgagctgttccacagccacccgtgtgctcagccaccctccttcctgtccctgcttccccacccagtgctgttttgtgtgcttctcaggcaccatctcctttcaggcaggctcagctggtctctcctccaggctgggggccacgggacagagagactgagctgggttggccccacatytgtctgacaagtggacattaccagccagagcaggagtgctcttccggcagagcctctggcaccacggtggtgcaggcacccggcctcatgcctcatccccaaacactcatggggccactgcaacctgtccatcctaatccagacacgcccatgtctttcagggaacatttctctcagaaaccactggtttttagcaaaactggggaggcttgggagacatgtggctcccctgtgtcctgaccagcagtggccttgggcaagtcacctgagtattggacccagggcacccctcctaagaccctaaacaggaggcatcactgctttttacaggggaggagatggaggtcctgggaggttaagtgacctggccagagtcacacagccggtgaggggagaagctggttggtgttggctcactcctccctggggccagggtctcaccagggccctgccaatagatgctgtggctgggtggacaatgacagcagcagctgtcactgactccatttgtcacccctcattgcacttgcgtcacaggtgcagtagagcgacgaggagtcatattagttgcccaaggcaacaggctagtgagctatgtggcctctgtgggtggctcacccccactggccatagccagccaggtgagcaggggagggcaggggtggggcccaggccagcaggagtcgagaccgggagaggaagcctacttgaggtcatggtgcacccgggtacctgagtgggactcgagcccaggcctccagcctccagggtgggaaccgtagttccctcatttgtaaaatggtccctctgtatgtgtgtggaaagcaccaagagtcaggacagactcgctgtatcagagtcaccctatggccttggacaagtcatgttctcctctcctaagcctcagtttccctacttgcaaaataaggatgggccggtagaatgagcccagggctcccttgcagctcggcctctgccctgggcctcatgtgaatggggcccgacctggctcccagcctgtgctccccgtcactacacagcaccactaagcaccccacggccagcccctcctctgaaaagcgaggacaacctctgcttgcattctccatcagctgctggaaatgagaaatgtggtgtgagagggagcccgcaccaggatgctgctaagggctctcccagcacaagcccattcctgggagctgtggcacaacaccatggggttcctgggactgtgcgctttcatccccaaattttgactccagcagactcaaggtcatccacagaagggtgaggggaggggtctctgctccctcctcagacctcccagacagagcacaatgacaagagcaggagccaaggaagtttatttactctactgggtgacaggagggcagagtgctccagaggagacccagatacatcaaccaaggacttccctgagatttggctttgctcttccaggcctgcacatgctgcgtgatgaaatgaggcctgcctagacatctgtgagggcctcgagggctgctgcctcgactttctccctagctaagtccacccgtccagggacacagccagggcactgctctgtgctgacttccactgcagccaagggtcaaaatgaagcatctgcggaggccaggactccttggcatcggacacagtcaggggaaaagccaccctgactctgcaggacagagggtctagggtcatttggcaggagaacactggtgtgccaagggaagcgagcatgatttctggagtggactacatgcatggtctggagttcagtaaactggaaagtttcacccccaagtcttaatttaatcaaaattgctgaactctgttcaatcttcattgttaaaagcagctttaaagctgggtgatttcttagtcaaatgtataacgaagcttttacttatcaatttctttttgggagggggcatgggctgaaatacatcttgtgctcaataaacctccccacatcaatatttcaaagcactttctaggttacaataatgacatttcaattccatatacgcatacatagaatatatatttttaaacagagtgggtcttaagagtatacttggaaccctcggagtcctccatggacaagaacagggtggcccatggacttccagccaaaggctccactgtggggctgctttggggagagactcacagctggacttctctatccgaccatgcaatgttagccagcaccaattacccacaatgctttgcccataagagatagaaataatggaactcacaggaagaaacagtattgataacatacacaggcttacagaggccaggcccagtaattaccatgagacagaagcctacaggtggcggtgctttgactgggctgggattattgatacattactgatacatcacttcttttataagcatatgtaaaacgagtgctactgaaagtcgaaggacagcttccggggagtcatgaactctttcactatctcatccgtgacctccttgcgccgggcctggtgctctgcgatcaagggctgcagaacctctatgagtgccttcttgagctcaccggtgagcatggctccgctggtgtaatcctgcccggagggagacagccacgtgagagatggctccacatgtcctgagcggctccttcctgcctcgggcaccagctcagcccacaccacccatgcagagcctggcacgtgggtggcactcagaagtgagatctgttgttaccacaacaataacctataccttcagctacacttttcctaaaacggctagaaacctggctctgacgatagccatgacttggcctctcacagtgaaagggccaatggggagggcagtccccacccctaccgatgctaggggccattcccccaggcactaaacaacaacaattcctggcagccttatggcttctgtaaaatcttgctaatttttttttttttgagatggagtctcactctgttgccaggttggagtgcagtggcatgatctcagctcactgcaacctccgcctcccaggttcaagtgattctcctgcctcagcctcctgagtagctgggattacaggtgcctgccaccacgcctggctaatttttgtatttttagtagagatgggatttcaccatattggccaggctggtctcgatctcctgacctcgtgatccactccccccacctgcctcggcctcccaaagtgctaggattacaggcgtgagccactgcgcccagccaaatcttgctaattttttctttttctgattgtactgcatgctcattaagcaaatttaataaagtacccaaaccacaaagcagcagcaaagtaaagaaaaatcacctacaaattgcccacctgaaaaatgcccagaggtgggtctcccgctaacatttggtagattttcttcacatttctttccctgtgcatttcatttaaacatagttaactcctccctgagttttcatttggtatccttttttcactatcataggcatattttcctgtgtcactaaaacttttttttttttaaaagaaatgagggtcttggctggacgcggtggtcacagctgtaatccaagcactttgggaggccaaggcgggtggatcacgaggtcgggaggtcgagaccatcttgaataagacggtaaaaccctgtctctactaaaaatacaaaaaaattagccgggcatggtggcgggtgcctgtagtcccagctactcgggaggctgaggcaggagaatggtgtgaacccgggaggcagagcttgcagtgagccgagattgcgccactgcactccagcctgggtgacagagcaggactctgtctcaaaaaaaaaaaaaaaagaaagaaatgagggtcttgctatgtcgcccaggctggatttgaactcctgggctcaagggatcctcctgtctcagcttcccaagtagcaggggctacagatgtgtgccaccatgccctgcatatgaacacttaaaatagttcatgcccgcataataatccaccctgtaacaattctaatttaacgtttcctctgttgtactgagtctgtgttgaactttttgctattatcatttttaacatctttgtgtggaaagctttctcttactcaggattatttccttggaaaaaatctaagaatgagaaaacctgaggagaagctctgaacatttttgggctctttgtacccagtaccaaactgcttcctgaggctgtgctgataaacactctgctcacttgagtgtgccttgaagcatctgcttcataatcactgaaaatagtcaatggcaacacaaaagcccctactaattctatactcaactgtcttagctttgatcacgttaacttacatttctctgatgactaataaagcaagactgttttgggtggctcctaaatgaatagtgatttgtatctgctctttcgagatttgttcatgaggcttctgagcccaggcctaaaaaccatgagggcgagtctactcagttttcaccttgtttcagttgagcacctccgaccaagccttcatgcctggctgttggagccttccaggccccatgggcaggagtgggtggcaggaggcggctgtgggcccttggggttccctgctcaccttcctgatctgctcgagcttgtcgtcgtcctcgaggaagaaggtcaggtacatgaaagacacgtccacatcacagttgcccccaaactgcctgtgctcctcgatggtgtctctccctccagaaaacgcatgcttattgacctgcaccagaagaggacacagacacgctcctcagtcctgctcatcctgtgcctggacactggctagaagcccaagtgtggaagtcagaggtgtgagtgctgtcagattctggaccagggaaaggccaaggcgcacagccggtcgggggcgcacagccagtgggggacccactgctgttcttcctgtgaggcttgggtgtgagctactgtggggctcactgcaggagaggtgggggcagatgagctttgaaccccccatcctcggagacacaggagaatagagttgggaaagccaaggcactgattgaactgaaacctgggacagacaagttcctcaggtaacaagcgtcagaaaaaggatgggtaaggccagacatggtagcttgtgccagtaatctcagcattttgggaggctgaggggggaggatcgattgaggccaggaggtcaagaccagtctgggtaacttagtgagccctcctctctgccaaaaaaaaaaaaaaaaaggaattagctggtgtggtgacgtgcgcctgtagtcctagcgactcgggaggctgaggtggaaggatcgctcagactcaggagtttgaggttatagtggactgtgattgcatcactgcacgccagcctcggcgacagagcaagaccttgtttctaaaataataaaaactaaaaaaataaataaataaaagaaaaaggatgagtaagtcatcctcagagtaagggagatggcaggaagggcagcctctcttagggataggtactgcagtgttaatggggacaggaaagcagtggccagccccacacagaaagcataacaagaaggcacagggtaaggcagtaagggaaggcaaacccacgagaagtgctgtgcagggagaggggcctgcaggcaggtcttcacttacaaacaggcaacactgtcagagctgaaaaactcagaaacacaatgacttttaggaattgttaaagataatcacggggtaattaaggctaataaaagccagaacaaataggtgaaactccttcaacattctttcagtgagcatctgagaaaatgtcaccctaattttttttttttagataggatctccagtctgttgcccaggctggagtgcagtggtgtgatcatggctcactgcagccttgacctcctggtctcaggttaccttcctgcctcagcctcctgagtagctaggagtataggtgtgtgccaccagcctggctaattttttggtattttttgtagagaccaggttttgtcgtgtagtccagtctggtcttgaactcctgggctcaagtgatctgcctgccttggcctcccgaagtgctgggattacaggtgtgagtcactgtgctcagccccttaacttttttttttgtcaccatgcccggctaattttgta

SEQ ID NO: 97817 - DNA, 28615 bp, Homo sapiens
catattttctgtatttaagaaagtcagtgtaagggcagggttggtgatctcattggcatggggcagcagcaggttcaagtccagcggctgctagtgatatacagtgggccttctaatctgctgtgtggttatttcctcagtttcagaatgtatactgagaacagatatattcagcaagtggcagaatccacccattggtctcctggcaaagtaactaaggattattattataggaaagatcaaacggaagccagcaaaactgcctttaccaaccaatacagcaaactaaaaatattactgcattcctggagggattgcagagattactgcctacatcaacggcatgaaagatatgagggtaatgatgacttccatgtcgcattcaactcacctatgtggtgtatgcagaagacaatggattctggagattgagaatggattatgccaaaattaataaggctgtggctccaacagcagccatggttccagctgtaatttcattaataagacagaacacatgccctggcatctggcttcagctattgatctgctgaatgttttattctccatacccatgtacctgttattatagcataggggaatagtatagcacagtaaaagcagtttgctgagccagcaatgtatctttattctcccacctcagagctatatctactctctagccctaatctaggctgcagggatcctgattcccttttcattccaccagacattacactagctctctgcattgatgatatcatgcttgtctgacctgctgagcaagaagcagcagtagcagctactatagacaaactgctaagagagacacttgccagaggatagaagataaatcccataaaaattcagaggcctgacaccttggtgagagtcaaagggtatggggcatgttgagatatctcttctaaagtgaaggataagtttctatatctggcccctcctattactaagagagcagcacagagcctaatggactacttggatttgggaggcaacatacacctaatttaccaagtaaccccaaaacttgccggttttgagtaggacctcgaacaagaggtaacgccatgatacaatcttctcttaccattgagccatatgacccaacagatttgatggtgctgtaagtttgtgatgaatgcagatgttatatgacacctttggcctatagatgagtcacaacaaagatgataaggattttagagcaaagctctttgccattatctacagagaactattaccctttcagaaacaacttctgggttgctcctgggtcttacaagagactaagttactatgtgacctgtgctgcctatcatcaaccaggtgtcatccgacccatcaattcatcaggcaggcctccatcatcacaatggaagtggtatgtgccaaagtgagcaggttctaagtgaaggcgtgaacaagaagtctgaatgctcatgcaccatgctcccctttgcctcctcctcctcaacctgtagctataacctcatggtgggattcagtgttactaagggaaaaaaaaatgcagacctaatttacaaaagattctgcatgatatattgtcactacctgaaagtgaacaactaaagcactctagcatctctccagagtgatcctgaaaaacattggagatggaaaattctcccagtcagcagtaagcagtccacatagttattcattttgccagaggaatacatccacactattataagcaatggttaatgattagcaggatggttagcaacttggaaggtagcaaataggaaaactggtggcaatgaggtctgaggaagagatatatgtatagacctctctgaatggtcagagtgtgaaggtatttgtgtcccatgtgaatgctcattaaaaacaacttccacaaagtataatcataattaatcaggtagacaagatgacctggacattgaccacacttgtccttgcacaacgaagtcaagaacaaagtgccttctgcaacatggactgccactcacgaagacccatctggctacatccagagctaagtgctcaacctgcaaacagctcataccaaccttgagttccaatggaggcaccattctctgtggggacagacagatgcttgatggcaaagtgaccgcattggaaccgtctataatgaaagaggcagcactttgttctcactgatacagatgcttactccggatatgaatttaccatacctgcctgcagtgctctatcatgtccaccatccaggaattcacggaattcctactgattgtcatcgtattccccaccaaattacttctgaccaaagaactcatttacagcaaacaaagcacaacagaaggctaatgttcaagatattaactggtctaactatgttcaccaacaacctgcagcagctagcctgagaaaataatggagtggcattttgcagactcaattatgctgccagctgggtatcagcactttaagggctggactagtagcctccaggatatggcatgctatacatcagtgaatagtgctgtttctcccattgccacgattcacgggaatcagcggtggaaatgggagtggctcttctattacccttagtgatccgctagtgaaatttttgcttcccatccttgaaacatcggactcttgctggcctagaggtcttggttaccaagaaagaaatgcttgtaccaggggaaaaagcaatagttccattaaactggaagttgactgccacttggccactttgggttcctcatgccaacaaatgaacaggcaaagaaggcgattactatacttgctggggtaagtgatcctgactattaaggggaaatcagatagctactacactatagggataaggaagagtatgtctggaaagcagaagatcctctagtgcacctctcagtattcccttaccttgtgattaaagttaattgaaaactataataaccaaatataggaaactactaaggcaagtagtccccaccaagcaaagacccattaccaactgagaaccaaggaatacagaatgggtagttgaagaaggcagttataaagtacaagctatgatcacatgaccaattgaaaaacaagaactgtaatagctataagtctttcttgctttttaaaatttgtatataaaccaagtttgggtttttccttttatttggtccctctccgatacattacagtattaccaaggaggacatgattcagcaagaagagaaatgagcatcacccaaagacgaataaagataatttgtacctgctcttttggggaaggggtcagtgtatactcagcagtaagagaaataggcaaaagcatgattccgctattgcctttatttggacacaaataaggtaaaaattagacacaaaaggacaaatgttatatgattccatttatatgaggtacctaaaatagtcaagaaacagaaagtagaatagtggctatcagggattaggagaagagaagtaatggaaagttacggattaatgagtatagaattttagtctggatagatgaaaaagctctggagatggatagtggtgacgactgcacaacagtctaaatgcatttaatgccaatgaattattcacttaataatggttagcatggcaaagtttgtaatgtgtattttacttcaataaaaaagctgaaaaaaatcatttctataatcagaatttttaaaacaaactttttcaaatatcatacaaacagaaatagaacagaaggaagaagaaaatgtaatcattgctactaacctgaaacggacgccattctttttctttccaaatttgtttctaaaataatccaaatttctttctaaaaataaaagcacaacagtgacaacaagtttttaaaaatagtactattaatgatgttcactcaacagtaatctgtcattcctaagcacagaaaatgttagaaagtaaattatatattgcagtgacctttcaaataagaaccacatggttcttttgacactaattttttatggaaaactctatatttcagcttaataacccacaacactcagaacgactaactctctagatttcagagaagtgtccaaagtcacataaacgtatacatgacaaatacagtagcaatgacactcagcaaacatccacaagatacaaagtgatgtaacaaaaaacagcaaacattcaacaggtctagcaccaattgctatgtgactaaattactatgttaggcaaagttgcatatgctgttcctccaagcctctttccctacctgtaaaactgggaggatggcaatcttataaataagttggatagattcaaatgtaccagattaagcaaaatacatcaacataaataataaaattaatcatctaacattttattgagcccttgcgttaaagaattacaatataagcccaatcttaaaagagaaactggtattctacagaaaagctagattttctaagttagaggtggggggaggggaaaatggtttgtaatgatttctaagtatctatgaatgactaaaacctaagcatgcatatggacaagtggaaaatggggctggagagtagaaactttaaattccccataatcctaaaaacacctcttctatctctctaatatggacattttctaaaactaagatgctctccaaaagtcacttctgcaacacctatccttagactgctgaccttacgccctttctacacagaattctgaagccaccactaggccggaaagataggctgactcttttttgccttgctaaagaatgtggaataaccacaccattaaaagaaggctaaataggagagtaaaccaaggatttctaattcttgatctatacaaacatctcttcacgtaatgaaaatgtaacattccttccatagactgtaaggtcctttagcagggctggggttcaatctcttcacctttgtatccgcacagcccaggaaaatgccttgatgtagtgagggctcaggtttgctaaggtagcaggggctgtttctacccttatgaaaagacacagtctatatccaattctcccccacgattttaaatgactcctttgattatgcggttaaaagactgctccttcccaaaatgatgtgatttaacagcaaaagatatctcaacataaaatgtatccagaaattgaactacagcaggtctgtcactcagcagtataagctaggcatccacaggaagaatgttacagggtgacagccagtcatcaatgttggaggaaacgccactgagataccataggctaaatcctctctctccccgccacctgcatttagaggcaatagtaatttaatattaataacgcccgcccttccgctactgtgaagcagggggtggaagaagcatccccagtagtatttaccaacaaatggcagctgctaataaacaggctttggtggccaatcctcctgcatggaaaagaatggggagatcagaagaccggtcagcaggcgaacgtgcccctaaaggcccgagttctcagagcagggcagtgattaactttccggtttctcctccgccaatgtgtgggcgaaaggaagtgatccgctacagaccggcctcgccctgcagcaggaaagggaaggatgaaacaaaaagcgcacacccttgacccttcaaagctgtaacagtagttatcccagagcctctccccaccgagaagcccagtctaactctccggtgtttgactgtccggtgtccgactgtcctgtgtccgactctccgatctccgactctcggatctccgacaccaaagcacccaggcctcgagcagatctttccgctactcgggagtaaaatcttcccgccagccagctgagagcatccacccttccgggtcggtccgttcagccaatcacagataactcccttctctaattggtcaaggggtgtggtcaccatgagcgtcaccgaacaacattacgagttattggttgagattggaagcaggtttcgccaataggaagcgctcttaaagcggcagtgagggtggctgcgtgtttccggaagacgtggcggctctcgcctgggctgtttcccggcttcatttctcccgactcagcttcccaccctgggctttccgasgtgctktcgccgctgtccccaccactgcagccatgatctccttaacggacacgcagagtaagcacctgctccggggcccccgcctcgagccgcgcacacccatcgcccggctgggtctcgcccctccgccggggtcaatgaatgaagctctgggttgggggcggtggcctgcgagacagagctagggctgctggsaccctaagkggctgccttcgggatgccggggctagacttggactggcggacctgacctgggagaagagtctgtggggcagggtgggacgccctatgttgggaggggagctttagcccagagtctgtctcattccagggtcgcgctgatctcctcatccccagtgagatgggcgctttgttctaggggcttgccacaagagaaagtttgcgtggtgcccgcggcccactctcgggatcgtttatgcgcatgacacacttcgggtcctctacaagtccctggctggctggttatttgggaggcggtattttaaatgtcacctacagtaggctctttttgaaaatgtccttacgcttaaatgtggcattttgaatattcgctttttgccagtactgtaagcaaccttttagaagtctcttgaaacattctcacttttctacctgctaaagtttcaagcagtagagaaaagccactttgtgtgccattaaaggatatatttcgttagtattgtatattgtgctttgtggcttgttttattattttagcatcgctctctgcctgccacagagttctccaggcctatttcatctctaaagctagcattgatatcggtttccttttctttcattataatatttccactttcctactgctttttgttaatattaataatttttgtatttatgtctgcccaagctctgtacctcatattttgatgttcataagagtctctttttgtctcactttgctttatctgccacgcctttcatttcactccagttaactcagattttcaatattttaagacttaaacagtgaattgaagtgaaaaatagaagtttatttaaaatgccctattttaaagtggagtcttcttgtggagattcaagtcatggcagaccaacttcacagagcttctaaggcctcctacacacactgccaccccccaatcaggctgtcttccctcctgaggctggactggggctgcctcttggggccacctgccccaaggttgccgcccactttggtccattggcctggcctgttctgatcaaagaaaataaaagtgtagtcttgaggggataggaatctagtgtaataataattactggcaattatataaaggtattttctttcagttaaccatgtgctttcatgtgaatcattatgcataattcttataagagccctgtaaggctcacagaagcatgcccctttcataagttaaatgaggcacaaaagaaattgagtgcatggtcaaagaaaaagtgacagaaacaaaacttgatcccaggtgtgctggctcagaaaccttttgcactgtaccccactatcacctaagaagacttgatataaactttatttgagatctgagaataatctgtgcatagaaattatatttttgaagacttaatatagtgatgagtgcctgctttataaaaacaagagagtgggtttggactatgggcattctccctgagaagcattctcctcacttcattaaattttgtgagggcaatgaaattttactctttgctgttcacttgtcacatgttttaggtgaaacagtggattgaaacataaaacgattagtgaaccaaatgcattttggatttcaaattgtgtttgtgtgtgagtgtgtttaactgcagggattggccatcattcaagtgatttgtcaggattattctgggattttggtttttagagagtggccaagcactgctcagagtagaataaatggaaattcatgattattttaaggcattctaggactttcctcaccgccccaaaaaagacaagacttattcagaggggcggaggaggggcatgctgcctctaaatcttcatttcatcacattgtctaaaagcctagtgtgataattgcattctccagtacagttaatgttcaattgaattcttgcttgacttctgtttttcaaagggtatggtaagagagacaatgctgcttttaaaaaattgtgaataagatatcaaaatgctaacagtgtttgccattagattatgcgtgtctttccttatacaatttccacagtatgctccttatgttagacagattcgttttattaaattgtttttatattttttttaacttgtggacagttttttaaacatgtgggaggagtgaaggaagataagtttgttttactggatatgattccgatgggaagaaggcagctctatgcaaggcttttgatagccagagggcttatgaatgcatacggatagggaaaagggggatcctggaggtgagaaaaaggcacaatgaggccaatttgagacttttgaccagtgtggatcaggagctacttggcaatgtcattgccagtaccagttgtggcaaagatgttttgggcaatgtctcccgctggactgtactggataaagtagtggaatattttggttcccatgttgtagttgtaggaccattgtctgtggagtgagaagactggttgaatgctgacttcacagactgttgtacctgcctccataccaccagcacccacacacacatttttgctgcttctatgatcaagaacaagttactgaatacctctaggtccatggttgcacatatgaaccataggaccagtgctaccttttacctcacaattttgttaaagaaattataaaatttttgtataaacacttcataacacggtaaaccatactcagagattggcctttttgaccgcagttaatttttaatagttctacttggctatgttagataacaagctaatattaaacttgaatcccctaaaagatgcgtcccccagaagttcagaatactccagtgtccttgagtttcaygtaaccaaacacctttaacctaaaaaataaaaattctgtgggaagaggtatggcattaatggttaagcacatgagctttggattcaaaagaccttggttcgaatgcttatctagaagtgtggctttaggcaacttaagtcaactctctaaacttcaatttcctccatctttaaaaagatgtaattatacctgcattccagtagtattggaagtattaagttatatataaggtatgtgaagcacttcataaggcctaattcgtggtaaattctcagtacatagtrggtgtctttccatataccttcctttctaaaaacatctcagaatttttatgtaatcatcaaggttatttgtgaaatgatagaaattagtcatcttcaactaacaaagctgccgatgtttaatcctaactactaaatagttatttaatagaattttacttgctcttttgtccatattttyctctatgaaattrtgtccactatccaaatagttaatttggtaaattctcttaaggcctttgatcatgaaagtatcagcctcaaattttcataggaatgtgtgttgaattcacttaactggtgtatttatagaccaggtacctgaattattttagactaactttgggaacaaaaggtgtctgcaatggaagacactagttatcaggaaattgagcaggtggggaatgtagaaaaagctaaagttgataaaagttttcaagttatcagaacattttatatgacttaagagttttttaagtagctgtgacctagattttagctttctggagctgaggcaaaaaagttaagcaatagatcagaaatcagtgatagggtattttaaattgtgcttctaaaaatacggtggcttctactctgactcatctgtatgcagattgtgcttctaactaaactacggattaatggctattttctagaatcaaaactaaaatgatcaaggaggtaacttagtgaattgtgctttataacattaatagaagagtacatctgtcaccttagaagttaagacttttcatactaaaaaaataagacctagagaatgcacagtcaataaaagtattaattttatatacaagataaacatagactttaaagctcgtctaccacctcgtctaccactgtatattcagtacctggaacagttccttgcatctggcagttgatcaacaattctttgttttttaatgaaactaatgaaacatgaaaaacctagaatattaatattaggtaaaacagtattctttgaaacttyggagaggtgattttaggactctagaccaaatatttaagtagatttatagtttaggtaaatttgtagataagtccataataagtaatcaagaaattaaaagtgatgcctgaccttctgaaaatttggttttgagaatactggtaccatgattttcgaaatatttcttgttgccattgtgacaagcagtatataattggataaaggatattgattgtgcggacctaccataacatttctaatgcagtaragaaggaatcaattttaagaggaagaaagaactacagatattgtgcatttaaataataattatagaatgtgaaaggagataagtaattaaggaaacctatacatttatgtctgatgcgagagagcttttcaggaggaaaaaaacaaattacatattaaaaccaaaggtttagaatcccgatttatcttttttattatagctatgtctgagaaawgctatctcccatataaggcttagaaattttcattmatgttttaaattttgaaataatttgctgataattaatttgttataagagctaaataaatgtcattatgaagttaacctgcaatgttgggtacctgttttcttatacctatgaaaggaaaactggaaaattttcttagtttacagggatgttaatgtgactttaatttttctctacccttaaccatataccttatattgcagaaattggaatgggattaacaggatttggagtgtttttcctgttctttggaatgattctcttttttgacaaagcactactggctattggaaatgtgagtttttaaatatatattttaactaaatttataaggraattttaactrcgaatgaattaytatctgctattaaatttggggaaaataattcactattactcataagtaattcctgttacattctctatttccatcaggaatgaaacctgtcagctttctgtttaaataaaaggtaaacacttaatgaggttttctaattccataactactctgttaagtgtttgtcatgagatttacaatagattaaatgaaggctgcctctaaataggagttcaaaatagatgacttgatagtttcatgtcttgataaatcactaaagtatttttactttaaacatccaagacttcacatttgattcagctgcataagatagatttttttaacctttttaaaaatatatatttctatgttaatggttgacttgcttagaaagggatctatgttgtttatttggaatgtgtactatgctattcatgtgtggaggttatgatccagaaataaataataacccttctaaggtagtgaagacactgtatgtgtgtgtgtgtgtatatatatatatacacacacacatatatatttgggcttttaactggaaatgggaaaagataaagaatagcaaaattgttcaaaattgatgtcttaataaatgataatagcattagtatcctagaatatgaagcttaaccattaggcttaatatgtatttgtgcgaaatatttttcactaaagaatgttaatggggagggcaagtatttggaaagaaaacctggggaaagcaagctcttaatccatcaccatttcttgtccacagaatacattcaaaatatttgaaaacacatggttgtatttttatttctgctgccaccagatattctagaatttataaaactagaatcttcttggcttcacgttgtttcttctgctatcaacttagccatgtcaatatttctcccatccatagaaactcctgtagcctatgatgaatatttcagaaccaagaggaatacccttgggtgacatatttatgggcagctttcctctttatgccttgccaactcatctgcttgactaagccttcctcatccagctaaaactaggaaaactactgcagacacagatgccccttggtaacgtctaatctttctttgtttctctttttctccatttaatcaagatagaagaggaatgagacaagtggaacaaagctacaactttaaaatgcataacccactccttggttctgctgcttggttgtacattacagttctgtctggccagttgcccacattaaaagccaaacaaatgtgcttctttttttatatttrgctttgactttacgtttaaaatttatgcattgtgtttaattaccttttccgtgttgtattttctttctcttttaggttttatttgtagccggcttggcttttgtaattggtttagaaagaacattcagattcttcttccaaaaacataaaatgaaagctacaggtttttttctgggtggtgtatttgtagtccttattggttggcctttgataggcatgatcttcgaaatttatggattttttctcttgttcaggtaaggcatattrttgtctctttcagtaaatcagtgtgtcagatagttagtacaaaaactcagatatttgcatcagttggagtaagatgatgatcatttccttaaatggaattttatttaggttgaatcttatagatttagatgaagcaactataaaaatgttttatcacatgtgaatgattgcctaatggtataaattatcttgttttgtcagcacaataaagtttattttattggcattttaaggcaccatctttatgttggatatttgtatcaactaaatagtggtaggtaggtcggtcgatcgatcaatcggtaggtaggtaggtagatagatagatagatagatagatagatagatccagcattttggtgtgtagaatcttatacttcatagctactgctacttgatggaaatttatttagcacatatacgtattagaagattgtttaccaaatacactactatgggagattttgagcaggtaatattttgtaaatgccagttagcagataaacaatagtatgtgtatatatctatatgaaaatacctttggccaggtgcggtggctcacacctgtaatcccagcactttgggaggccgaggtgggcggatcacctgaggtcaggaggtcaagaccagcctggccagcatgatgaaaccccgtctctactaaaaattcaaaaattagctggccatgctggcaggcgcctgtaatcctagctactcgggaggctgaggcaggcgaattgtttgaacctgggaggcggaagttgcagtgagccgatcacaccattgcactccagcctaggcaatagagcgagactctgtctcaaaaaaaaaaaaaaaaaaaaaaaaaaaacagaaaagaaaataactttaagtagggttgagcttaattatttattccagaaatgcatatcctttgtcttctgtctgccaggcactgtattacccacaggagacataaaaataaattaagtaccaaatctgctttagaaaatctctcatttctattatggaaagtagactctaaaaataccaataggatatagtcataatgccattataaatgtgtatgcagaatattgtggaagcatgattaaaaaattagtaaattcaaggagaggtgagaaatgttaactgataaactgggctttgaagaatgggtaagaatttatcctataaacgagaaagggaacgacagttaacagaaggaacagacagggccataaaaacacacagcttgttstgaaaagaatgaatactcttatagaacaggagcatgtgatcagttgaaggaaatggttggtaatgaaactgaaaatgaagcctggagccaggttacaaactttctttgatgacttgttgagaaaagtataccttatcctgtaaccaaatttgggctgggggagcagtgtttggagaaggtcgggggagtggggcacagaggtttttaagccagaggtggtacaacagggtagatgttttaggaaggttgttctgatatcaggataaagtaggtattaaagagaaaaactgaagtcaggggagccagtcaagaggctgttaatacagtacagaatatacagtgataagactggaatcttggagtacttttgacattttagggtaggtggagaaaaagaagaaaacactagaagagactaggaaaagaggtgggagaagaactaggagtaaagatcatagtggctaagagagaaaagagtgaagaagagkttgttttggcagatgtatcttgcagcagaaaacttaagcaccttaagaagtaagaaaatcattggctttcccagttatgtgggggytttagtaatgaaggttaaaagccaaagctgatctttgagatgaataaaaaatgggaagtcttagtatcatcgacaagcttggagtaatacacaggtttcgtggtttagagagctttgtggtataaatactagtttttgttgttgggttttgttgtgttctgagatattctgagctggagatttagtgccaagggtctttgatgttgtttttctagatatttataaccctaaataatggcatttgaaatcacacatttttatgttttaaaacaatacttaaaacaaaataaatgatcktttgaattcattactactagaaaatgattgtgattttctttgaaacacgcacatacaccatcaacataaatacttgtctaatttaaaaattctgctttctgtttaattctttattttgacttctgcagatccataacagaatcttattgcttaacttctgaattctattcattgtagtattttcatccctatctaactctgtgaagaaaacagctttttttctgtactcgtcttaccacaatcaacacagaagactgctgtgaccaaatgggtggggggttttcccgatatcgcaatcagttagttgtctgcaacagacaacagctgggtgtcctcccaatatagttctgatactgtctacatggagatagctccagatcacacaggttgagggctcagtcccacaactgtcctccactcccaatgatgccagccacaagccccaggttgttttacccatgcttctgactgatcagctctaagttggggttcccacgatcccctgtttggatcagactaatttactagagaggctcacagagctcaaggaaacactgatgtttactagtttattataaagsatattrcaaaggatacaaataaagagatgcatagggcaaggaaaggggggagggtcgcagatccccccccaccctccccaacccaccatcctccaagaacatccttgtgttcagctatccggaagctccctgaacactgtccttttgggtttttatggaggcttcattactaggcatgaytgattaaattattggccatgrgtgaccagcttcacagcccccctccccttcgtggaggttaggaggtagggctcagatttccagccctctaatcttgccttggtctttctggtgaccagcccccatcctgaagctgcctaggggctgccaaccattgatgataactcattagtatacaaaaagacatcaccttgtagagactcttaagtattttaggagttgtaagccagaaaatgaggtcaaagaccaaatatatatttcacagtatcactacatattttaagacccaggaaaagtttagtttctttgcatttttaaaataaactatttcattctcttcctatactgaggtagcttaactgatctactgtcaattttaaactggttagaagctgtttaacttctgtagacttgtatttctaccaagaaagaatgagacatactgtgaggatcagtatctggcaggtagtctcttagtgttaactaaatgttttgaccyttagtacttacttagtaaatgatagctattattattttcatggttctacacatatggtctcaacagcccctttctttttatcagtttcaccccacacaactcatagttggagaaatcttcagcagttgagctaactcataatctgagttatatatagctaggcctcatgtacttgtcacatttttaccaacaatcacaaaatttttaattaagtttgtakttatttctaagtttgaagaccctcaattattcagaattttaacaggatactttctttttccttggttagcaattattttgaaaatagaaaatgtgtaaatattaagarccttttttttccctctcccaggggcttctttcctgtcrttgttggctttattagaagagtgccagtccttggatccctcctaaatttacctggaattagatcagtaagtaatcatgtatattttaggccaacaaaatacgtattttgatgctttttacttctagaaatttgagtaattgatacttggttaattgctgagttttgtattatgatatagttacttcacatagatcatgagtaccatgaagaccaaaaaataattattgctaaacctataaaatgtgaaattttgttttaccgtatccatttctggatccatattctctattttttaatgttactcagatttgatatgctatgctacctttctctttgagagttcagggcattttttatttaacttttatataatctctaattttagaagcaataatgtaaaaaggaaaccattatttcctacaaatattttgtttctcagactgtatcaccaatagactagattcagacaattaaataaggccgggtgtggtggctcacaccctgcactttgggaggctgaggtgggtgaattgcttgagcctaggagttcgagaccagcctgggcaacatggtgaaaccccatctctacccccgcaaatacaaaaattagctgggtgtgatggtatgcctgtagtcccagctactcgagagactgaggtgagaggattggcttgggcctagggggtcaaggctgcagtgagccatgattgtgccactgcactttagcctgggtgggtgacacagtaagaccctgtctcaaaaaaaaaaaaaaaaaaaagagttgaataaagcactattatactgggattcagatggtaagagtctattcccagctctgtttacagtttgaacaagcttgtcaaatttgttttccagtgtgtgccttggtttccaccttgataaaataaagggaatcaaatcagacaagagttaaagagaatgttttcaaagttaacaaatagagtttcttccttttattcaatattcattcaacaaatgtttcgtactaaactgctaccttgaaggttgtaacatcttttggtggagtcttagaaggccattcagaattcagcttattttttgccaccttgggaaaagctttcctgactccctgtggctgactcggggtgtgcttctataacattcctgtgcacaactctatcatagcatttacctctgtttttttctttgtttttgttttttcttagagagagtctcaaactcttgggctcaagcaatgcccccacctcagcctcccaaagtgctgggattacaggtgtgagccaccacacccagccttacctctcatttaattgtcaaaaaaaaaaggcttcaggccatgcatggtggttcactcctgtaattccagcactttgggaggccaaggtggaaggattgcttgaaccaggagatcaaggctgtgttaagcgatgctcacaccgccacactatagcctgggcaatagggcaaaaccttgtctcaaacaaaaaagaaaaaagagaaaggaaaggagaaagggaggcacttccatgtaaaactacagtccttgagggcagagacaggttgtattttagtcattgttctatccccagtgacccagcataatatctgccgtataatggaaactcaaaatattttctgctaagcaagtgagtgaagratggcattttgttgacctcagggaacttgctcaatttcaagacaagaccagatgactgtctcttagcctacctcctcagtttcaaaactaaacaaaatccttaatttctaaaagaatctaggtgatctaraattcagctgagttggctacaatccttttggctctaggtcagacccatatcagaagtattcatatccttctttggattggtttcatagatccaactctgtcctaaataactaggataaactagctttataggaaaacttaaaagactacaagttccagttaggttcagggaagttaatcaactttctaaagttgttcrcagatttttatagatgtttctagagagaaagttcatagcattttattgaatgctcaaagagctaaagaatggcttacctatggaagaataagtaccactataagcctaatcccatttccatccccagggtaattttagggtcagaaccttacagccaagacaatctaaatatttcaagttacctttggagagagaatattgtgctttctctccacttaaatttaccttaaaattctaataaatccatgaattctttgagagcaacttttagtttcagtggccagccacctgtttgtgataatataacaaaatgttggaatgtaggcttataggggtatactctgatttcatttgcattaatctgcaaattcatacagtggtcagtgttatttatacctagaatggcttttgaatgtactgaaacttctagttacagagttgtaatcattatttgtgcccttaatttaaggattctcaagaatttgcataaatggacacccaatacaatagaatatgtttyttatcgttattcatcatgataagtgcttatgtaaacatgtgaatcgtgaaataaaataaatgatcagatgattactagaatttgatagtataaccacctgggttatataacttttaatgtctctaccaattatatacaatatcagtctttacatcaccatctggaatgttaaaaaaaaaaaaaaagcccaactgctttatgtttggggtggagtaaccaaagtaaataaccacttacagtaatgtgtgttaaaatttatattcaataattataaatttatgcttacatcattaaatctatctttaatgtcattaccactttcaatccaaagtccagaatacacatttaaagtatttttagtcaataactgttgttaactattgaacttaatggagttaaatctgtttgtccaaagactacataggcccagaagagatccacagtaatggtcagttgaaatatcttattgggttcattaatgcatgaatggctgacatttcagttttttttatgtttttattttttattttttgttaagctagcagtgttatcttcatcttatacaatttctttattcattgtgttgcatttttcatgttgcacccttaaattcatatgtataacatgtcatgcaaaaaacaacttttagaaaaaaaaattttatacacgtttatgtatcagaagatgatggtgagtagtactggattagtcattgtcagtcataccttaaatttccacaactcttcttgtaaggctgggtttttaaaatcaacattttaaatattgatataatgttttataatgttccgggctttctttaattctctgtttttcttctccttacagtttgtagataaagttggagaaagcaacaatatggtataacaacaagtgaatttgaagactcatttaaaatattgtgttatttataaagtcatttgaagaatattcagcacaaaattaaattacatgaaatagcttgtaatgttctttacaggagtttaaaacgtatagcctacaaagtaccagcagcaaattagcaaagaagcagtgaaaacaggcttctactcaagtgaactaagaagaagtcagcaagcaaactgagagaggtgaaatccatgttaatgatgcttaagaaactcttgaaggctatttgtgttgtttttccacaatgtgcgaaactcagccatccttagagaactgtggtgcctgtttcttttctttttattttgaaggctcaggagcatccataggcatttgctttttagaartgtccactgcaatggcaaaaatatttccagttgcactgtatctctggaagtgatgcatgaattcgattggattgtgtcattttaaagtattaaaaccaaggaaaccccaattttgatgtatggattacttttttttgtaaacatggttaaaataaaacttytgtggttcttctgaatcttaatatttcaaagccaggtgaaaatctgaactagatattctttgttggaatatgcaaaggtcattctttactaacttttagttactaaattatagctaagttttgtcagcagcatactccggaaagtctcatacttcttgggagtctgccctcctaagtatctgtctatatcattcattacgtgtaagtatttaacaaaaaagcattcttgaccatgaatgaagtagtttgtttcatagcttgtctcattgaatagtattattgaagatactaaatgatgcaaaccaaatggattttttccatgtcatgatgtaatttttctttcttctttcttttttttaaattttagcagtggcttattatttgtttttcataaattaaaataacttttgataatgtttactttaagacatgtaacatgttaaaaggttaaacttatggctgtttttaaagggctattcatttaatctgagttttcccttattttcagctttttcctagcatataatagtcattaagcatgacatatccttcatatgatcactcatcttgagttaattagaaaatacctgagttcacgtgctaaagtcatttcactgtaataaactgactatggtttcttaagaacatgacactaaaaaaaaagtgktttttttccaccgttgctgattattagacagtaggaaatagctgttttctttagttttacaagatgtgacagctttagtggtagatgtagggaaacatttcaacagccatagtactatttgttttaccactgattgcactattttgtttttttaacagttgcaaagctttttaatgcataaaagtataattgaaatctgtggtatttatttacaaacatgtctacaaaaatagattacagcttattttatttttagttaaatctcttaatacacagagaactcccaatcttgctcatctaaataaggaaagacttggtgtatagtgtgatggtttagtcttaaggattaagacatttttggtacttgcatttgacttacgatgtwtctgtgaaaatgggatgatattgacaaatggagactcctacctcaatagttaatggaataataagaggctactgttgtgtctaatgttcttcaaaaaagtaatatcctcacttggagagtgtcaaatacatactttgaggattgactttatataaggtgccctgtagaamtctgttacacatatttttgacccatattatttacaatgtcttgataattctacctttttagagcaagaatagtatctgctaatgtaagggacatctgtatttaactcctttgtagacatgaatttctatcaaaatgttctttgcactgtaacagagattccttttttcaataatcttaattcaaaagcattattagacttgaaagggtttgataatctcccagtccttagtaaagattgagagaggctggagcagttttcagttttaaatgagtctgcagttaatatcaaatgtgagtttgggactgcctggcaacatttatatttcttattcagaacccttgatgagactatttttaaacatactagtctgctgatagaaagcactatacatcctattgtttctttctttccaaaatcagccttctgtctgtaacaaaaatgtactttatagagatggaggaaaaggtctaatactacatagccttaagtgtttctgtcattgttcaagtgtattttctgtaacagaaacatatttggaatgtttttcttttccccttataaattgtaattcctgaaatactgctgctttaaaaagtcccactgtcagattatattatctaacaattgaatattgtaaatatacttgtcttacctctcaataaaagggtacttttctattaattggtggtcaagtatatctgtgttatgaagttctaaaagctaatttagcattgcaaaataacctcatttttaaaaaattagccttatatgcagtgttytrtttatcaaatgatcttcacatctttcatttccaaattgttgaaatgtactaatgaatacaaatagacttcaagtaagcaaaaatgttcttaattttgaaaactgtaaaataaagtcacttaccttgggcaatatgctattttttaaaaatcagactcccagtttgtatattatgttattcaatagacattttctgagtaccccttgaatactaaaagtcctgtgttgaatgtgggagacccaggagaacaagatatgtgccatctgctcattaagtgcttagaatgttaacattgcttttaaattcttagccgtatttccacataacttgtcctgacttacactgcaaacaaatggtggtagaagaatttgcggtcgaaacaccccaacctcttatttttctcccagtcaagagttactagaactattcaaccttcagctgtgttgaatagttttagtaactcttgactgggagaaaagctgtgtgattggttcgcattttcaaaagatgtctggaggaaaaaaaataataccagctttaactctgggaggtttgttttgagatgtaatttcttttgcaagtctgtatatgtattcaacttaatgtagcgtatgtttttggtttctttgtggcagggggaagagaattgtttttaatgtaggcctagggatttagaactgtcactgctatttgtgttgtctggaagcctgccaccaaatctgtattgccacaggcagttggggtagttttctgaaagctgctatgattgctaccattaattgcaaagtttaaaaagcggtgagggaatttagaaattagaggagaaatacttatatattttttctcaggatggaaaggatcttaagtttttctcacctaaataagaccacaacacctacattgttttaactgtaaattttattaaggccgaaaaaaaacactggccaagtctaccacttaacatacccagtaagtatttgttgaattcactaattaagctgcaaatccagactattgttgggtaaacgggaagtcttgaatctgttattaaatatccagcatatttctctaatcttgacctgagccaaaaggccccaacctcagttcttctgttacctgtatccatgtaggagattggacactagcagcatgcccaaaattcttcattgactaacatgcgtttccatgaccttagctttactcaattctcaaggcctgattaaaatgtcactgctgtcatatctttccttaccagctaggcccaaacagttgctccttccctgtcctctcatacaactttccacttgctttgtattgatttggttatggaaaagattcttgaggttcgaaatctcctctttgatttgtatctccagttcctggcatttagtgggtgcccagtaagtggtttaatgagtgaaagttcattcttccagctcttctggtgctggccccactgatcacttcttttttttgtttgttcgtttttgttttttgagacttgctcttgtcacccaggctggagtgcagtggcatgatcttggctcactgcagccttcaccttctgggttcaagtgattctcccgcctcagcctcctgagtagctgggattacaggcacccgccaccacacctggctaatttttgtatttctagtagagatggggttttgccatgttagccaggctggtcccgaactcctgacctcgtgatctgcccacctcggcctcccaaagtgctgggattacaggcttgagccaccgtgcccggcctgatcacttctaatatattgaaatcagcctctatcagccgtaaagttaaatctaatgatctggcccccgctgaagtccacctttctacttcacattccttaggactttactgtacccagtagctcgtcaacggagagagggatcatagataaaagaaagaccatgcctccagattggctgcccttcttcacaaaaaagggaggccgctggggaaaccagaagctactcctaaagttttgaggctggtgtgaatcactgatactcagttttcctttctttccaataggaaatgacgagtttcttgggttttgttggtcactggagctggtattacaaagtaaaattatcccaaagagaaaatgaaatttattccttaagtgacaaaagccagaaataataccctatgacaagagggatcacttgcacgatggtcttttacatatatgaattaatactgataataatgggtaattgaatccctgaagaagactcgtctgatgtgatgtgatcccatgaggtgactatgagttctgtggcggtataaagaccagtcttggtgctaaaacactaactctaccatttagtgtcatgtcaagtcaaactctatgagtatgctcttaagtgaaattcaggatctactgcatgaatttggtgtgaaaaatgaatgtaacaatgggtgtcaaagggctttctcaaatttaaagtgttgtgaaaataacatgtgttattgtcctgagagtatttctggcccagtgatatagattagaagtaggacaactaactatcccatcttcctattgatcacacctggcaacagctggtattcaacctaattcacattgtaggattatgggatcattcttcacatttctgagctaccagtgtttatatggctcaacatttccaaaatgttgagtattagtgttttgttgtttgcatcttgatccaagacctttttgctatatttgtcctctgtctttgtgctgctcctacgtagcatacaccattagcagccatgtcttatgaattatcctgtagtaatggtgggtgtatattaattcatatgcactattctgtcattttggaaatgaatggtaaaacattttaatccagaagttagtatgaaattggtgaacttgagtcttccctgcttcacttttatctaccccaactccccctaaacagtacttatcttaactctcctcagaaaaccaatatcttcatattttctcctccttctccctatctgcagttctggagaaaggatctgaaacagtctgtaaacaaagaattgcaatattatctgcttcagggtgtgagctcatcgggaattaacgtgttaagtaaaaggaaacccaggttaagacattggccaattaatgggaagttttattttggatagcaggccttcttaatgcccctaaagcccctcctaaaactggtaaccctttggggaaatgacttctttcatctgatgatgagacagctggcctaaggggctgaatacaagccccacagaagattgaacccatatctttattcatgttatccaacccaaattctctctatgctgtcatcaaaaagtaatttaggcattttgtaccataatagccatattgtccagataaccttatccaagacagcagctgttttccttgtgaacacaataatcactgaccttgaaagaatgtcatttaaacagtgacaggtgatcactggttaaataggttctgggcactctacagtcgactacaagaatccaggtaacagtgatgaattcaaaacagtcttcattgaatgtgcctttaaaaaaggcttaaaagaccatttgttcaacatctgcttgctcatactgtcaggagaataaaattcaagggctttacctatcttggatttttgttgttgtgtgttttgttttgttttataccaaatattgtaacttaacccatgtcttgttttggacctgtaaaaaccctaaaagctttgtgatttaacaaaaacattctattggggttcagtgccctttggaaatccttttagaagtaacacattctagcatgttactcttgataagactgcaatattgataatatgtcaaaaccattcccttcttttgtgcacattaaactgaaaatggcagctttgacgtaagacatctgcttgtgaattcattagctaaactattatcagcaaagcacatttatttattcttaaaattgtaagttcaaagcacattttattggtgattcattttcctgctcctcttcccaaaacctttgtgttttgggaacaaaaaggcatttgacttatttttcaggtaacctagtaatcaggtttcatgtgtgactatttaaaatataaacacagcatatttcacttcttttatcgctcttttttgaaggaaattgctacaatccttagaaatgaaaatcctaaaatctcacatttgaagcattattaaaatagcatccagataaccttttagtcagtttttatctttctcctctcctacgacagtagaaatagaacattacactaatgcctctagttttttcctgctttgctgttttccttgaagacagtaaatagttctcaagtttctactcacatactactttctatattccattctcatttactaaccaaacctcagttttcctgtctgcatatcagtgtcaagtctaaatatcagtgcccaaactccaatctcttttccaagtatttgcaggtagatagcatgagccttttaaacttcaatcccaaatgaaacttactggttctctcctcagagtccctgctatttctgtctagccattcttccagccacacaaactctgaggtttagttttcgtcacttcttatacccctaaatctttgttactcaaaatgtccaagggtcaatagcatctatcaccatcacctgggagtctattagaaatgcagaatttcaggccccactccaggtatactgaatcagaatctgcattttaacaaattctcaggtgattcccatgcacattaatacctgaaaaccactgccctaactgagaaggaactgctatgacctaaatgtttgtgtcctaccaaaattcatatgctaaaatcctaaacctcaatatgatggtagggcctttgggacatgactaggtcataagggtggagccctcataaatgggattaatgtccttataaaagcattccaaagagtttgttttcccctcccacccatgtaagaacacagcagagaagacaacagtctgcaacccagaaaagggccctcaccagaacccaaccatgctgactggactttgatcttggacttcccagctttcagagttgagtaaggaatttccattgagtaagctacccagtttgttgtattttgctatagcagcttgaatggactaagagagggaccatctctttctttcatggtaacttagtatgtggtggatactcaggtccttgttcaatatctgcctatgtatatagatcttttaactgaatattgatatacttggaatcctatccctcttgccttctaagaatttccttttgctgttatattccctttcttctacatcatgaatttctccttccctactgatcatcccaatcaatatacatgtcttacaaattgtttcttagttgtcacatcaacagaaaccaataaacatggctgatttgggcaaaacaaagattttattaaaaggacactgcagctggcatcaccactgctacagcactggatgctggaacttgccactagcaccgtagctaagactactccagaaactcaatcttactacaacccctgcttcacccgagcacttcttccatcctggcatgagattccccatctaagcatgctcatctgattggtgaagcccgtgtcatatgcccacattctccctgatagggaggctagaaaactgactatctggcattttcagtttgtacaatagaagaaacactctgcctcccaaaaagattcataatttcataattcataattcagggaattttaggaatttcctagaaatgaaaggtttcccaaaaagtataacaaatcttctatcttatcttttaaaaaaaaaaaaaaagatttcacaggccaagcatgcctataatcccagaggtttgggaggctgacatgggaggaccagttgaggacaggagtttcagcccagcctgaacaacatagtgagaccctgtctttaaaataacaataacaataataataacagtaaaaaaaattctcattttttcctttcccttcttttgtgacatctgtaaaagagattgtttattcttggctttaatttatcatatcatattcactattcaaccaactccaatcttgctt

SEQ ID NO: 97818 - DNA, 22890 bp, Homo sapiens
ctttctttccaataggaaatgacgagtttcttgggttttgttggtcactggagctggtattacaaagtaaaattatcccaaagagaaaatgaaatttattccttaagtgacaaaagccagaaataataccctatgacaagagggatcacttgcacgatggtcttttacatatatgaattaatactgataataatgggtaattgaatccctgaagaagactcgtctgatgtgatgtgatcccatgaggtgactatgagttctgtggcggtataaagaccagtcttggtgctaaaacactaactctaccatttagtgtcatgtcaagtcaaactctatgagtatgctcttaagtgaaattcaggatctactgcatgaatttggtgtgaaaaatgaatgtaacaatgggtgtcaaagggctttctcaaatttaaagtgttgtgaaaataacatgtgttattgtcctgagagtatttctggcccagtgatatagattagaagtaggacaactaactatcccatcttcctattgatcacacctggcaacagctggtattcaacctaattcacattgtaggattatgggatcattcttcacatttctgagctaccagtgtttatatggctcaacatttccaaaatgttgagtattagtgttttgttgtttgcatcttgatccaagacctttttgctatatttgtcctctgtctttgtgctgctcctacgtagcatacaccattagcagccatgtcttatgaattatcctgtagtaatggtgggtgtatattaattcatatgcactattctgtcattttggaaatgaatggtaaaacattttaatccagaagttagtatgaaattggtgaacttgagtcttccctgcttcacttttatctaccccaactccccctaaacagtacttatcttaactctcctcagaaaaccaatatcttcatattttctcctccttctccctatctgcagttctggagaaaggatctgaaacagtctgtaaacaaagaattgcaatattatctgcttcagggtgtgagctcatcgggaattaacgtgttaagtaaaaggaaacccaggttaagacattggccaattaatgggaagttttattttggatagcaggccttcttaatgcccctaaagcccctcctaaaactggtaaccctttggggaaatgacttctttcatctgatgatgagacagctggcctaaggggctgaatacaagccccacagaagattgaacccatatctttattcatgttatccaacccaaattctctctatgctgtcatcaaaaagtaatttaggcattttgtaccataatagccatattgtccagataaccttatccaagacagcagctgttttccttgtgaacacaataatcactgaccttgaaagaatgtcatttaaacagtgacaggtgatcactggttaaataggttctgggcactctacagtcgactacaagaatccaggtaacagtgatgaattcaaaacagtcttcattgaatgtgcctttaaaaaaggcttaaaagaccatttgttcaacatctgcttgctcatactgtcaggagaataaaattcaagggctttacctatcttggatttttgttgttgtgtgttttgttttgttttataccaaatattgtaacttaacccatgtcttgttttggacctgtaaaaaccctaaaagctttgtgatttaacaaaaacattctattggggttcagtgccctttggaaatccttttagaagtaacacattctagcatgttactcttgataagactgcaatattgataatatgtcaaaaccattcccttcttttgtgcacattaaactgaaaatggcagctttgacgtaagacatctgcttgtgaattcattagctaaactattatcagcaaagcacatttatttattcttaaaattgtaagttcaaagcacattttattggtgattcattttcctgctcctcttcccaaaacctttgtgttttgggaacaaaaaggcatttgacttatttttcaggtaacctagtaatcaggtttcatgtgtgactatttaaaatataaacacagcatatttcacttcttttatcgctcttttttgaaggaaattgctacaatccttagaaatgaaaatcctaaaatctcacatttgaagcattattaaaatagcatccagataaccttttagtcagtttttatctttctcctctcctacgacagtagaaatagaacattacactaatgcctctagttttttcctgctttgctgttttccttgaagacagtaaatagttctcaagtttctactcacatactactttctatattccattctcatttactaaccaaacctcagttttcctgtctgcatatcagtgtcaagtctaaatatcagtgcccaaactccaatctcttttccaagtatttgcaggtagatagcatgagccttttaaacttcaatcccaaatgaaacttactggttctctcctcagagtccctgctatttctgtctagccattcttccagccacacaaactctgaggtttagttttcgtcacttcttatacccctaaatctttgttactcaaaatgtccaagggtcaatagcatctatcaccatcacctgggagtctattagaaatgcagaatttcaggccccactccaggtatactgaatcagaatctgcattttaacaaattctcaggtgattcccatgcacattaatacctgaaaaccactgccctaactgagaaggaactgctatgacctaaatgtttgtgtcctaccaaaattcatatgctaaaatcctaaacctcaatatgatggtagggcctttgggacatgactaggtcataagggtggagccctcataaatgggattaatgtccttataaaagcattccaaagagtttgttttcccctcccacccatgtaagaacacagcagagaagacaacagtctgcaacccagaaaagggccctcaccagaacccaaccatgctgactggactttgatcttggacttcccagctttcagagttgagtaaggaatttccattgagtaagctacccagtttgttgtattttgctatagcagcttgaatggactaagagagggaccatctctttctttcatggtaacttagtatgtggtggatactcaggtccttgttcaatatctgcctatgtatatagatcttttaactgaatattgatatacttggaatcctatccctcttgccttctaagaatttccttttgctgttatattccctttcttctacatcatgaatttctccttccctactgatcatcccaatcaatatacatgtcttacaaattgtttcttagttgtcacatcaacagaaaccaataaacatggctgatttgggcaaaacaaagattttattaaaaggacactgcagctggcatcaccactgctacagcactggatgctggaacttgccactagcaccgtagctaagactactccagaaactcaatcttactacaacccctgcttcacccgagcacttcttccatcctggcatgagattccccatctaagcatgctcatctgattggtgaagcccgtgtcatatgcccacattctccctgatagggaggctagaaaactgactatctggcattttcagtttgtacaatagaagaaacactctgcctcccaaaaagattcataatttcataattcataattcagggaattttaggaatttcctagaaatgaaaggtttcccaaaaagtataacaaatcttctatcttatcttttaaaaaaaaaaaaaaagatttcacaggccaagcatgcctataatcccagaggtttgggaggctgacatgggaggaccagttgaggacaggagtttcagcccagcctgaacaacatagtgagaccctgtctttaaaataacaataacaataataataacagtaaaaaaaattctcattttttcctttcccttcttttgtgacatctgtaaaagagattgtttattcttggctttaatttatcatatcatattcactattcaaccaactccaatcttgcttctatcctcaaaaccatcatattccaaatccagtggatgtttcttggagctaatgttgcttgacctcccaatactactggatcttcacttggcttccatgatatcagggtcccctggaatttctcctttctttctgactctacctcaacctccttttctggctcttcctctgctcattctctatgcgtttgttttcatagctctgtccctgccactcttctttagccctattcactccctaagtgttgtgtttaatctcatccctttactggttgtaaaattcttagaattcttaaaattcttaaagctaatcatttctgccccccaccaaaaagaaaatctgtaggctggtgacctcttggctgacctctatcaagttttgcatttctaaccttctattttgtacttgtacttggatatttttaatatacattttaattttaatatgcctatatggcaagtgttaatttccctctcataacttgcttcttaagaagtttctctaatttcagtaaattacttcataatttacccacagttttatccataaacctaagaatcatccttgatttatttttctcacactttcatatcccttttatatacaagttctatattttctacctccacaacatgtattccaaattcatttacagctcttctttccctgtgtgtaccatcccagtgtaagccatcatcatctattgcttataatcgtatttccacatcaactggcccatttcttcttctccaatctcatttcaaagcacctcccccgttcacccacacaacgctgcctccattggcctctttcctagtccccaagcaagccatgctctttgctgtccacagattttgcttttctttcttctattgagaatgcctggaatactaattcctgcccagcttctcccattacttcaccttatccttcaagactaccctctgtttttaaccttccctaaagtagcccaccacttatcctatcacatcaccttgcttacttttacttaacaatttaaaacattctgtagttacagtagtccctgcttatccacggtttcactttccatggtttcagttacccatggtcaactacagtctgaaaatattaaatgggaaattccagaattaataagtttaaattgtgagctttaaatctgagtagggtgttgaaatctctcactgtccagctccagcccacccaagacatgaaccatctttttgtccagcatgtccatatgtaaacaccactctcccattaatcagttagtaaccatcttggtgaacagataaaaaaaaatagtataataaggcatatacgtatcagtggtttcaggcatccactgtgggtcttgaaacatgctcccccaccccacacacacctatgattaaggggtaactactgtgtcttatttatctattcatcagtttactgtgtaccttaactagtaggtaacttagatcaaagcagagaccatgtcttttcagtgcatggctgtgtcccttgaaatacaaggattgtgtgtctcatagtaggcactcaataaatatttgctaaacaacagaatgaattgataattaagtgaatgactgatgtcaaattccattgagattcccaaaccttttcatacatctttagccatcagtgatagactgatggctagttacccaagaaaagttttctgatttattcttttacttttgattctgccttggactattgattgttttcattaataataataataacatgttactttgggcagctagtaggaaaagcaaggccaatgatgctgacacattctgaaggcctcctgggtgatgcaatcagtatttaaacaaataatttctgcccatcaatcattcctctacttcctgcaatgaagctccctggaggagtcatcagattctcaatcttgcttgaagactgacaagatgtccctgtggactcccaaactctactccagatggggaggtgcccttaacaccaagattttaaaagctccaatttcagagcaagagtcgaaaactcacagataaagttatagttatttcagggttctgaaaagacgcagaacatgaaggtaagtaaaggctttattaacttgagacttcttagctattttttaaaacgttttatagcattttacctatttcatgtttaataaggattttagagtttaaaggatatttgaacgatacgcctttagaataacagaatcatttgattttactaagaaaaaaattcacgtatttacttattcttcatttgggtgaagtaatacaaataatatgtttctaaatacgttttttcaagtggactctttgtgaattaactagaaggtagaagggaaacacctccagaaaactgagtattaaaacagaatattgcgagaagtaagggggtttataattgtccaggcgtcaaggaaggaagcagaagatcctattggcacagaaatgaccctttctggttgatcgcttcatatagggactcagaagtctggcagcaacaaccttggctcttttcctggtgtttgttttcctgggaaactccagctgcgctccgcaggtaatcaaatgcaaaataaaaaattttaaaacaatgcgcactgtgtgtccactctgctctttctttcttccttcttgttttattctcttctttttcctttattttgctgtaatagaggactgagctgcaatgttttattaactgctcttcccttcccccgggctatagagactgttggagagaaggaactggactcctcaagctatgctctacctgaaaggggcacgtaagttccaaatatttcgctcttcctacaataatggaagacccctaggagtcaggaacagatagatggagagttatggagagagaataatgtcgagtttattcccttaaatcatcgaggccatcaaagagaccggtaggtgagggaggggtgggagaggggaagagtccctgattattggaaatcctccatccttattagaaattctccatccaaaactggagggttgcttctctyggtccaaatggggactcgggttgcctgggaaatatctcagtaacccgacctccgctccaaagcgcccttgcggcgtccggtcaggcgcggggctttcctccagagctccagggcycctggctcagcccggggttgcgctgggagcgctggaaactcggcagccccgcgcgaccctatcctggagcaacctgccccctccccacgcccggggactgcgctgtgccgggaggagctgaggtttaagcscgggttgtcccgggccaggctgtcgctgagccccaggtctcgtttttgcagagggtcgccgcttcatctccgaccagagccggagaaaggacctctccgaccggccactgccgggtgagtgaccaagggtgcaagggcgctagtcctgcgcttttggaataggatggggcgggcagggcttgctccgcgctggtgccgaaagaaagcgtctcctcaccggaaagacgcggctctgaggcgccctcagatacagtccgcccgagggcagcccgggttggcagcagcagcagctggatgccgagcgccggagctgggagctcgcgcgtccagccccgcgccaatggtggcaagggcggcccaggctggcgctgcggctccccaagccttattggcttgcggctgttcagccagccctctggctgccagggtgtgcagaggtccccagggagttaggacctgaggtgcagctcagaggggtaaggcgagataggaagaactatgcaaatgcttctagaaatgtatctgcgcgtttgtgcaggaactttactcagcctcctcttaaacgctgttattattaaaataagaacttacctaggaacttcaaatgtatgcttttgttttactagaaagaactatcaaaggttcaaaatcaaaagagtaacatgcgggcagttaaggatgggaccggggactgttctttttcatgataaacctttccatcgtattgtattaacaaataacaatacaatttgatgaaattgtaaagattgaaatgctaaaattaaaaagtatacttacttggaaaaataccaaacactgttgaacacatagtaggtgcttaaatttttgtttargctcttcaaacatgctgtgtaattgagcttatttattttatgaggttaagatttgtttctcaacttcagttgccccaaattagaaatcatgttttgtgctgaatcagaacaatttgtcttttttcaacttagatttgaaataactttgaattcttagcagatactccttcagtcaaataattaccttatatttggccgcaaaggttaaattattatctaaaattctctttggcatatagtttaacattctcttccataccctgtttgtaaacttgacataaccaattgtaagtcatttccaaggcaattgtgacatgttaaaaaattagtcttctgtgtaagtagtcctttgttgrggggtcaaaatctatttcatagaggtttttctagtattgctgcatgttagaataggacttatctacatcaatatataaatgctaagagaatctgtatacatttttgtttctgcagaaagacgaagcccaaatccccaactactaactattccggaggcagcaaccatcttactggcgtcccttcagaaatcaccagaaggtactagcatagtggcctctttcacctgcataacagaacagctttgcttactttcgggattctgtgttgagtgcaacacccctcccccagaatttcttggccttaggcccagaaattctaattctgtactgcttgagtgaggcccaagaatctctgtccttaagaagttcttccacattattctgatgattggtcaggtttgaaaacaggaacttcagagyccgttaataaaggttgaaatcatgagaatggagataccttctagggcttagatatagtgggaaaagggaagacaataaaacacccaaaaatcaagggaaatggggggaaatagtaccagtgaagggacattaaaaggagcaagcagaaaggtaagaggaaaatcagaataagagagtatcccagaattcattcagtagctgatgctactgatcccgctcctcttgaaactttccagggatggaaactatcagaatggttactatagcagaatggttagtaagaatacagaactcaggggacattaaacagtgtgtcacaggacttccccccacctcctgcccagtgacacagcttgctgctgctattccatatctgaaactttgtttacagaatgtgatacaagaaagtaaactgcaaagttaagagaaagcaggtctcaggctctggagagctggcatgactctcagaactcttgcagtgaaaaggtgtgaaatagttgaataacgggtagaggatgctgtatccaaggtgttctttttaaaacccaagacatggarcccagcgatttttggagtcagtacgaaaagagctctgatggagattggttgatagtgacgttttagatttgattgttgggaaaatgtgcagagccagaaaggaaagtgacttataatggacaagagagagctaattttaaagaggagaggtatcttcattagcaatttgaggaaaggatgtgattataggtccccatctcaagtcttttttggaaaataaatatgtatttttttaattattgaagttttctaagtggattgtctctgaagatgaaatgactaattttattagtctaaattgatagaaaagtttttgattcccatatgataaattaatcactagtcttctttagtatttttattctatactacctcattattatttagaaggctcttatttagtgaattatggtttcagtggaatttatacagggacgccgttctggtttggttttgttttgttttgttttcttccttccctttaaagagaagcccattttctgcaatggtttaaagtgtgctagaaattcaggttaagatgtaacccaaacattcaaattatattgcaactaactgaaagaatgtgcttttatctagaggtgatcttagaagaaattagtagatgcactttgcccctggccactgcttctccctaccgtattgtaacttttagtcattctatcctatttttagagtcccaggaacctgctattgtctaactctttaagtatccccacctcagaagtgatacctcatgctctaaagtttcgcgatcccagccagcaaacgagtgcctcttctttttgtctcatttcctccccagaactctagctcccctaataaaagaacatttgcaaatgtgttcccatgtcatctttcccgagcaagatccattttaacaggaaatataaagagacagtcctttgatgcaagtgaattattttaatggtgggtattttagatataagtcaatctgtgagagcaagacacatgacttttgagatttttaccagacataccatactgtagtttcagtcattatagaggttcagatgtaaaatatgaattccccaatgtgtcccaagctgagaaaaaaagattttaaactgagcaaatcaaagcccatattgtttaaattttcagtagcagagtccataagttaacatagcttagaaggctaaatgtttatttcctgagattctctttgtcttaccttttcctytattaaaacrcagagtgtatatttattttaaagaatttttttttcttacagatgaagaaaaaaactttgatcaaaccagattcctggaagacagtctgcttaactggtgaaaatatactggattatgtttaattatggttctattctctttgaaaacatgaaccatgtgaataaaacctttggacccttttattccatttgtaatcttaagaacacacacagatagttttattctttcagaaayaaaatatatataggatgcttagctgagaacatcatcttctttcattgcttcaggtcctgtttagatgaccaaaaatgttttcagatcaccttgtgtcttactcttgagtttcttagaatatttataattataaggctgaagactaaagtgttctttccttttaactatagccagtacctgtcttgatcttagttgtgtttttttttttcattttgttacccacttgcattttgttttcactcagcagaaattctccttctctgttttccttttatcccatccccaagaatgtggaaggaaggtgagaaacatggcaggatgggaaataggagagtatgactctctatagctcatccaggagtaatcaattaagaagataaattggatgactgtggagaagctctgtgataggaacacttcagtgtggttgctgagaggagacagtcattgaggtagaaggtttgccaaagatccagagctcagagctccctttgtgctctttgggaattaccttgcattcagtttagaaacatggatctaaaagttactgggaaataagcagatggagacacactctgttgtttacgtattggaagaagggaacaagccagttttgttagaggtaactcattttccatgaccaaacagactcaacagattcaagtactctgcttactctaattgactagactctaggttttatttgacatcatagcattacataaatcactctgataacataagtgcacagtaatatgcctgatctcttcctttttaaaagccaacttgagttcagtaccatctgaatacacacacatgcacatatacccacacacgcatacacacmtactcctgtggcaaacataataatgtatttatttagaattataatatgaccatcatgttaattattttttacctaatcagagttgttattgacaaatgtcataagtggaaagtattaattcttattgtcatcagtatttagccattatttagtagctcaagaatatctttatgtgaatgtctctgtaacttggaattgcaatttcactgtgttaagtaatcagaactctgcttataagatttatctgtatcttgtttcataatttaataatgaaactaaattcaagttaatgtaatgttgatctccgtcgaaaaataacttgtgagcattaaaatatctgtatggcattataataggcacctgtcattaattatgatttgatttgaaagtagacttactaggtagtgcttacatctgatttattgaaaattttttccaaaagcattgtcttttatttatacagtcctaaccacttcaccattaggaggggtgggacattaaaaattatttacccatcagacataaaattgtacaaattgactattcaaaatagtatgtgtattcaaagaacacttttaacatctatcttatgaaataattcttccyacaactaaccagaacaatctcaaaaatgtcatactaaccattgttttaaaagctgtctcaatgatcaatagctgttaaaatatagctccaagtattctaagtactcaaattccttgaatgttcttatgtacaaatatgctgattaattaaaaggtccctcttcccaattttctataactttccaactctcttatggtgtctatattctgtttatttctagatttttaaaaaaccaaaatgaacaagtgatcatagatcagaaaaccttcacattatatggcttgtgttttaaaattgggaattttctggcttcaacacacagatacatgcactagaataccttgatctgcagggagcgctttcagccactttctgcacagttctcattgcccttctcttttttgcctctatagcctacctcggctatctggcctccatcctgggctcttaattattctttgttttccagtagttgccttcgctccctcaataccatcattgtgttcctaagagaggagagaagaaggcgaagtgaccctggcttgttcagattagcctccagcttgcatttcttctttacctggttatgataaatgaaaatgtgtatcttacaatcttgaattacattattttatcttgaccacaaagaaagggaagttgggaatgtaacttcattctgttcggtcgcttcatactgggctataaattcctttagaaagagctcatttttaatttgatttgatcctcacaacaactgtgtgaaatgggccattttattgcccttagtactcatagaaatttgggttcattcmgtgaagactcttcggacctccctaagtagacttaactagtccccctcctgagtcttccttgtaccctggaaaactattagtataacaccttgtaacatttatgttctcatctgcatatataaaaccagttctgttcactctaactcttactatggaagagacagtagtatcttgatcagttcaggctgctaaaacaaaataccacaaactgtgtggcttataaacaacagaaatttatttctcacaattctggagcctgagaagttcaagatcaaggtgtcaacagaatcagtgtctggtagaaggcccatttctcatagatggcgctttcttgctgtgtcctcacgtggtggaaagggcaaggcagctctctggggcctcttttataagggcagtaatcctattcatgagggctctgtccacatgatctaatcacttcccaaaggctctgcctcctttgtggataccatcacattggggattaggatttcaatacagacgggcccaacttatgatggttcgatttatgatttttcaactttatgatgggatgaaagcaacacacagtacactccttgacttaccatggatttatattctgataggcccattataaattaaaaatatcagtgggytggccaggcatggtggctcatgcctgtaatcccagcactttgggaggccaaggtgggcacatcacttgaggccagaagttcaaagaccagcctgaccaatatgccaacaccctgtctctactaaaaagaaaatacaaaaattagccagctgtggtggcacatgcctgtggtctgagatacttgggaggctgcagcacaagaattgcttgagcctgggaagtggaggttgcagtgagccaagatgacaccactgcactccagcctgggtgacagagcaagactcttgtcaaaaagaaaaagaaaaagaaggaaagaaataaagagagaaaggaaaaagaaagaaaagaaaaaggaaagaaggaaagaaagaaaaaagagagaaggtaagaaagaaaaaaagagagaaagaaagaaaaaggaagaaagaaaaaatatcagtgggtttatccaaacataatcccattgtaagttgaggagcacctatatatgaatttggggrgcacacaaacattcaaaccatagcaggtggtacaatccataaaacgggtctttctctcagctgatcaggcaccacacacgttttctatagttcctgtccttcaatttatgaatwcatacattctttaaaagcaaaattttttgaacctctatgtctcccaataagaccatttatctatgcaactattatgtacaaggcactgtactagacacagagccttctactaaaaatcatatttgcttctcctcaccagcttttgtcggtcttggggaaaaggatgaagaaatgactacagtggagggatggagtcacctggcagcagctgtctgaataggggactgmgtasaggatagaaggtgattcctacacatactgccaaagccaggtatttgtaagtcagctaaattccatgtgccctatcatttgtacacacttattatcatcaaattattatttcattgaacaaaaagcacttacatcttcaggtattttactgtgtaggcatgttttcaataacagtcaagcaaccagttaccaatcaagagtatcatttgaatagacacgttaagctagtttactggggatacattttcatggttattgtaacagtgaaccctagtttatcacagtatctttctggtacttcagggaatgagcctataatataagtccttctcatattttttctactctccagtacagagcatttcaaactgctctgcagatgctcggttaattggcatccacagggcatttgtcaaaggctagattttaggtcaattatttctcttctttctggacatctaagtaaagtaaatttccagctatcttccatttttgtctgatttgctgcttgtatccaacagttttctacttttttctagctactgcagcaataggagggctggattacagttttccagtggtcttgaaccayctgacaccttgtcgttgctgctattccatttttgtgatcaataatccagcactgagaagaccaaaacttttttagaacctcttcagaacaaggccaattgatatgtcaataaaggaactcactgtgagttaagtggaactcacaatgaataactacttagttagcaaaaaagcaatccaagagtgtgatttttgtttttgttttgttgccaatttagacttaattacacttaaaacataaatcrgctaaattaataatcattcatctatgactctatgcacatcacagaatatgttgagacattktcattattacaactgaatagatgttctattttttctaactatwttttaaaaagatagcttctctaggaattattcataacagctgcttcccacatgttattcgaatgtctaaacaatttttaaagaaggcattatcagtgaaagttgttattcaatattaatgtgtttatttacttggatttaacaacttatcatctatgaagaaacaaggcattaccagtgaaagttaagttattaaatattaatgtgtttatttacttggattttacaagttatcatctatgaagattgaccaaattttaaaaaggctttctatttaaacaatagaaaaatgttacagtaagatggtggtaccatgtacatggtaatatcttgcattaattacaacatcaattctagatttcaaaagtgacataaatgtccattaatatgcatcaaaatatggacttaggatagctattcactcatggatttttgtctctgcaaaactacatctaaatcatggttctgatgcatgtgaaaaatgaaaataatcagtaaaaacctagctatttaaaaaatgtaggtagtgcacattcatgggtaagatcaaggttttcgggggggaaatgggaaatttgtgtggtggggtagagaagctgcataaatagtaagcaaaggattatgatgatcatttaaaaataaacagagtaagagaaaatccttaccacttaaattcaccattttaaaaacacttttccgtcttctgcctttaatgagtgctcctcctcatgcctaactttatgggggaaacaagagttggggaaaataacttggatcttatcctaaattacaaaattrtcattcactcaadttcttccactttttaggcagagaataaactccattgtaatacttagaaggagaaaatkaaatttgtggcatttttattttaaataattagtcttactttgcttttttaaattagctcttcatgcagcacatgwagaattcarttcttatattcaccatgcagctttttcttcccatgaggaacrtggctcagtgaaaatggtgacttgatatttaaccgatccctttcagcctcctcttcctcatcgtatctctcatcctccacttcatcttccacatcactgctctgaggactggaggcctgagaccctgaaggagaaggtggtactgaggaaggcctgggatatttaaatccttctgtctgccaaagacaaaaataagacataaacatcacaacagtttcttggctttcaacgatgtaaatactatgcatgcactatcaattttttaagtagttatctatcttttgtagtctgggtgctattaaactttgattcattttgattttgataccaccaatctcaagagggattcattcaatatatagctattctttattaagtactgaaatgtgctaagtgttatatacatattattatcatcttatcttttaacaacactctgataactatgtttttttcagtacagaagaaaatggagggttagaggggtcaagtaacttgcccaacatcactcagcacataaatggtagagcaaagatttgtaccaggtctgtgatgactccagaaactttaatgtcaactgccaccttacactgctgatactgttagtctctaagtctcaaatttgttcagcaaagcttttggatgtggatagcctggaaatgccatggatggccaccactagaaggcatcctggaagtcaggtcacttaattgactctacaattccactagttgctgttatttcagttaatgagaaaatatcactagactttaattaatttgcccttctacttgagatactgagataacttatttgataaacacacactgcaatgccactaaagaaaccagatgaaaaaacatgattggagtgcatataattgaatggggagacagatgtgtaaaagtgttatagcgctcgtcactctgtatttcaattactttatacattatatcatgtcatacatgtacagtcattttaaggttcagatactttacctgtcagcaatacaacaaaagaactgagttctgcacttgagacctagcttgaagtaggtgctcaatgcttattagacgtaataactggataaataagtagataagcagataaatggatgaatattgctgaattatcattaagtggaatgaccacctctgaataagctaagcaatcaactctgaatgctagaatcataaacatgaaagtcagaatttgtagcctgagggtttaagaaaaccttatcaccttttttacgggcaaattttacttcaggttaactttctagatctgttcctctggaaacctgatataggtggaatataagtcatgttattagggatggttgtttatggtaacagtgacccctgattgagaaattatatctgaactgaaaaatctataaatacttgataaggcgccagagtttttgggaatctctgaatgactcttataagatgactcataattgggcatattccttgcagggagcatgaaagctggtttgcggagatttacatgagatagaggctcctgtggggcatgcagctactaagctaaggtgatctcatttgcaatggtatgggtcttatcttcttgcacctaagctgtcacctagtgtgtaggcggccaaagatgtttagctcttggattgctgtgtagactactgcaaggactgatcccactaaagagaaatgcctgacgctcccctgcttcaagtggcacctcatgtcttctccctgctaagtgaatctgatgacaaatgtggcctatagcagtcttatgaacataaacgtctagttggattttagaagaagacaccctggtgggcactgatgaatggaccataaatgctcatctagttcaattcctcctggggtgctgaacttactctattttactcttgccaagcggtcaccctatatttaaacacttccttggagagcaaattcactttcaattaaagcagtccagtttgtttttgaacaactccccaaagaataaatgtccatcagaaccatttcaagcattaaggcagagaaagttttaattcagagatgcttctccaatgagatgaattaactgtcttgagagctttaggacagtctgatttgtgagttcctctctctctcctttggtttgattcaacattatgaaaaagtatcatagcttgtgtgcatagctacttccaaatttaaatgtattatttaaacttataaaaagaaatatagctttcaaaaaaaaatacattgaatatttaccgttggtggtgatgttagttccacatggaatttatctggaaaagctctgcttaatgtcaggtgtctggcatgctggtaatactattgatagaaagccaaatcacaggttaataaaaacccttagatatctcaataatcaagttattaaataaggccttattctcctagttctgaaacatatgtattttttaaagtgacagaatctatgcagtctaagtttgagactcaggaaagaaattacagtttatagttttactatttttcaacccataggcagagtaatactataaaatgctggggaagaatgcccatactggtcatattgagctctgaattgagcattaaggtgactgaaaacactggtttcattccacagagaagcagtgtggcatggagaaaagatagggcctgaatattcagataaattgggtgtaaatcctgcttcagaccttaggcaagaaacatcacttctaaaagcctagtgtatctatcttcattgcaagatggagatagtaaaattaatcatccaggttgtaatgagcactggcatttgtgtgtgcagatactcagcaaatggcagcatctctcattcagccaagagtgttcagcactgtgcaaacagacacattatgtgaaggcaaagtcaattcatttattattaaatcaccactgctaagctgtgtgagcatccaggtgtttataaacctattgcatgactgaaaggaggtatttcctgtagtcatcattttgaaaaaccatattatacccattactcactacagttgagaaatatgactacactatttctctagagagaaacaaagtagggacttttctcttgatgttttcttcaacttcataaaatgtttccttataccagtaacacatcaagtgaggcactgacaatggaatagctagtaagatcagtgctagatcctgatggacttgctattatgaatagactcaaacgaaacatgaagaaatacatataggactttgtaaacttattaaattttaaaaagtacatggagacactgagattttaacaattataatattggattaactttagagattatgactagaatcaatatgtttatagtccagtggaattttttaagtggtctgctgtgtttatctaaacttgcttactctgcctaagtatctccaatccagaagatctgagagcctctcagttctgttcctctggataatcctttggcggcgtgactgtttgcaaaatccatagagaaacttagtcagctgattgcaagaatcatctggagaacggaaccgcctgtcaacgatgtaaatacctgaagaacacaaaagccaaagcacaagtaaaagtaggactaaccttaaacatttgttctcctgtgatttactaactctttggttccatcaaaaacctatgcattatctaccccctgactcaggaattacccccactttattcttttctgaggccctaattcccttctaatggtttacaaccatcactgacacacagccaacgaagtggatcttgctgaaaaaaactctggcagtctagggatacgctggatcagtgatcctccatggggttgctcactaaccagaatttccagggcggggcctggatatctgtgccttttatgttccccagtgttcccactgttcagccgaggctgaaaaccccagatctagcctgaggaaagagccacagtacacccataaaagactgagggaaggccagggcttggtagctcacacctgtaatcccagcagtttgggaggcagaggtgggtggattccttgagcccaggagttcaagaccaacctgggcaacctggggaaatcccatctctacatacaaaatttagccaggtgtggtggtgtgcgcctgtagccccagctactcgggaggttggggcaggagaatcacctgagccagaaatgtggagactgcagtgagccaggatcaggccactgcactccagcctgggcaacagagtgagaccatgtttccaaaaaaaaaaaaaaaaaaaaaaaaaaaaaacccagggaaatggcaatgtattggcagacaatatatcccattttaacttttcttgctgctagggaatatgaacagacagataatggtatgcaaattattctgccatcttaaacaatttaggtgaactttgctaagttgtcacgggcctttaaaataataacagtaatgataacaataataataatatatgtactatctaatgaccaatatatgcactctaagaccatggttattgtcatatcatttctaggcagcagaagggatcaaaattcagggaggaaaaaggtaaaggacaaagtttgtccaagttttgcactctttttgcagtttgtctcatgggcaatatattaatattaatagcattcttatgttatctgtgggccacatatttaaagctacttttttttctccacttttagtttaggttcagggggtacatgtgcacatttgttagatgggtacatttcatactgctgaggcttggtgtacaaatgatcccatcgcccaggtgattaacatagtgcctggtaggtagtctttcaacccacgccccttcccccactccccactcaagcagtccccagatgtctattgttcccatctttgtgtctatgtgtattcaatgtttagctcccacttataagtgggaacatgcagtatttggttatctgttcccgcattaattcacttaagataatgacctccagctgcgtccatgttgctgcaaaggacagaattctatttataaatctacttttttttttttatgagacagcctgaggctctgtcacccaggcaggtgtgcagtggcacgatctcagctcactgcctcctccgcctcccaggttcaagtgattatagtgcctcagcctctggagtagctggaattacaggcgtgcaccaccatacttggctaatttttttgtatttttagtagagatgggattttgccgtgttggccatgctggtctcgaacccctgacctcaagtgatccacccacctcggcctcccaaagtgctgggattacaggcatgagccactgtgcccagcctaaattgacttttaattaaacaagaaatataaaaacattagtttaattatcaggatagctttagagttaggctctgtaaagaccctgtgctttgtttggttagaggtcatgtctccccagcatgggttaatgatgaaaaccctcaccgtaagcagtaggatcagccacgtgctcctgcatgaaacagccaaacccggagagattcgtggtcacactggggatacccatcacagtgcattcagctgccaggggaaatagaccaaagcttggcttcagaccagcgcctatatccttgtatgcactcagaggaggaaaaggccctagtcctcctaagaatagcaatgttcactatgtgtcagtcacaacactaaactctttacatgtctcactaacttatttaatctctcaacaaccctgtgaagtggggccatcattatccccatcttacagctgaagaaatgaggcacagagaaattaataactttcccaccttcacaaagccagggttcgtggtatagctgggatttgaagtcaggcacccggctgcagaacccttgtgcggaactgccgggctccactgcagcttcaatcccagctggttttgtttcttgcttctttctagcctgtgtttctaagtacttggcaagtttatgaggtaggttaaatatgttttggatgcgaccagcttcttcccccatttaaatctcccttggcacatattccttccactctctcaggagctcaataaatggatgatctcttgcagtcctccctcaccttttaatcaaaatctgttttccaggaaataactgatatgtcttaaaaattt

SEQ ID NO: 97819 - DNA, 53331 bp, Homo sapiens
atccccgccaccaggatgatccagccactcacctgccacacagatgtcaaagtagtcaccaaactcacttcggatgtgcttcaccaggtccactgcgtagttgaagcctccctcctcctcttcccactggtcacctattgggtctgcagggttggtggaggtcatagtcactgggtctcacccaacctccagagaccctttctgttccctctacctagccccgacacccaggactgcgagtccctggaaggcagaaacttcatattatttaggtttggttcgtctctttctagcacttggtaagacagcaggagggaaaaaagcagcccaccagttcaatattcactgcatgctgaccctgtgctggcggtggagaataggagaccaccgctgcttctcaccgtgcctggaggattggagagcccttccctacttctacctgggcacgcctgccaccctctcccatcccacggccttggggctcctgcctcctgggagaattttctactcatctcaagtgaaggggtcttgtggtagggagcacgaggccataggatcccacccatcaggctccctcttcccactcttaggtggcctgacaacagcgggcaccagaggcctgaccggctattctcactcctggatactctgttactctgtgattgggccaagtgctgggtgcagccagcaatcgatgcagtggtgtaggcaaggcagagggttatcaggccgcgactgcattcctgacggaactcctatgtcgaggtcaagaggtggaagaggtggctgcctgtgtgtggtgcccaggatgactcactacccacaatgcctactgacactactggcggggatgggatcctgcggatcctcagcgtggggcccaggaagaagtaaaggaccatttcaggaaccaagttcaggctaccaagtggcctccgggaaagccagaacccagagtgtaggggagtgctggctccacacctccccgcagcgccatgatgttcttcaggcccagctgcttagctttgtgcagatggcccgtgatctcctccaggcgctgacggcagcaggtcatgtgcaggatggtctccaggccacagtagttcacggcggtgctggcgatcatcatggaggaggtctccttgtctgagccagggtcacctgctgggtgccaggtcacgtctatgtagagggggccacctgctgccatccggtcaaacctgtagggggtttgtttctgaagagaggttccaggagaaataccatccgtcactgccttcccatggggcccgggagttagagaagcatcaatgaaggttggagacagaccaatcagcgttcatatcctggctttgctacttatagctgtgtgatcttgggtacattacttaatctctgtgagttctgtttccttatttataagacacggcagatagtagtacccacttcataataacactaggatgctgggcgtggtggctcacgcctgtaatcccagcacttcaggaggctgaagtgagtggatcacttgaggtcaggagttccagaccgcctggccaacatagtgaaacctcatctctactaaaaatacaaaaattagctgggtgtggtggtgggcacctgtaatcccagctacttgagaggctgaggcaggagaattgcttgagccaggaggcagaggttgcaatgagccaagatcacaccactgcactccagcctgggccacagaatgagactctgtctcaaaaaaaaaaagcaacaacaacaacaaaaaaccataacactaggagaatatgacggcagctggttccacagaacttagaacagtgcctggtgtacaaaccgaatactcagtatatgtgaggtgccgttataatcactattacagaggtaagacacaacaacagcgctatcattttgtgtgagagcagcacttcagacttttcacagcgcttgcctgtttattatctcaggtgagttaagacatcatgattgagagttaggggaatcctaactgtggcaagcacagcctcgctgtaggaacagttagaaagagggtcagcagactcactttctttcatgccaccccccaagccctgtgcagcagcttacagttatgcagaccaaggccaagttccgaaacgagactcaaaaaaaagcctggatgtgcacgagtacttgtgttacaagctatcaacggtgtatttaaacatccttgtgcatttaaacttcaaaaacttgggagtgacacgtgagacgtgcatacagtaaaaggcataaacttaaaaaaaaaactgcaattcatgaagtgctaatgtaattcagttggcatttctagagttcaagaagcataatccaaatttctaacttgctgaaaacaatctcactgctttgtgacttcctaaactgcactcgtgatccagcccccaagttccctcaaagaatacagtgtgagaatcaacatttttaacccattgaagagtgtgtctaaaataccttgacactgtggagggacttttacaggcaacagagaagttgcagatcagatgacccactctgccttctccttcctgccccctccggctgcttttttctgccgggttaaagggcagcccagcctcagggctgacagtttgctccccaggcaccaccactcccgcctcccaccttaaccttgcatgagtttaccttgagatgagattgacagctccctcagcagttcgaggagggaagaattccagggagaaccacttgtcaccagattccaatcgccgcctcatcttctcccggagtctctcatgccgctcggggtccaggcccggggtggaacatctcgaactatctttggagctctcactgccactgctggcactgccctccaagcaggggttgaggctgctgtttcctctggcttcgttcaccatggctgggttcctactgcacagggtggggcagggagcatcagggggcaggcagccacacccccgacacatcaagacacctgagtggcaggttcaagccggaggcgctgtatttccacacaggaagaaggccaaaaaaggtgacactgccccctcccagtggctccatgctcctcagctatggctgtccgggccgcctcactcaaagccttgccctccgctgctgccaggctccttgcatgcaaggcagcccccacccggcactgcaacatgctcctcggtgacagctacctgatggaaggtggcacagaggacctcacgctgccgacctgcgaggcccatattcctagcgaggggcagtagtgcccagctgggaggaccctggcttttcgatggtccatctctgtcagctcaggcccagagtgcgtggggagggaacagaggcaccttccccagcgggtgtgttcaactgggcggagctgcgacaaaggaagaggcttgagctccagccagcacaagggggcgggggcaaggcttccaggcgaggagggagggctgaggctctagtaaggggaggcggatggaaggagggggactcaggggcagagactgcaggggttggtggagatgaggccaacaggcgttcagggataccagatcaccctccagagaaggaacagctcactctggctggctctgcctggaacatctgttacttgaaacagttcgtgcacaggatggaaggggtgagggcttgactatgcagccagatttctcctgaattcatgctactccaaaaagaccgtgttgtgggttagaacttgatgctggccatgttccaaaaatagccagacccaagttcagtaagggcacgaatttctcagaacaaaagctgccccatctgtgcttgccttgcaggctgctcttcttacacatcacagaattcaattcaaatcatcacagtgacccagctactgggaaggctgaggcagaaggattgcctgagcccaggagttcaaggccagcctgggcaacatagcgagactccatctcttaaaaaaacaaaaaacacacctgtaatcccagcactttgggaggccgaggtgggtggatcacctgaggccaggagtttgagaccagcctggccaacatggtgaaatcccgactctactaaaaatataaaaattagccaggtttggtggcgggcgcctgtaatcccagctactctggaggctgaggcaggagaatcgcttgaacccggaaggcagaggttgcagtgaaccaagattgtgccatagcactccagcctgggcgacaaaagcaaaactccatctcaaaaaaaaaaaacaaaaacaaaaaacagaaacaagtaatcagagccaccagggcacagacaggccaacagagggcatagggtcatctggcagtctggttaagaaaataagacaaacacttaaaaacaaacaaaacacttgcacagcaatgggcaaacacacagtagtgaatgggtgtgtggtgacatggcacaacagaggaaagcccaggtgaggttcatttctttcagactgtccaccactaaccctgtgtacctaaccatttggggtcttagactcttttgacaatctgattaaatgcactgctcccttcccctgaaatacacacacaggtgcacagactacacggggatacatccaaagacaaggagttgattccagactaagaaccctgggccaaagctttctccctctagggctgctctctttcattctgacctcaaactccagattctcagtggggatggctgtggggagtgaggaacgggggcgggggggaggagtaacagcaagagcagccagttggctttcctccagcgtttaagggcgcacctcgttaattgcttgctggaacagaacctagagtaggaggaagctgaaccacctgtaaaccctctgattttcaaagacttattgcattcctagtatatgccacgcatgtgccatatttgtaagccaactcccacgatttatccgttatcagctggactcccatagcaccctgggttgtaactgtgggtgaaaaggcctgtctcctttctctttccccagttccctgagacaggaccggtgtcctgcctggggtatccccagagtttggcacacggtgatagccaacattcactgagcgccaaagggccaggtgctgccactctctcaaaataagcctctgccacttactgaacaactagtctgcgccaagcactgggatactaagcctacgactcccagaaaggtcccggcggacccccgtgcgcagcgggacgcagtgggcgccagggaccgcagtgccccgggcccagcgctcttctccaggtgatcgccggggaggcaggtttaaaaggcaggagccggaagccgtctcggcgcccaggtggccgagaatccagtcaccaggtcactgagtcaccgatgggggcgaggacacgggcctgggccggtcagaggggcgggatcgtcacccctggctcaggggcccctccgtccaggcagggagccaaagtcagtcttcgcttgagggttggcggtcgctggaagtggtagccattgggagttacactaatcccgcgaagggtgcgcaagggaggcggcagccccccccaagaagagaggcaggccggcctccagcgctccccgcccacaagcacgtccttgcccccgggaggttgtttgccggctccaggatctccctcccggcgaccccggcctcgccgtcactcaccctccagtcccgggtgactcagaacgctcggccgccggccgcaccactgtggccgctgcaggggcggggaacgcagtgaaggggcgcggcgcaggtgtcaggttgctggagaggcgggcctacagggcggaaaccaccggcgcgggtgaccggaagccccgcccccaacatggccgtgcccacaggtctcgttggaggccgtgcctttatcgtcatgtgacgcgagtcctcgccccacccgtctgcagccactcctggtctcagtcccagagctcgagagggccacgtgaccgtcccggggccagtcacgtgaggcgcagatcctggctgggagggggttggtagaggggtccagagtggcagtaaaggaggaagatggcggggtgcagggggtctctgtgctgctgctgcaggtggtgctgctgctgcggtgagcgtgagacccgcacccccgaggagctggtaagaagccggcggagtcggcctggggagggggcggttgctaarggactgagagaggcgttgccgggggtggggccgggccaatctgggcccgcaggtggcagcgggtggggcctggggaccgcagccagggctctcgaagcgtctaccctgcttcacgtgcctaagtctggggtcttttctcataacccctcctggaatctgagggagaatccaggccagctccagtaaatcccacccatgtttccttttatttccatctgaaaagagtttggaatgaaacaagcgttttcagaatgagcttcctcacaggactttgtgcttatcatgctgctgttttagcttctccagtcctttctcactctatccctcaccctttctgggtcactgacagtccagcttccccctgcaaagcatcctgggaaaacttgagttgtgttcccagagttgacaagtcctttctgatttcagatacgtcacactgtcaaatggaacctgcatttttaccccccttttcagctggcgttggacatctttgaggtgtcctgaagaggagggtggttatttggagactatcagtggaaatgaagagctcagctgatggctgtagatcctcacccacatggtccctcaccccygaaaggttttttttgagggctggttcctatttgataatggctccagatgatttagaagctagccactgatttcagtaaatacttctgcctccttccactcctaaccactaaaaaaggctccctctgcggatctgtktttctagaccatccttggagaaacacaggaggaggaggatgagattcttccaaggaaagactatgaggtgagctcctttgatactgcttgggcaactaaagtagtgagtggcctggtcacttcaggccgaagcattatgattccaaccagagatgctctttgaccttctgtcccagggagtgagtgggtaagagaacttccttctaggaaagagactgtttagcaagcccttttctcaccttaaccccaaaacaaggtctggtgtttttacacgtttataaatctgtggcaccttaacctggatagagtatgtatttgccattaaactgtttgcttttacagcttacagagagacttagagtgaaaggcactggcaggcagtatgtgcccctaacaggtgtgtgcttataaactgttaaggaggccttgcttctcttctaggagagcttgcttttcagatattttcttgctcaagcagcttctctctgacatgttcttgattaagttccacctttcatgtatgggattcttagagtatgtgtttttagtaaagccaacactgctggggtgaaacaacatgcgtgactttttatcattaaattcttaaacgtaataaagaaggtagagaaaagcctataactccattcattaaaagatgactgttaacaccttactaagtatctttctacatccttacccatgcttttatatacatgatacatgctttttttaagtaacaaaaatgagattccactaaatcatctattttaacctgtcccactcaccccctttattatactttttgtatcattaggtaattttccacaaccttttcttttttttgacagagtctcactcttccataaattcttcatgctgtagaatttagtgtcagcgttaggatttgtagcacttttttgtttaacttttattatgaaggatttcaactatatgcaaaaacagaataatctgttgaaaccccttgtcctcatcacacagcttccacagtgatttagctcaagcccagtcttcttttgtctgtgctttcgttatccacttctcctttctcatattattattttttattgtatgtgtgtgtgtgtttgtgtgtgtgtgtgtgtgtgtgtgtgtgtgtgtgtgtgtgtgttttaaagtaaagacagtctccctatgttgcccaggctgttctcgaactccttgacaccagcgatcctcccatgtcagcctcccaaagttctgggattacagtcatgatctaccatacctggccgcccttcccatgttattttgaaagaaattctgtacatcatattatttcacccataattctatatgcatctctaatggataaggacttttaaaaagcataacccaatactattaccacatctaaaaaattaggaatttcttgatatcaaatatctactgtccagattttccagttttcttgtaaatgtcatatgtattttaactttatttgaattaggttccaaaagtccttttttatttgtttgataaatctgttaaatctcttttaatctgtagcttcttccttcatcttttttttttttttgtaagttatttgacaacataattaggacctgggattttctactgtctagattttgccatttggagccgtttgtatagtttaatatgctactctgatgggactgctttgaatgaaccaaaaagcactgtatccactgctgtgttttgttctatttctttttttttcttttttttaaatttgagatggagtctcactcttagtgcccaggttggagtgcaatggctcgatctcagctcactgcaacctccaccccaccctaggttcaagcggttcttctgccccagcctcccgagtagatgggattacaggcgcccaccaccatgcccggctaatttttgtatttttagtagagatagggtttcaccatgttggccaggctggtctcgaactcctgacctcaggtgatactgcttcggtctcccagagtgctgggattacaggtatgagccactatacctggccattttcttctgtttygtaagtatttgttttcttgtacatagttgagaagtttgcaggaattagtataagatactccatattgttctgtcaccttgcactccctcactgaaccctgttacatcatcctgactgtatcaccaggactgagactgtctcacagccttcatcctacttctaggagctcaccaaggcttccccattgacacccaggctccctcaccccttctactaaattgtacttacatttgtaatgtgcttgccttcagctgatatgcatattcatgtaaatttttgttgttsttgtcattgtttgagacagagtctcactctgtcgcccaggctggaatgcagtggtacggtctyggatcactgcgacctccacccccgcctctgagttcaagctgttctcctacctcagcctcccaagtagctgggactacatgcatacaccaccatgcctggctaagttttgtatttttagtagagatggggtttcaccatgttggtcaggctggtcttgaactcctgacctcaggtgatccacccacctcagcctcccaaagtactgggattacaagcgtgagccaccacgcgtggccatattcatgtacatttcatgggttaatgttcttttgatattggtcattgatatttctcaaccatcttcaagaatgagcttcttgagagcacttgctttgtgtaagaacaaattcaggcacttaaacagaaaagtctggattttatttattcaataaataaatcaacttgacacaaaaagtataataaagaggggagtgagtgggacaggttaaaatagttgatttagtggaatctcatttttgttatttaaaacacgtgttaaaagcatgtgtataaaaacgtgggtaaggatgtagaaggatatttagtaaggtattaatagtcatattttaatgaatggagttatagggttttctctaccttgatagtcagtcaactagaaaacccttctgttgaatatctttctaaaaagtgccccttcttcctgtctcaggaagagttcattgcacatatttgactctttrtttgataaatttagggtcttacaaaatgttagaatcccattttgacatccattctcattataggtggtttgaaaaatggtaactttctgtgagatgtgccattgcaaacaggaatgttttcatgcaggtcacacagtctatttatattgtacctttgaattagaaagaggcacactcagaacgtaagacttagaattaaaggcctcccccactggccatagcagcacccctagctcacaaccagttgaaggtggttttggtgtgaacactaagatgccccttcctggttgaattggggctggttcagcccccacctccctcccggccaggtgccattttgctcgtaaccccctgtaacagccctgcaagacacagataacattttatttttttaaaaagttgttagtcccctaaaccaaagagcaacatatactgcagaaataaaaagttartcatagcaaaggagaagtaacagtatctggttttaataatagctcatatattccattggtacatatttacaaagggccaaactcaactaatttatttaaaaaaaaaagaagcgtggcacagtggctcacgcctatatgctcagcactttgggaggccaaggcaggaggatcgcttaaagccaggagttcaagaccatcctgggcaataaagtgagactttgttcctacaaaaaaatttgttcaaaattagcagggggccgggtgcagtggcccacacctgttacccccacactttaggaggctgaggcaggtggatcacttgagcccaggacttcataccagcctgggcaacatggcgagactccatctcaacaacaaatacgaaaaaattaacgaggtgtggtggctaacctgtggtcccccctactcaggagatcgaagcaggtgaattgcttgagcccaggagacggaggttgcagagagctgtgatcacgccactgcactccagcctgggtgacagagcgagaccctgacaaaaaaaaaagggattctggtgttctagcgttgcggttgtttctaaatgcccttcttagcagttttattgcactataattggcatactattcagttcacccatgtagagtgtacaattcaatggggttttaaaaattagtatattcacagagttgtacaaccattcctacagtcaatttttttttttttttgagacggagtttcgctcttgttgcccaggcaagagtgcaatgttgtgatctcagctcactgcaacctctgcctcccgggttcaagtgattctcctgcctcagcctcccaagtagctgggattacaggcgtctgccaccacacccggctaattttgtatttttagtagagacgaggcttctccatgttggtcaggctggtcttgaactcctggcctcgggtgatccgcccgccttggcctcccaaagtgctgrgattacagacgtgagccactgcgcccagctaattcctacagtcaattttagaatattttcatcacctgagaggaaaccctgcactcattagcagccactgcctgttctccttgcccctgactccaggcaaccagtgatctcctttctgtctatttgcctattctagatatctaaaaaccttctaaatgtttacggaaccatatcattattagatggaaccatcaatgaagtacttgaccagtaatttccatacatattttggatgaaggcaagggtattgtttctcctctgctctcaggcaccactcgcggaacactgctaacaccgatatgtggaggttgtttccccactactcaggaggctgaggtgggaggatggcttaagcccaggagttggaggttgcagtgaaccgagattatgccactgcactccatgctgggtgacagagaaagaccccatctcaaaaaaaaaaagtagtaggttgtcacctgcatttctcagcagctggcagtgaattgaaggttcacaggactccctccttgagtttggttaacttgctagagcgggtcagaaaacacagaaatgctacttacatttgctagtttattaataaaggatatcataaaggatacagaagaacagccagatggagagattcaaggaacgtgggagggggcacggagctttcatgccctctccaggcacgctaccctccaggaacctccaaacggttcagctgtctggaagctctctgaaccttgtcattttggagttttatggaagcttttttatgcagtcatgattgattacatcaccagcccttggtgatcagcttaaccttcagcttcggtctcctccctggagggatgggtgtcccaccccgctaatcctgccttggtctttctggtgaccagccccttttctgaagccatctaagggcccccagccgccactcatctcattagcaaacaaaagataccacggctcaaaaaaaaaaaaagacaaagtatgtttgtgtgtgtgtgtgtgtgtgtgtgtgtgtgtgtgtgtgtgtgtgtgtgtattgttggggctcagaaaatgatacctggaaatatggtgctttgatatgctgaactctccaccctcacactttgtctctcccaaagcacaggatgaggctcttctctgccgttcccttatctacctagaaactggacctaccagagaggaacacagttgtctttgatccctttcctgaaatgtcattaaccagggaacattaaaactcatcttacagaggagactgaagaccaaacaacatacctagagcctggacaaactgtcccaaccgttgtttgttcactgtcccatacaatttccaaagagaatcattcacaagatgatatctgcttcccagatccattcattccccactaagaattatttcctcccacatccctatctccccttcccctgtgaagaagagtatagaagcgtctgtacctcgctggcattattgggtaatcattctgcagttcccctgtgcaatgcatgttaaataagtggatgcctttgctcccattaatctgccttttgtcggttcactttcagcagacctttagagagtgaaaggggaagcttttcctcttggccgctacaatacatatgtaggtgcatatatgtttaatcacttatggatgagtctagtttctaaaagtacttttttcatcactgtgtttcttttctgatcagtaaaaaagattttttttttttttttgagaccgagtctcactctgtcgcctaggctggagtgcagtagcacaatctcggctcactgcagcctctgcctcctgggttcaagcgattctcctgcctcagccaccctagtagctgggattacaagtgtgtgccaccacacccacctaatttgtgtatttttggtagagacggggtttcgccatgttggccgggctggtctcaaactcttggcctcaagtgatccacctatctcggcctcccaaactgctggaattacagacgtgagccatcacgcccagccgatcattttttaaaatataaaaaagcacaccatttgtgctatgagaatttcagacaacacccagaaacaaatatctccttaagcactacctcacggatgttttyccattatgaatgctgacktacaaataatcctaattttgtttaatcaaaaagggatattatacttttaattctccatcctgctttatttttattttttaattgcatcttgctcttttgctgaataatttttggagattttccatatctttctatatagacttaactataatcattttattggtgtatagtttactatatttggatgtataattgatttactcagtcacttgttggtactccaggactcataaaaaaagaatttggactaactctaggtagtcatatagatagaataaattgtcactcatcacatgtgtttggctgacttgaaactattgtctgggagtgtggctgccacccagccaatgtccagctgatgtgggtaggaacaggttgtgggaaggagagctgatggccgaccattatttttctttgttgccaaactgctgcgtcttttttttttttttttttgagagtgtctcactttgttgcccaggctggagtgcagtggcatgatcttggctggctcactgcaacctccgcctcctaggttcaagcagctctcctgccctagcctcccgagtagctgggattacaggcgtgctccaccactcccagctaacttgtatttttagtagagatggggtttcaccatcttgcctaggctggtctcgaacttctggcctcaagtgatcctcctgcctcagcctcccaaagtgctgggattacaggtgtgagccactgcacccagcccagactgctgcttctctaacaagacaactaaaatgatttcctttgaattgtttctctaaatgtctgtggcatacctgcaagttgcttgcaggatttctgtgttttgtgatgcatgttgtaaaggatgctgcttcagatgtagaagttttaggagccgagagccaagctgaatctgtgcctcttcctaacataaagtggaagttggccaggcgcagtggctcatgcctgtaatcccagcactttgggaggctgaggagggcggatcacgaggtcaggagatcgagaccatcctggctaacacggtgaaatcccgtctctactaaaaatacaaaaaaattagccgggcgtgttggcaggcgcctgtagtcccagctactcaggaggctgaggcaggagaatggtgtgaacccgggaggcggagcttgcagtgagctgagattgcgccactgcactccagcctgggcgacagagcgagactccgtctcaaaaaaaaaaaaaaaaagtggaagttgcttttaaaaatactttccatgttagtttgtcttgtgactaacctcatttccatagacactaactacaaaagataattataactaattgacattctaaattaatttggttctggctaactgaaacttttgttcatatctaatggagtaagtttcataaggctgatgatagctgaaggtctttaaatattttgccaaaacaggaagtttaaaaataggtaatttaaaacttctcctaaagcatgaagtatgaacctaaagcaacaccactcaaattttaatgtgcatctgagtcatctggggctgcagggctgcaggagtctaagattctgcattttgtttttgtgtttgtttttgaaacggagtctcgctgtgtcacccaggctggagtgcagtggtgcgatctcggctcaccacaacctccacctcccaggttccagtgattctcctgcctcagcctccaaagtagctgggactacaggtgcgcgccaccatgccyggctaattttgtatttttagtagagacagggtttcaccatgttggctagactggtcttgaactcctgacctcaggtgatccacctgccttgacctcccaaagtgctgggattataggcatgagccaccgcacccagccagattctgcattttgaaccagctcctcctgggtgctgcaggtaccactgctctgcccatccacacgttgagtagcaggaacccagaggtttgtccctttgcaggtcttctcacctgacatgaccttttgactcaactttgcctcttttcagagtttggattatgatcgctgtatcaatgacccttacctggaagttttggagaccatggataataaggtgggtcttacaattcttcatctctggggatcaaatcagtcttaacatggcattttttttctcttctaaaggccccagtaaacatctttacaccttgttttttgaaccttttcatgcgatacaggcagacctcactttatgcgctttgctttatttcacctcgcaggtactgcaggttttacaaactggaggttggtggcaaccctgtgttgagcaaggtgccatttttccaatagcatgcattttgtttgcattttttagccataaagtattttttaattaaggtaggtacatttttgtaggcataatgctattacacactttatagacctcagtatagtgtaaacatcacttttatatgcactgggtaaccaaaacactcgtgtgactcactttattgtgatatttgctttattgtggtggtctagaaccaaacccatgctatctgyaaggtaggcctatgttggcatttattccctaggcctttatcctgccaaccagagttccccctgtcagtgcaccttgcccagcctcttaagagtccatcatttttgcactgtaaagcacctgaaatcccaacatcatctttactgtgcctgctctccacgtggaatttagcttaaaactggttggccaagatgtatttcttcccctctgccaccataaccctgtaaactgaatcattcttttcctrtgtgaacagaaaggtcgaagatatgaggcrgtgaagtggatggtggtgtttgccattggagtctgcactggcctggtgaggaggcagggcctggagggatggtgggccatagggctggaggggcttacagggaaagccctggcctggtgaataacattgtcatttgtcattataacatttataacattataatgcaataacacttgtcattataatcaagagtgccttttcttttttcccttttttttttttaaatgaataatcctggcacagtttttcacacttcccctgcttttgctttgtgaaatgaaagcgagacacatgacaatggtgctcttgaagcgctcaaaggtttgggcaggactttatcttttatgatatgattatggatcataatctctaatctacctagtaaactagatgtctccctaatgggtagataatgcattgggtagagtaaataatggaagttaaagttacttttttttttcttttaatttaaatagagacagggtctcgctttgtcaccctggctggagcacagtggcgtaatcacagttcactgcagcctcgaccttctgggcttgggtgatcctcctacctcagcctcccgagtggttaggactctaggcaggcatgagatcgctctttagggaaaaagcgaagtcgtgggtacggaactgtgaacatcgtgcccttcatttagcacagcgtgccagtgaacagggtggcacaccatagctattgatctcatgcagggagtttatggtgctatcctgggctcctccccgtacgtcgttaatgttatctagaagatagagccagcagctgtgagtgaagggatatgcccgtatgaacagagttggtggaggcagcaacttcacaggtgaatcaaagacaaggcaagattggaaacatggccaaagatgaggatagcaaaaagtctggaaccaaaactgccgacttcacattgttaaatatgaggaagagaagctggaaaaatcagcatcagtcaaaaagatccatgtcaaatctgattccggtcagtacagtgttgggatagggtatctgtcctcagtaacagcctgttgaccacctttatcttgaactggccacaagcctcctacttaatttgacatgatatgcctagaaaatgtacacatgtgttcggtataatatagccacaggggccaaccacaatttttattttcatggcatgcatcaaatttttactatagtaaatccacaagtaaaggaacatcttactaggtaagactgatggcattcagaagccctcttcagtgatattctgatggataccattttggggaaacttgggttgatttattgttttatttaaatctcagggtgttgggccagggacggtggctcacacctgtaatcccagcattttgagaggccgagacaggaggactgcttgagcccaggagtttgagaccagcctgggcaacgtagggagaccctgtctccttaaaaataaaaaaaaaattaaaaaaaagaaatctcagggtatttattttgctatatatgtttctggttgcagatttctctataataagcatagtccttaggcctctagttgttagtgtttgtgctacttttatatcaaactctttggagctgccacttgtcagtactacaggttgagtgttccttatcagaaaatccaaaatgctccaaaatccaaaactttttgaatgctgacacgattctcaggaaatactcattggcgcattcagattttggatttcaaatttttggatttgggatgtttaatcagtataatgtagatattcgaaaaaaaaatctgaaatccaaaacacttctggtcccaagcatttcagataagtgttactcaagctgaagcaactttacctcctacctttgtattttaggaaggcacacctgcctttatgacatagcactcccaactctygtccattgatgtgtggccactttatggcttcagtatcaaaaagcctccaggcattggcttgagggaaggccagagttaaaggcaagaagctttgatcctgaatccataaaattagaagtctttctagttctcctttaagccctgagcactttggagagtggaatactggaatttggttgttttctctacccagagtaactatggactataagatggttataagtcaagcctggcacagtggggtgtgcctgtaatcccagctacctgggaggctgaggcaggaggatctcttaaaccctggagttcaaggccagcctaggcaatatagcaagaccccatctcaaaaaaagatgatttcaagtcaaaataatgacttacaaaatagaacctgctaataaggaacatgcaaaaagcacatacacctaaatgaatgttgtgttttaaagcaagcttgtccaacccatggcccaacacagattcatataccttttaaaaacatttatgagatttttctgagtttttcttttcttagctcatcagctrtcattagtgtattttatgtgtggccaaagacaattcttcttccagtgtggtccagggaagccaaaagagtagacacccctgtgtcagtagtctttcttggtctcrcatctttttctgcacctgcttccctctttgttttccgttgcttcactcaacttagctgtactctctgcctttgttctttggaggggcagtggractgggctggagaagggatctcctccttctgcgcttttctgctgtgcattcacgtactgctggctggtgagcagcctccgtatgtgcagtgggggaggagatgccttyaagaggagcacacctgtactatacttgtgctacacttggaaataaggctgtgtgacagatctcttgctcttcacaggtgggtctctttgtggacttttttgtgcgactcttcacccaactcaagttcrgagtggtacagacatgtatccttttcacggttcctggtgttcgtggacttcagtggtcaccaagattctttcttacatagaaatgggtytaacagtaagcatrgtattagaagggccgcttattagctattcagctttaatatttctaatgatcactgaaggacacaaaagaaggactttaataagcaaagacatatacctatgtttgtggttgataagattacagatgccgcaaagatgcctgtactccctaatctgtaaatttaatgtagttccaatcaaaattccaatagaatttgttgtggaactcagaaattctttgtaaatttgtgtagaagagtaaagggccaaaagcagtcagtatagttctaaatgacaagaaggtggacttgaccctgtcagatatcaagtcttataaaattaacaagtttggggagttagggaaaaaaaagtcataaaatttaagatacagtcattgaaattggtcatattggtgcaggaatacctagacagtggaaaatgatagagaagcagaagctggtcctcacatacatggaactttggtgaatgacagttaatattacaaatcagtgagggagtgatgaatgatttaataaaagacgctgtgttatttaataaataaaagatacacatctctgtagtcccagctacttaggaggtgagcccaggagtttgaggctgtaatgcaccatgactgtgcctgggcagcatagcaagaccctgtcttaaaaaaaatgatgctgggacatgggtgatccatatggaaaaatagttatattcctatttcatactataaataagataaattccagatgaagatgtaaatatgcagaacaaaacttcgggagactatatgttgtcaagagtggggaataatttcttaaaactccagaaggcacagactataagaaaaaacatcaatggggccggacacagtggctcacgcctgtaatcccagcattttgggaggcagaggcaggcggatcacaaggtcaggagattgagaccatcctggctaacacggtgaaaccccgtctctactaaaaatacaaaaaaattagctgggcgtggcggtgtgcgcctgtagtcccagatgctggggaggctgaggcaggagaatggcatgaacctgggaggcggagcttgcagtaagccaagatcacgccactgcactccagcctgggtgacagagcaagactccrtctcaaaaacaaacaaacaaaaacatcaatggctgggtgcagtggctcatgcctgtaatctcaggactttgggaggccgaggcaggcagatcacctgaggtcaggagttcaaggccagcctggctaacatgacaaaaccccatctctactaaaagtacaaaaaattagctgggcatggtggcgggtgcctgtaatcccagctacttggaaggctgaggtgggagaatcgcttgaacccgggagacagaggctgcagtgagccgagatcgcgccattgcactccagcctgggcaatgagagcaaaactgtctcaaaaaamaacaacaaaaaaaaaaaacaaacaaaatcaataaatttgaccacatcaaagtacatattgtatttataaagacaaaaactccaaataacaacaataaaacaccataaataaagtgaaaacaagtccacagcctgagagaggttatttactatgcatttaagaggcagataattagtatccasaatacaggaagaggctgggcgcggtggctgacgcctgtaatcccagcactttgggaggccgaggcaggcggatcacttgaggtcaggagttcaagaccagcctggccaacatggtgaaaccctgtctctactaaaaatacaaattgagctgagtgtggtggtgtgcacctttagtccagatacttgggaggcagaggcaggagaatcacttgaacccaggaggcggaggttgcagtgagccgagattgcaacactgtactccagcctgggtgacagaatgagactctgattcagaacaaataatacaggaagaactcctgcaactcaatcagaaaaacaacagatggtccaatggaaggaaaacgagcaaaggatgtgaactggaattctcaaaagagaaaaactggccagtaaacctctagaaaaaggaaggtgcacattcctgtgactcatacattcctcttagaaatttgaaccgtagacatgtacaaaggtggtaattatagctttatgatagcaaaaagctggagtcaccaaatgggagaatggaaaaattatggtacattcatatggtatcattttagacatcatgtcatttctgtagattgtaaaataaaaattttagacaagtgaaagtgaacgaaccacagagttgtgtgtatcaacatggctaattctcaaagacttaatgttgagaaaaaaagagcaagttacagaatatacaagtgccgtgtacaacagtgtggacacttttgaaatacacacaataatttcaggttagtggtttctcccaggggagagaggaaggaaaactgtttttttttttgttttgttttgtttcttaaaatggtactgaatgttttcttttttaaaaatacctggagcatatatggcatgttgttgagatttgttaaagctacagttgtgagggtatgggtattcgttactttttgtaatgtttgaagtatttcctaatgtcaaaggcatctcaaacaattttttcttttttttaagagatgaggcctcacactgttgcctaggctggaatgcagtggtgcaatgacagctcactgcagcctcagcctcccaggctcaagcgatcctcccacctcagcttcttgagtagctgggaccataggcatataccttttgtactttttgtagcracatggtctcactacattgcccaggctggcctccaactcttaggctcaagtgatcctcctgcctcagcctcccaaagtgttgggattacaggcatgagccattgcacccagtcatctcaggcagtttttaaaaaatttttatatakagagaaaaagtgcactcagcagccagcatgatccaaaggagaagcagctgcaccctctcaagtgatgacggggacacccctcggctgatgaacaagtttccttaacccagtttccgcagcggtggaggagtgcagccagaaaggctgcctcgctctgtctctccttgaactcctgggttttaacctcacctttgtcttcctggcaagcctccttgttctcattgaggtgaggtggtttggattcacctgctcgcttaggaggttttagagtcccgcaytccttttccccacctccttccagaatgtcaggaaactgagaatgcagattcctgcagaaagtggcctcttgttcactaaaggtaaaggtttcacctctggtgagattaaagaagaaaggcctcccaggtgatgctcattcacagggaacttgtacagattctggggggaggaaaaaagggggaaagggctgaaaacaaaactgttgggtgccatgcgcactacctgggtgacaggatcattcatgtcccaaacctcagcatcatgcaatataccctcgtaacatacctgtacatgcaatccctgaacctaaaataaaagtggaaattatttttctttaaaaagtgcaagtctggccactttgggaggccaaggcgggcagatcacctaagatcgggagtttgagaccattctgaccagtgtrgagaaacccygtctctagtaaaaatacaaaattagccggtaaaaatacaaaattagccgggcgtggtggcgcatgcctgtaatcccagctactcgggcgactgaggcaggggaattgctggaacccagaaggcggaggttgcaatgagtggagattgtgccattgcactccagcctgggcaacaagagtgaaactctayctcaaaaaaaaaaaagaaaaaaaagtgcaagtcctcccattgcccctcagacctcctgagtcagatcctctggagtggggcccagcagctgtggttcwgcaagccctccaggtgacgctcacgctgctaatgaaggtggccagctctccctcttccgccgcccagattgttgagggtaagccagagaaccaatggatttcgagttatgggtgtgcctgctctcctccatcagccggtggcagcaggttccgggatacccgaggtcaaatgctatctgaatggcgtaaaggtgccaggaatcgtccgtctccggaccctgctctgcaaggtccttggagtgctgttcagtgtggctggaggtaagaagggtccaacttgtatccttcaaatactcaaagggcagagacgacaagaagcatgatgtatttcagttattagatttggactgcagggcccagcctcaaacagctgatgtctgcactttttgttgatgggctgtttttaaatgcagacactgttcgtatgttaccattcagatacctgacaaacacactcttcagttttgggatttggaatttagcttgtggaattagcttttgtcaaaattagcaagctytttgtgtcaacagccagatagtaaatatttaaggctttgtgggccaagaatcagaatggaagctcttatgtagatgtttatgtaactatttacatgtgtgcatttaagaacgtaaaagccagtcttagttctcaggccgtgtaaaaccaggagggagctggtggtctgggctcacaggctctcatttgctgacacacaatttagaatgtagagtgttttctcttctagcaagacttgaaatggagcttatttggtgggaatttggctctttctcttataaagtcttaggatcatctctgttcagttgtcacgaggaaggtttttgtagccaaggtctcctgacccaggggcgtttctgcactgactgttggtctttcctttttcaccctgcccagggctcttcgtggrgaaggaaggccccatgatccacagtggttcggtggtgggagctggcctccctcaggtaagatgrgctgagagrgtgtgggcctctgggcaggcctagtgggaggtctggttacactgggccaaatccattgggacaccctgacatcacattggaacctggtgccattctggcttcacgtgtaaaccatgtgtctatctctcaggaaagggcataacttatacttggaagttttaatgatgccctaccgagccctaggagcaaaaatgagacatagagaaaaactgtgacgtggcggatgaaagtcactgggtgcttccatagccatcaccaggcgcctctatatagggtggctgggtggatcatctcagtgctgccagatccaagaggctcgaagcatcgactgacatggttttaggcacagttccgtgctgattctagttggcgtggtacagtcataataactgctgctaattatggtctgtgtgccagacgccatgtatactaactgctttctccttatagccaccttcaatgattcgttgttattattacccccatcctcagatggggaaactgaggcttagagaggttgaggtactagctcgagacctcaaagctcccattcttgggggctactccagatccctggctgctgttggagaagtctcagttccctgtgaactgtcactcttagtcatttccctctccagtcctgagaagagggagttattgtggttgggagtctctgaggtgaaggagggaagattctttcgtccagagctcgtcttttggtctctctcctgctactgccttgagcaccagatctggcagaagtgagccaaggggtggaaggccaggcgtggagtgggcatcagtgtgcacctttgtggggcagacagaggacaggctctgggcccttctcttcctggcgctgctgagcagagcagactcggtcttctgcaacagcttccgcgtccccttccctcagctcagccatttgcctttattctttcagacttgttgactctgcacaaaatgggatttcagaaggtcctagaaacacgagggcaggaaaaataagctcctcccaagggtggggggtaatctccttttttcccaagtttttttattttcattttttgagacggagtctcactctgttgcccaggctggagtgcgatggtgccatctctgctcactacagcctccgcctcctgggttcaagcgattctcctggctcagcctcctgagtagctgggattacaggcatatgtcaccacgcctggctaaattttgtatttttagtagagacagggttttgccacgttggccaggttggtctccaactcctgaccttaggtaatcagccgtccgcctcggcctcccaaagtggtgggattacaggcgtgagccatgagctaccacgcccagcctccttttttcccaagttgctgttctggactttccttcctgcagcacacttacccaggtgtgctcaagcagaggggcctcccctgatgccgtggattcccatagtttcagtcctaggctgcccctgacctgtgttcttttttttttttccataattactggggtacaggtagtatttggttatatgagtaggctctttagtggctctcttttctcttgctttagtttcagagcatctccttacggaagatccagtttaacttcccctatttccgaagcgacaggtatggaaaggttagaaattggtttcttttttggaaacaacatgttcatgcgctgcgggtcagactcgacacttgctctagcctggcagtatcccctgcggggaaacccgactgggagaagggggcgggctttgaacttttcttctggaaataagaagccaaagcaccaggctggcatcgtgacttttattttgtcatgccgtaaggcctagaagcatctcaggcaaatgaagatggtcccagattaaaaacccaaccaagaaaggccacagacaggcatattcttaggaaggcgttttgtattccccagtgattcacttggtcagccaccctcctgggtcagaaggtactcttagtagacttcttagccctgtatcagatgtgtgtgttactgacctgccggcctcgtaaggctctttcaatcagagactcagtttagagtcacggaccaccttctttttgtattcctgcaagttcggcacatacccagaaggcaccttgatgtttttactgatgccggggttttctggaaggaagatccrgtgggaacatggtgcagcagtgatcgtgccgatctttgatctgccccctgagctgggggctgagattctgagatcacagaaaacacagaggtcaggggctcctgttcccaggcagagtagccgccatgctgaaagggactctggtgctaaggtgtgtggctctcgggtggacacactcgcggcaaaggctgcctcaccagtgacctgcccttccaggatccctgcctattcattcacaggtgtgagaaaatgttcatgataaggaagtcagaaaccaccttttgggggctgggggctctttattggataacycgtctctctcctctcctcagagacaagagagactttgtatcagcaggagcggctgctggagttgctgcagctttcggggcgccaatcgggggtaccttgttcagtctagaggagggttcgtccttctggaaccaagggctcacgtggaaagtggtgaggaggaccttcagtgaaagcrttaaccacacccmccgaattacactgggtgtcccttactcggtacatggaatggtagttttgatgagactgrgggggtcractggatcagaaacagctttcctcttgtgcccataacctccacactggactttctgtacttctcatatcaataccctccctaaccccaaatcaaaccgctgttactttttttttttttttttttttttgagatggagtcttgctctgttgcccaggctggagggcagtgacgcgatctcggcttactgcagcctctgcctcctggattcaagcgattctcctgcctcagccttatgagtagctgggattataggcacgtgccaccgcatccagctaatttttgtatttttagtagagatggggcttctgacatcaggtgatccacccgccttggcttcccaaagtgttgggattacaggcgtgagccaccacgcctggccttgttatcctttcttgatgaaccacctgacatgaaaatgtgaaactggctgttgtcataaagcaggaagtgatggggcttggactggagccggtcttctccctcagagcaggctgtccttccctttgcattgatccttccttttggtgcaaggtctggtctgtaaaggctgtaaataggctctcatagtagagtaggctgctggaacggaaacttcttaaagcccaatctagagttggtcatacctggggtgtatctactgtaagggtgactagatctctgtacccggatgtagattcyggaggtctctgygtagagcagtgggtaccaggaggaagggttgggagagagtaggacatgccactcctgaaccttcttgtcttttgtcacctctcccctagctcttttgttccatgtctgccaccttcaccctcaacttcttccgttctgggattcagtttggaagctggggttccttccagctccctggattgctgaactttggcgagtttaaggtatgttttgtcctttccccaaggatttttaatttgacccatgaaaatttcctctcaagtgaaggaccagagagaaatgagcagagggctaggtacaacttccagggrcacatctcacccattagcctctgccgtgcgggaaagcagccccactcttgcttctgtcttctcttctgtctcttccggttctcatggctgctatggtttttctctccctctccctttccccttctctcagtgctctgactctgataaaaaatgtcatctctggacagctatggatttgggtttcttcgtcgtgatgggggtcattgggggcctcctgggagccacattcaactgtctgaacaagaggcttgcaaagtaccgtatgcgaaacgtgcacccgaaacctaagctcgtcaggtatctgcacagtcgcctcccccccgagcctgctgcggctccctgagcttggtgtgggccgcgccatctctcccgaggagcggaccctgcctccacggctttgatttctcatctaagactgagaatctaaacacggccatgcatcttccctacttgacaggccaaagggctgagccagcttaattgatgtcagagttgctggttgactccctgcctgtcctgacttggccactcggacacatgacaaggttagaagggtcaccgtggccctgccgagcagcttgctctcaggaggcttctcgccccaggacttattataatggaaagccattcattccttggagagagatgatgtggacgtagcagcccactttaactgtccactttttacaaacaaattgctggaatacagcaaatcacggatcaattctgcacacatgttgactgaccaggggctgctgtgaatgctgttyggagaaatcggggctgggggtaggcagggttatgttttgaatttctgagaccagagctkctttctgtggcrttgtaacagctgtgctttgcctcctagagtcttagagagcctccttgtgtctctggtaaccaccgtggtggtgtttgtggcctcgatggtgttaggagaatgccgacagatgtcctcttcgagtcaaatcggtaatgactcattccagctccaggtaaccccagtgcacctgctacctttatcccataccacgaggaagaatccagaaatgtatgaccttcctctgttgagaactaatagatrtgttgggttcatccttccacacccattacctgagcgttgagagatatgggaatctgtagtcgtctttttacctcagagaaagtgcacaccacatgccctgtgtctttgccacttctgtgaacaaccctggcgtcacagaggggaacctgggaacaaccctggcgtcacagaggggaacctgggaacaaccctggcgtcacagaggggaacctgggaacaaccctggcgtcacagaggggaacctgggaacaaccctggcgtcacagaggggaacctgggaacaaccctggcatcacagaggggaacctgggaacgaccctggcgtcacagaggggaacctgggaacgacactggcgtcacagaggggaacctgggaacaaccctggcatcacagagggcaactcctctctgttgaacaacactcatgggaaacagacacttggaaagctgacagcaaggtgctttctgagccccagttactcttccacctccccttgcctgaaggggccacagcccagaggctcagcacccacctcatggcctctgtgactatgacagtcactcttgagaggaagaaatatctgtgtcagggcaaggaggcttctctcttcccagcatcctctgcctcttcccggcgttgggtcctttgtgggtgcgccaccctcctgcactcctccttttcccttcttggggggcgcgatattttccagaggctttccctgaggagtggtcccatgaggtagtccgtggagcctactccacgctgtgttctttcggtccaacccggaggctctgagagctacacctgtggttcagtgagtcagccagatgtgtgattccagcccttggctgcagacaggtgagcattctctaagtgcggtcggccatccacatttgtgggtcctgcatccatggaattacgtagggtcaaccaactgtggagcaaatatattcaggatgcaaaacataaaaaagaacaagacaacagtaaaaaataatgcaaataaaaaacagtacagtgtaacaattatttacatagcatttacattgtattagggtattataaataatctagagatgatttaaaagtatataggaggacctacataggttatatgcaaatatacaccattttatatctgggacttgagcatccctggattttggtatccatcgggatcctggaccctatccctggtgaatackgaggaacaactgtactctttycttgttgcttctctgtaaccacttgaatctctcagatccccaytggggcccttgtcttggaggacagcctcttcagtgtccccagttatatgtatatattatwtatatatatatatatatatatatacacacacacactatatatayacacayacacacacacacacacacacacaaacacacattatatatttctgtttgttttgtttttttaagacggagtcttactctgttacccaggccggagtgcagtggcgcgatcttggcccactgcaacttccgcctcccaagttcaagtgattctcctgcctcagcctcccgagtaactgggattacaggcacccaccaccatgcccagctaattttgtatttttagtagagatggtgtttcaccatgttggccaggctggtctcgaactcctgacctcaagtgatccacccatctcggcctcccaaattgctaggattacaggtgtgtcaccacgcccagcctggtttatatatatatgtttttgtttttgtttttgytttttttttggcaaagtctcactctgttgcccaagctggagtggagtggcaagatctcggctcactgcaaactccacctcctgggttcaagcgattctcctgcctcagcctcccaagtagctgggacttcaggcacgcaccaccattcccagataatttttgtatttctagtagagacggagtttcactattttggctgggcttgttttgaactcctgaccttgtgatccgcccacctcggcctcccaaagtgctaggattgcaggcgtgagccaccgtgtccagctggtttatatatttttaaagggttgagagaaaaaaaagaatatgccgcagagactgtacatcactggcaacttctaaaatatttactgtctggctctttatgaaaaagtttgccgacccctgttactagttattcccaagcctagctcattaccagacagataccttgatgcgtgtgatttaaagcatacaaaaaacgattctgtggtcaaatgggctaggaattaaatatgcttctttatctttttagagacaggatctcactctgtcacccaggctggagtacggtggtgtgatcatagcttattgtaacctcaaactcctgggctcaagcgatcctcccatctcagcctcccaagtagctgggactacaggtgcatgccaccacatccagcttatttttatagagacaggatctcactatgttgcccaggctggtctcgaacttctggcctaaaatgatctcctgttttaggagtgctaggattatagacacaagccatagcacccaacctaaatacgttcctttagtacagaacttctagggccttattcccataagtgttataaatgtttggtgtctttattgtgtaccagatattccactgagtactttatatgatttcatttaatccttatcagcactgtgcttgctggccagtagctgtgcccccattttacagctaaggaagctgaggcacagtatggtcttgaccaaaaaccttcagctagtcatatatagtgagagggtaggtgttgttaccattttataggtgaggaaactcacaaaatgaaatatccttctcaacgtcactagagagtggcagagtttagagacaaagccatctgattttggagcctgtgctcagcttttagcagacacactgatttccaagaattgctaggatgtttctcagtgcagttgaccacaggactctctggaaagccttcaggactgaacttcctccagacagtttgggaaacactgcatgtgtctattatgaagccatcagctgagctcatcccccgtgcactccacaacgctgaggctctgcacatggctcaccagtgccaggtgctgccagtcagcagtgccgtgctgtttscacagcagcctgcatacgtctatattgcccagccygtttcacctggcggggtcacacaaaccaccccctggtattgttagcacgtccacataatggcatctccacagctgtgtcatccagaagaaacccatagccttgattaacctttgtaataagactccctatttgcatgcacagtgataggtgtgaagtacaaccttgtaccgttgtacactgtcaactagaaaataaaacagcacacttgaaacacccttgccttctagcaaagatcccatcttcccacacagaatgatggcaagaaaatgaggtctaaaatgtgtagaagtagtagaagaaataatctctttttctgtttgggttttgttccccagatggggtctagaaggagaggcagcctggaggactgggtctgctctccaggcattatggaggtgggttttcttttgcagcaaattcaggtgctttttttttttttgtagcaaattgcagcaaaatcaaaggctttttctatttggaaccagagttggggctttcggtcaagtggtgccctggattttcctccccagatacctgtcaactcccagtcacttgctctcacctgcctcatattcccccagtcctagggctctcaggccaggcttctagcagcatcacttagaaagttagcaccgggagaggaagcagaaccaaattcacggtgaatcacggccatagtgacattttcatcatgagtgtggatgaacaaaaggccctcatcccgattctttcatctgtgcattcagaatgtgaagaatacacttgcccgtgtggctgccgttggtagaggtcagtttttggcctgtttgattgatggggaaagctgtgcagccacctgttttggacccggctggagacatcccacttgaagactcaaagtcaggtgtccttgtactgattttctgattccttcttctcaggtcacagaagatgtgaattcaagtatcaagacatttttttgtcccaatgatacctacaatgacatggccacactcttcttcaacccgcaggagtctgccatcctccagctcttccaccaggatggtgagtgtctgcactgcagcccaatcrtgggtgattggtgtcatctcggacacagccaggcttgcccttcattccaagcaagaccaggacttctttgtaacgcccacccagacaaaagattggtttctgcctccwgtgttggaaggggaactggtatggggtgtggtcgggccyggtaggtctactgggccttggcaggcatccggtagtgggactcaggttggctcttcccttgcaggtactttcagccccgtcactctggccttgttcttcgttctctatttcttgcttgcatgttggacttacggcatttctgttccaagtggcctttttgtgccttctctgctgtgtggagctgcttttggacgtttagttgccaatgtcctaaaaaggtactctgtgtgtgtgcgtgtgtgtgcgcatgtgcatgtgtgtgcrcgtgtgcrtgtgtatgcatgtgtgtgcgtgtgcgtgcgttgatgtgtctgtgcccatgcatgcacatatgtgcataggcacaagagtatgagctgtaggtcctccccacagcctatcartgtggttcaaagccatgttctcggtgttttccttcactagctacattggattgggccacatctattcggggacctttgccctgattggtgcagcggctttcttgggcggggtggtccgcatgaccatcagcctcacggtcatcctgatcgagtccaccaatgagatcacctacgggctccccatcatggtcacactgatggtgagcacactccctccaggcccctgtcaggctcagggccacgtccgccccacaggacctatttttaggtctttgctttgtgtttcaggtggccaaatggacaggggactttttcaataagggcatttatgatatccacgtgggcctgcgaggcgtgccgcttctggaatgggagacagaggtggaaatggacaagtaaggccatgattttgctcatgtcctagtttcagaatgtataagctctgaggcctaaggaatgttgttattagggtaggaaacagtaactyacttttcttgggctgaaagaagcaacacacccattcctgagcatgtgtgagaatgtggagcagcccatgggctgggggctgcgggggcagggcaggggacacgggcactgtgggactgcagtgggcagggcctcttcgtggtggtttgactcccatggcattctggttagatatgaggtgaggtctctggatcaagttcgtgatgtgattgaatgtttaagggtatgccaagccccaggagtgagaatagcctgtttcacatgtgcccaccagaatgccctactgccagccgggattgttctgggcataatcacctcataacccacctgctaatccacaggtacctgggcttcctgtgtctagatagcaggcaaggcccttacgggctaacacgggggccagcaagccgtttctgtggagggccagacaggagtttattttcaactttccgggctgtatggtctctgtcacgactactcgactctgtcattgcagcaggaaagcagtaagcgtgacggacttgatcagtgggctacagtttgctgtgccctgatctaaagggggacccaagtgctgtgtttattttattattattgtttttcttttttgggacaggatctcactctgtcgcctaggctggagtagggtggcatgattatagctcactgcaacctatgcctcccaggctcaagcgatcctccacctcagcctcctgagtagctgggatcacaggcgcgtgccaccacacctggctaatttttaacattttttttatagaaatggggttttgctgtgttgcccaggctggttttgaactcctgggctcaagcaatctgctggcctcggcctcccaaagtgctgggattacatgcgtgagccgctgcacccagcccacccatttacccagttgtggtaaatgctgtagcagaattagcagttcaggggtagtatgtggagcgtgctgcagggcaccgaggagggcgtggccagcccctggaccagcagccagggcttcctggtgaggggatgttgctgttgagctgagggatgagcccgagcccatcagcctggtacagcagggtacgacattccaggtgcgggaacagcatgtgtcgggggatagaagtacaaaggaatgcatcgggtttgagggagagctggggcagttcagaagagccccccaccccgcccgtggtctgagcagrgctggagagccagcacagcttsctcccaggggcctgcgggcactgtcatgaggctggatgayttgccctcctcccccaggctgagagccagcgacatcatggagcccaacctgacctacgtctacccgcacacccgcatccagtctctggtgagcatcctgcgcaccacggtccaccatgccttcccggtggtcacrgagaaccgcggtaacgagaaggagttcatgaagggcaaccagctcatcagcaacaacatcaagttcaaggtaaagaaaacggcatgagaggaaaggcaggtgagagacaagcggtcccgtctcacacggcttagtgctttgcccacccctggctggggtggacttaccggctctcaggggaagttggcactgttctcatcacaygcgacagggagagtagatttgacagcaggggcagctttatcaggccgtgaagatgtgtgtgcgttcttgccgcaatgagcatgtggacagatctgtttttcaagtcagcagctttcatggtttgtttaccatgtgagagtatcagggagagttctagagatgccagcaacagaaatggacttcgacctccttaagaaagagaaagaaatccacaggaaagctcaggacagctgggaaagctgaaggaccagaaccaygtgctgtggggagcagtgcagggtctagcagacatcccttgggtaccaggargaaggagcactggccctgggttcctcctgattccgattcagaatccagggagagggggtatcctgttgcctcacttgggtcatgtgccactccttggctttgggggcaggcacgttgattgaaaattctatcaagacaggatgtaggagatggcttgttcccctctggagaawcaagctgctcttcccagattaaaggaaaccacagaagctgcagccaggtcctagggttcaggctcatttgaaccaccagcctgagccactcttttgaacctcagccccattaagttcctgcgtccggatgtgcttctgaccctccctgtcacccaaatccttaagctccatcagtactgctgtgttcgtttgcccatgcgcagtagcctgtggcctccccacccacagaaatccagcatcctcacccgggctggygagcagcgcaaacggagccagtccatgaagtcctacccatccagcgagctacggaacatgtgtgatgagcacatcgcctctgaggagccagccgagaaggaggacctcctgcagcagatgctggaaaggaggtgagarcctggcggggcccccactgcccgcagggctacacagcggtggggtgagccyttggctcagatgttktgaggtggctcctgagtttcctgggaaagttggatggggagcgggctgggaacatggatcagaagcgctcccgctgagggtatcccaggcagcatctggtttttgtgtaacagatacactccctaccccaacctataccctgaccagtccccaagtgaagactggaccatggaggagcggttccgccctctgaccttccacggcctgatccttcggtcgcagcttgtcaccctgcttgtccgaggagtttgttactctgaaagccagtcggtaagtctctccgaggcagaaatcagccaggccagrcctgacgaagctcgaggggttgggcgctgccggcgggccgtgaacagtgccatagggaaagctgaatgcaaggcgagaagtgcagagtggacttaggggaggagtcgccacagccgggtggtgagaagcaacagcggtttattccttcatagttcaaggccagaartacaaaatccgggtgtcaccagggcagcgctccctggctctggtgctgtccttgccccttcctagctcatgggagttgcctgcagaccttggtgctcctgactgtgaacacagcccccatcctcgccactgtcatcacacggcgttctcctgtgtatcttctctcctttccctaaggacgcttgtcaccggatttggggcccrccctaatccagcatgggttcatctgaactcggtcacatctgtagagaccttgtttccagaaaggtcgcattcataggtactagggcttaggacttggccatatcttttggtggggggacacattcaccccccagccactttacttagtgctttctcacttaaacttccwaataagccatttgcatctcatgaatcaggaagaaagggagtgcagacagatcaggggacttgcccagggtgccacagctaggacttggccaaggactyggtttgactrgagagctctcactctggagcgcttgctgctgctgcaccacctgcctcagcagcctggagctgggcatattcaggcatcaaggggaggggctctaaggtgaccctgctggccactgctgcctgagcacggacagtgtctgggttggaattgcagagcgccagccagccgcgcctctcctatgccgagatggccgaggactacccgcggtaccccgacatccacgacctggacctgacgctgctcaacccgcgcatgatcgtggtgagaagggctgccccggcctgtcccatgcggagctgcctcttcatgccgttggcgtctcaggcagtcagtgacacgtggtctctttgcaggatgtcaccccatacatgaacccttcgcctttyaccgtctcgcccaacacccacgtctcccaagtcttcaacctgttcagaacgatgggcctgcgccacctgcccgtggtgaacgctgtgggagaggtgagcgaggccccggccctgcccccacctttgagagaggatcccctagccaggtgctgtttgtgcacccakgcttctcaccagaaacgtaggcatcccaccaggaggggagagtgtggcccaacactagckttgaaccctgctcggcttccgtgcactcgggaccctttcccctgcctgccagcagatggcaccagcgtcccactggccgtcctttccagccagagccgcgcctctaccaggctgtgtcttcctcctgaaatgttgctcttcactccgtaccactggtgttccttggttctccacctgcgtaggkatttgcgcattagatgagagaatttcaagcaaaatactttgagttttacaaagatataaaacacctagtaattattgctgcagactttccttttttcttctttttagaacttcattattttcttattacacaaatattttcttattacacaaatatgatttcattgtaggaaaatacaaaaacacatatgagcaaaaaacaagcaaaaaccaaaccctcgtccctaccctgtcgcggtagccctggtaacttttcaaggccaccctctcagtcttttgttgttgttgctgttgttgttgttttgagacagggtctcactctgtcacccaggctggagtgcagtggcaagatctcggctcactgcagcctcgaccttccaggctcaagcagtcctcccacctcagcctcctgagtagctgggaccacaggcatgcgccactatgcccagctagtttttgtatttatggtagagacacggtttcgccatgttgcccaggctggtcttgaactcctgaactcaagtgattcacctgcctcggcctcccaaagtgctgggattacatgcgtcagccactgcacccggcctcagtcttttcttctayrcggcacaaccctggcatgcatagtgcgtacttacacaggttttgttgcagtaggttaacttatgtcccttgaaatgtaattgccaactacactgacagagtcctaacatagtttatgacgtggctttggagttcccaacaacagtgacacgtgggaaccactgtaacgacctgtaacaaatgactcccataggtcactttgcaaggtggtgagtatgaggcatggcaggggtcataatctcaggagacttcaagggccccaccgcttgcacatctgtgaagcaggctggtcatgatgggagctgagcgctgagcatgtgccctgtggaaggacattttagttcagatgccagctggcccaagccctttttggagctaaccttgtccccttggcctccartgtgtgagccctcgttagctgtttatcccaatcaagctgtgtctggctgtgcactatccaggcctccacattctgtgacaaactaacagggccggctcctgtcactyctgttctcgccagcgggttttaccctkaaggtgactcaggccttctctttgccctagatcgtggggatcatcacacggcacaacctcacctatgaatttctgcaggcccggctgaggcagcactaccagaccatctgacagcccagcccaccctctcctggtgctgcctggggaggcaaatcatgctcactccggcgggcacagctggctggggctgttccggggcatggaagattcccagtyacccactcactcagaaagccgggagtcatcggacaccttgctggtcagaggycctgggggtggttttgaaccatcagagcttggacttttctgacttccccagcaaggatcttcccacttcctgctccctgtgttcccaccctccagtgttggcacaggcccacccctggctccaccagagccagaagcagaggtagaatcaggcgggccccgggctgcactccgagcagtgttcctggccatctttgctactttcctagagaacccggctgttgccttaaatgtgtgagagggacttggccaaggcaaaagctggggagatgccagtgacaacatacagttcatgactaggtttaggaattgggcactgagaaaattctcaatatttcagagagtccttcccttatttgggactcytaacacggtatcctcgctagttkgttttaagggaaacactctgctcctgggtgtgagcagaggctctggtcttgccctgtggtttgactctccttagaaccaccgcccaccagaaacataaaggattaaaatcacactaataacccctggatggtcaatctgataataggatcagatttacgtctaccctaattcttaacattgcagctttctctccatctgcagattattcccagtctcccagtaacacgtttctacccagatcctttttcatttccttaagttttgatctccgtcttcctgatgaagcaggcagagctcagaggatcttggcatcacccaccaaagttagctgaaagcagggcactcctggataaagcagcttcactcaactctggggaatgctaccattttttttccaaagtagaaaggaagcacttctgagccagtgaccactgaaaggtatgtgctatgataaagcagatggcctatttgaggaagagggtgtctgcccttcacaaacacctctctctcccctgcactagctgtcccaagcttacatacagaggcccttcaggagggcctcctgtgccgcagggagggtgcgtggggaagatgcttcctgccagcacgtgcctgaaggtttcacatgaagcatgggaagcgcaccctgtcgttcagtgacgtcattcttctccaggctggcccgccccctctgactaggcacccaaagtgagcatctgggcattgggcattcatgcttatcttcccccaccttctacatggtatyagtcccagcaggcatccctggggcagacgtgctttggctcaagatggccttcatttacgtttagttttttttaaaaccgtggaggttgcccacgggcctcggcacctggccctggcagcacagctctcaggcccagccctgggcgacctccttggccaagtctgcctttcaccctggggtgagcatcagtcctggctctgctggtccagatcttgcgctcagcacactctagggaataattccactccagagatggggctgcttcaaggtcttttctagctgattgtggcccctccattttccccattttcttatctccctgaccaaaattgctttgacttctaaatgtttctgcttcccagaatgcacctgacttatgaaatggggataatactcccaggaaatagcgcaggacatcacaaggaccaaaaaggcaattcttatttaaatgttactatttggccagctgctgctgtgttttatggcagtgttcagagcttgatcacgttatttcttccttttattaagaaggaagccaattgtccaagtcaggagaatggtgtgatcacctgtcacagacactttgtcccctctccccgccccttcctggagctggcagagctaacgccctgcaggaggaccccggcctctcgagggctggatcagcagccgcctgccctgaggctgccccggtgaatgttattggaattcatccctcgtgcacatcctgttgtgtttaagtcaccagatattttgttcccatcagtttagcccagagatagacagtagaatgcaaatacctccctcccctaaactgactggacggctgccaaggaggccccaaacccaggccccatgcaaaggcacgtggtttccttttctcctctctctgcatctgcgctttccagataagcccaaagacagcaacttctccactcatgacaaatcaactgtgaccctcgctccttccatttctgtccattagaaaccagccttttcagcatctcacccattagcagccccatcacccagtgatcagtcgcctcagtaaagcagatctgtggatggggagcctacgggtggtaagaagtggtgttttgtgtttcatctccagcttggtgttccatggcccctaggcgaggtgatcagggagtggggccaatgggcccccggccctggctttgggaccttgtgctgagggatgatttgctcctgaccttgattaacttaacagttcccagctggaagggacactttcaggacccagtccactgtatggcatttgtgatgcagaattatgcactgacatgaccctgggtgacaggaaagcctttcgagaggcccaaggtggcctcgccagccctgcagtattgatgtgcagtattgcaccacagctctgcggaccttggccattgccrcagtcgcagcttccttttttctgtttgcactgtttgtttgtatgatgttagctaattccactgtgtatataaattgtattttttttaatttgtaaaatgctatttttatttgaacctttggaacttgggagttctcattgtaaccctaacatgtgagaataaaatgtcttctgtctcctctgtctcctttagccttttgtctccatgctgctttctttctttctttctttytttgagacagagtctcgctgtcacccaggctggagtgcagtggtgccatctcagctcactgcaagctccgcctcccaggttcacgccattctcctgcctcagcctcccgagtggctgggactacaggcgcccaccaccatgcctggctaattttttgtatttttggtagagatggggtttcaccatgttagccaggatggtctcaatctcctgacctggtgatcctacccgcctcggcctcccaaagtgctgggattacaggcgtgagccaccacgcccggccctgctgctctttctttcaagggatacttgctttttattttactccccctctttctgatgtgtggaaattacactaggacgtagttttagagtctcagagctctccctatgcagctgggcagtggggctcttcattcttgcgggtccacttctctgtattagacagtgaccttaataagaacagatttcatcctgtggatcttagcagaggtcaccgttgtctgtttctcccttcagatgaacactcttcctgatcctctcctctagaattcatctcctcctgctagcagccgcgtcctggaggagcagcggatggggaatccattctgtttcttcctggtgtttaggaagttgccccacamacagattgccccgatgtccaaccagaagaagtgaaactgctgctgggtctggagaggtgaagacccgtggccagcttctgttgttgccatcggccattgctttttgttcgcttgcttttggttttgcaagaagagcggcctctgtctctgatctgcttcaaatcatcattccatcagtgacagaagtggcygttccatcagtggtcgcagccagttcagctcctgcatccatccccaagtgttctgtaagtcccaggggcattttctgccttgtgtttttgtcatttttcaatcagttycattcaatgagaactccctgtgttacctgtgttacggtgacaccttgagaatgggctacttcccctcctagcaacccgcaacaccatcccagacctcaggagccaggtttgggccagtgctgtctcctgtcgctcttactttcatccttgtcattctctaccccctggttttcctggtatttaaagtccaggtagagaagattttgactggaggtggttaggtgaggctctccccccacctcaaccccctgccattagttcactgggagcctccccctttcctccgcaaggagcaagttactacttcatttcctcttttcccaatttctggacaagaccaaggcaatttgaccaacatttatggggcatcaactctgagagtgcygaaggggcatttgccctcaaagagcttgcagtctagggacgtagacacaagcaattgcacataggcaactcgtgttgtgtgctattataacagttacatgtgcaacactgcctacgaagggactcattgttactaggcatgaggtaccaggaaagaagtagtgttcatatgagccttaagaaatcagtacaatgtcctcgggaggaccagaggaaggacaccccaggtggaaggaacagcagaaataaaggcacagtggcatgtgtgggtgtggggtgttggagtgtcatagaatctgatgaggttgggatccatgggggtaacaggtgggaaaacagtttactctgtttaaggtgaacttattgcctggtgttttgtgctcagagcaaataccctcttcaggagcagatacaaaaagccggcatcttctccagcagctcttagtaaaatacaagcccaggcccttcagacccggattaggcaaagactatgtctgttttccaaatacttgttagtacacaaaaggcacatgaacttgtagtttgtctgcatggcaaacctttcttcactttgctcagtttttatttttttgagacaagtctcattctgtcacccaggctggaatgcagtggcacaataccagctcactgcagcctccacctcccaggctcaagccatcctcccacttcggcctcctgaatagctggaactacaggtgcacatcatcatgcctggctaatttttaaattttttgtagagatggggtctcactctattgctcaggctggtcttgaactcctgggctcaagtgatttgcccaccttggcctcccaaaatgctgggattacaggagtgagccaccacacccggcctgctcagcttttaaattcaacactctgcctactcttttcaaaactaaaagtaccattaccttagctgtagaacctaactctctcgaaatgtaccagagaaaatctaattaatactctcattttctgaatgttcccccctaaaaacaacaaaaaccccactaggagtggaatttgaggcctccccaaccaccyaccaaaaaaggagggtgaaatgaaaggaagaagaaaaactcagcattctttcctctgacaaagagtaaaacgacaaggaatatcggcctgaattctcttcccaagaagaaagaaagcacaccaacgcaggcatttgtcttctgtccatggkgctgaagtttattcactttcaaaccactttcagtaacaggtgaggttctaccttaaaatttaatgcatggggtgggagaggcgaggaagtcaccatcaaaccactttatctacagttagcataagatgtgagaagtgttgacaggaagctgcagcttaratgggatgatcacaactccatggcaacaagrtgacacraatgcagcagagamcccaggggacaggagcctcttgcagtctgtccctaggcccagccctgcttgtcctccctggctgttatcttcrgtactgcaaagagaacacagacatatctggcttggtgacctggctgtcctggaaaagtcagcttcatgtatgagtgtgcccatcctctgaacttgattactgaccacctgcttcccaccggcccccaccccagcctgatgaccctctgagcttcatgaattgataagcaagttactcatcagagtaaatttcacttaagcccttcaggatcttgcaattctggggaggaatatgaactgctaatcagccatgcaaagataacttggctctatgaatattttaatttcccagtgctagtggcagttgcttttttttttttttttttttgagacggagtcttgctctgtcgcccaggctggagtgcagtggygccatctctgctcactgcaagctccgcctcccgggttcacgccattctcctgcctcagcctccggagtagctaggacttacaggcgcctgccaccacgcctggctaattttttgtatttttagtagagacggggtttcaccgtgttagccaggatggtctccatctcctgacctcgtgatccacccgccttggcctcccaaagygctgggattacaggcgtgagccaccgygcctggcctttttttttttttttttttttttttgagacagtctcgctctatcacctaggctggactgcagtggcgygatctctgctcactgcaacctctgcctcctgggttcaagtgattctcctgcctcagcctcccaagtagctgagagtacaggtgccygccaccacacccagctaatttttgtatttttagtagagctggggtttcaccatgttggccaggatagtcttgatctcttgacctcatgatcsgcctgcctcggcctcccaaagtgctgggattacaggcgtgagccacygtgcccagcccccccccttytttttttaagcattttctcagcagactagctaaggacaatagatggcatgtcctgacacccatggggcactctgggtgttggggcagaaacttgagagggaatgagcttctgcattggtccctttcctgctgaaggtgtctcccagtagtgtccatcccatcccatttccatccccagttcctcttacccggaagctgttacagcccagtccgctctgggctccaatcctgtccatcctgcccccgaagcagctggatctcygcaggctccgaggggcagtgagcagcgccctcagcttgctttttaggagggcagatcgatcagaggagtcccaggggccccgcccgagggcacctccatctctctgggctgggctgacttccccggtccagggaggcacctcagggarggggctgagagcagcccccgcttcttcattcggctcactgagcacttgtgggggcacgacctcatcttctaaaggcatcttttcttccaaatggtccagcaaattctttagaaaaggaaaatacagggaaagggataaacctcactgacttggaggaaatcaagaggagtgagcacagcatcagaaagccccctggccccagactgcacccgctttcctggccctaccttgaaatccatcaggtctgcgttggacacggcattgtacatgggattagctctggtctgacctaggagctggaatgccagtaaaaggaggaagctcacggtggtggtggagaaggagctcatgctggcgtcgtcaaggagcaatccactgcttgctgctctgtctctcccctctggttcctctctggttcccctctcttggcctacgtctgtccctgtctcccagctgcccagtgccgcctctttttatagccccccagctctccaagcacgcaggagagacagaaccctccccattctgtcacttgcagtgataaagctgccaagtgagaagccagcaggagatgcccttttaaagttatcatcccgcagggcttgtcacagcccctctctgccttgggcagccccaacagccccccagaccctcagctgcaagagccgcattcttactgatttgactcaagaggctcccacttcaaaggtgtgagaagagtaaaaaagagtccttggttatctcaccgccgtgcctcaggattctttctcctcgacgctggtacccgtgcggggaaacagagggtgacgcttggctggtgcccagctcccctggtttgtttgtggctcagctgtcagggcctccaaataagggtggagaggaggaaatggcaggcagccagcagcccgagacaaatggatccagatgctcaagctggcctcacacctgcctcatccgccacgtgggcagacctctggcctcagacagggctgccttcacccctggcagtccctctccatggtcaggcgaaaggaagttattttttagtatataaagtcagctgagaaccaaatgtgatgaagctcccaggaatccaacccccaaatagaaatagcaagaaaaggcgggggagcacaagcatcctctctccaaagctcctcctcttccatgtcccccgcgaccctcctccagcatgctgcggggacaggcttagaggacgcagccaatttcatttcttccgttgctgtttatagatgctcagactcttcgtgtctgaagtttgttaacatccccctgcccttcctgggcttgtgcccgtggcaacttgaccgatggaggaagggaggtgggggtgaaggaggtatagtcagtttccctcaatgccttctacatccttccctgaggacgtggcaagtggcaagtgaccgagccaccaaggtcacaatttccctggcccccaaaagggaaataacaggcagcaagtctgtctatgtttaatgaatggcctgtttgctaagcactgaactcagtgttagccattaccattcaatgcaacgtatactgggggaaaactctaaatttgaagggctgagagaccagtactgtagcccaaaacaaaccagttgcatacctcttcgcagccttactttccttgtgtgtaaaatgagaaagaatgttaaaaaccggccgggtgcagtggctcacacgtataatcccagcactttgggaggctaaggtgggtggatcacctgaggccaggagtttgagaccagccctaccaacatggcaaaactctgtctctactaaaaatataaaaattagctgggtgtggtggcatgtgcctgtaatccccgctactagggaggctgaggtaaaagaattgcttgaccttgggaggcggaggttgtagtgaaccaagatcgcaccactgcactctagcctgggcaacagagtgggactcggtctcaaaaaataaataaataaatgaatgaataaagtagaaatcttccctgcctaccttgcaggattgttgtggagcccaagtgagctgagaacgtgtcaacacataacaagtgtgcagtgctgagtccctgcaagatggccatcatagttgtctttattggttgcttgtagcatgcctagcactgtgctgagaactttatggaaatgattttattttgatcaccatccccaggtggtagatagcattgtccttgcttacaagggaacagaactgagcccgagaggctatgccacttgcccaaggccactaggtgcctaagtggcggaaccaggactggatccccaggtctgacgctgatgtctgtatcctagcctatttcacgtagagagctgccaccttacctcttagctgcattccccaattaaacccccattccccatctttcagatgccccaagggagctccttcaccttccccatgcccctggggctgtagcttttttgtgcacttaccaagtctgtgtgtgttggctgctctcctgatctatttctacaccgaatgtgttttaatccactccttagaagctcagaaaatgtgtgttgagtgaccagctctgtcctggctggccagatctgtccccaggtgtgctgacctcatgactgaccaggtgaacaggacgttgtgcagccataaggttggaaatcagggcagcaagtgactagaggtcacaagaggtatccagggtgatattattctaagataagataaaagggaccctctttggcaagccttggggtttgtctgtaggtggggatctaatatttcatggggtggttagaagcagcctgtaggagtgagagagaagaaaagtaacaggcacagaaagccaggcccacctccatccccacctcttccacggctgaaaaatcaaaagccttttatttccttatcactggaaagaagtcatcttagtcatacaacgggtggagcactgcaaacgggtgggagaatccagaatccgggtgttgccagattccagcccagagtttggcttcacgattctctgggggtatgccttgggctgctgcagggagccccagagtgtgcagtgtcacccgcgtgcagagctggcacgaaatccccaacacattcgtggcatgattctgcgggacccagatggtctaaagcagaagccccagttgggaaaaattggttcatacttagggatgatcgttgctgactttgaaaatgatgttttgtttctttggtttaatatggaggtcactaagggctgaagactggggacagtttccctagaaaacaaagcccaaggcaaaaggtcactcgctaaagttttgtgggggttcctattcaaaggaagcaagagtgaggcggagtgagaggctgttttagttaactactgccgggtaacaagtcaccccagactgggcgtggtgactcacgcctgtcattccaacactttgggaggatcatttgaacccaggagttcaagaccaccctgggcaacatggcaaaaacccatttgtactaaaaatacaaaaaattagctgggtgcagtggtgcgtgcctgtcatcccagctaccctggacactgaggtgggagaatcaccacagcccaagaagttgaggctgccgtgagccatgaccaagccactgcactccagcctgggtgacagagtgagaacctgtctcaaaaagaacaaaagccaggcatggtggctcacgcctgtaatactagccctttgggaggctgaggcaggaagatctcttgagctcaggagttccagacaagactgagcaacataaggaaccctgtttttaataaataaacaaacaaaaaacaaaacaaaaaccaagtcaccccaaaccttagcaacttcacacaatgcacatctattatctcatcacctctgtgctctgtggatcagggatctggccctgcttggcctggggcccctgggcaatgaaggcgttggctgcggctgcagtcatctcaaggcttggctgggggaggataggctttcaggctcactcctgcagctgttggcagaagccacaggttctcgctggctggtggctggtggaaacatcagtttcttgccacgtgggtctctccatggagacgcaactgtcttctattaggtcaggcgagaaagagaagttacggaagaagccacagtctctttgttacctaatctcagaagtgacatcccattcttcatgttgtactgttctgtgtcccttagaagtgagtctctgggtctcactcacactctaagggagggggttacagagggtatgaagaccaggaggttggggatctctgggggccttctgaaagcactgcccacacaaatagagaaggaaggaaagcaaatgtaaggtgacattggctgagtgcagtggctcatgcctgtaatcccagcactttgggaggctgaggtgggtggatcacttgaggtcaggagctcgagaccagcctgaccaacatggtgaaaccccgtctctactaaaaatacaaaaattagccaggcatggtggtgtgcacctgtagtcccagctactcgggaggctgaggcaggagaatcatgaagggcagggctctgcaggaaggttgacttatttgggagtgtcttagtttaagttctcttgaaccggagacagatattccagtattagtggctgatcttggagacaaacccaggaaatgtcagtggagagtggggaagtgatacagaaaaagtagaagtcagtgaccacctctggcagtaggtgcttaatcctcctcccacagagaactccaaacaggttctctgtttggagaacagagacacatgccacctatgactcaagggagctgggtgtttgttttattttattttattttattttatttttgaaacagagtcttgctctgtcacccaggctggagtgaagtggtaatttcagccttgacttcccggctcagtgatcctcccatttcagcctcccgagtagctggactacagatgttcaccaccatacccggctaattttttttcttttatttttagtagagacgaggtctctctttgttgcccaggccggtctcgaacatctgaactcaatttatcctcccacctcagcctcccaaagtgctgggattacaagtgtaagctgctgcaccaggcgtgagctgggtctttaaatgccaactcctggccaggtgcagtggctcacacctgtaatcccagcactttgggaggctaaggtaggaggattgcttgaggccgtgagttcaaaatcagccttgcaaacatagtgagactctccatctctacagaaaaaaaaaattattttaattagccagacatggcagcatactcctgtaatcccagctacttgggaggctgacgtgggaggatcgcttgagcccaagagtttgaggttatagtgagctatgatcatgccactgcactccagccttggtgacagagcaagactctgtctctatttaaaaaaaaaaaaaaaaaaaaaaagccagctcctgtcagatgttggttgagcactgctcaggtcaatgtcaattccccagcacttcctgccggccccaaggagctgagtgggctgcggctgccagagaaagttcttaggcagaaaagtgcagtgctgctggatgaaaggattgatgtgtgctgaagatcaggggctacgggcctctgccgtgcccgaaacgggacagctagaggcaggagagtgggagccagtgtccaagggcagatactgagtttggttctagaaacgcttaaggcagctgtatggggcaggctccagaccccaagggaaaaatggatcacttggtggaataagactgattatttaagctaaggcagtggatgaaaaatcctagagagaggctgagatctacaacatgaacaaagacaaatggccaagttcatgtcatggtttagacccagctctgcaggaagagaaatgcattttttttccttgccacaaatcattctcagaaaggccaaagcaggtggggcacggtggctcatgcctgtaatcccagcactttgggaggccgaggagggcggatcacgaggtcaggagatggagaccattctggctaacacactgaaaccccgtctctactaaaaatacaaaaaaattagccgggcgtggtggcgcacacctgtagtctcagctact

SEQ ID NO: 97820 - DNA, 60450 bp, Homo sapiens
ctccaatgccctgactttggcaaaatccacgccctttttgaggaaggcaaacccacccagaataattgttgagccaacaagcagcttaagccgctcataagccctgaggtgcctgtgaaggctgaggcccagcaatgagctgccactgccaaaaccagtaagagtcactgtttttgccaagctttttttttttttttttttcttagctgttgtcattgttttttgggaggagagatgggacatctcaggaattcgcctgtgctgctgaattctcacgtgcagcctcatgtggactcacagccactccctatcctctgtaccatcatgttttactgttctctttaattccaccatgaagagacttgataggaatgttctggaaactgcagcctaggggtggggacgggggatgcgaggagtggggagcagtttattctccctggcagcaggactgaactttggtgccagagggccactgggtgtgagactgtgggagatgtttgtttttttcctgcctctttatacattttatgggctttccatatttgcttaagcaaaaaagttaaaaaatgacaatgataatagttaacatttattgagcattgctggcatcgattgagcatttatcgaacatactgactttccatgtatgaactcacttaacccttacaaccaccttttttttttttttttttggaggcagtctcactctgtcacccaggctggagtgcagtggcgagattatagctcattgcagactctacctcccaggcttacatgatcctcccacctcagcctcccaagtagctaggaccccataggcatgtgccaccatgctcagctaatttttaaaaaattttttttgtagagatggggtctcactacgttgcccaggctggactcgaactcctgggctcaagcgatcctcccacttcggcctcccaaagtcctgggattataggtgtgagccactgcaccaggtcagatattcttttttttagaccaggtctcactctcacccaggctggcctggagtgtagtggtgcaatcttggcctctgggggttcaagtgattcttgtgcctcagcctcctgagtagctgggactacaggcacatgccaccatgcccagctaatttttttgcatttttactagagacggtgttaagcctttggccaggctggtctcaaactcctggtctcaagtgatccactcgcttcggtctcccaaagtgttgggattacaggtgtgagccactgcacctggccccaggtcagatagtcctatagtcttatttccagatgaagaactgagtacagaaaaggaaaaattaaaactattgaaatttaaaaagagatcattaataaagaggaacaaactactgatacatgctaccacatggatgagcctcaaagacattgtgctcaatgaaagtggccagacacaagagatcacatattgtaaaatgtcatttatctgatatatgtagaaaaggcaactccatagagacagatcccagattagcggttgtctggggcagggggtaggagtggggatgatgaaatattctaaaactggtttatagcgttgtttgcacaacttggtaaatttattaaaaaccattgacatgggtgaattacataatatgtaaaatattcctcaataaagtaaaaaaaagaaatgcaattacgttctgcaaatataacatttcctaagcagccatgatccactttacaggaatttctccagtaactaacagctcattcatttgttcacctgaactcatcttcgttgagcacctattatgtgccaggtaccatgccaggatatgggttccagggtgaatctgatcaagtgcttctgctctaatagagaatatgggttagcaagtgttagaaggctgggctagaaggggtggagatgcagatgagaaatccagcaatgacaagagcgtatacttggggctgccacagggtgggcagtgctggcagagcctggaggaagcaccctccacccagacctggcaggtacttgagaaggttccgagaagagaagtttccgagaagagaaggttccgtgcttgaggctgggacctgaaggatgaggagttgttagcaggtgaaatggctggggagtggggcaggaagaataaaagtcattttctcattcatttcttaattcttttattcattcattcagcaactgttcattgagagcagttatgcccatttccctgatgaggaaatagagcctcagagaggtaaagtgacttagatacaaaccttagccaatctcttgtcttaaaagcccacctttttccactccccactcttgcctccaaaaacagtctggacaggttagacacaccgctgtgactttgagggtcaaggggaggtaccctgccaaaaaacaaaaacctaattatccttgtttagtgagaggaggctggcgtcccccacagggatgttcctttgtctgttggaactcttccgctgccttgaggacccacctttagccccctttggatcttgaatgggggagccagcctgccagtgtctggggttaaggggaggagaccactgaattcattgtctgggccagggaggacctaccattggaaagggaatgggaccagaattccagaccaggctttgataccaattattcaggagacctgggtcagtccttacctctctgtggtcctcagttttctggtccctgaaacaagaaatctgggctggctgtatcctgaactataggacttctggcctcagatgcctccagattgatatgggctggaagtagggtgacacatttgttctgatttgctcgttctgatttactttccaggttttagcatcaagagaaaccttctcagttcctgataaattgggatggttggtcaccctagctggaggactgttaggttaacctaacctcacattttacccacaaagagcaagacacgcagcacccgcctttattcctatgtggccacgaagctattttcaagccattttgtttgcacatatcatgtttctagggttcagctgaaaaccctctcaggtccagctaccacttccctcaattccttcagatcttctgggctctgcttggccatctccttttcccccctctgcaccccctcccatgcctcaggatggtcttttttggttgtctccatcagctcccctggagcccctttagctccttcctctgcatttaatgcaggatttgtgccgaagcaggtgctccacaagtcatcacggaaagtctgaatatctccagggcccagggcagggctgcccccaccctcaaggagggctgcacaccccaattccagggcaactttgttggaaggacagatccttcctggaagaggttgcagggagccactccccaggtgtgacttcttaaccctttctcttccatgggaccactcaggcattgggtggagcctgtggaccccttctgagaataatttttttaaaaaggcattaggattactatgaaaagtcattttactaaaaatagatatcaaactattaacaatttctcatatagtaacatacgttctcttttactaatacattaaataagatttagtggtcggtctaatatgactttaatttcacagttctcgtagcttagatgatatcttgagatgtttacaataactgtagtgtgttacgtaaatacctgtgatttctactagtgacaaaatcacagggacatctacttgctgcctacattcataatcaaaggatatgttaaaaaccattggctgggcacggtggcttacgtctgtaatcccagaacttcgggaggtcaaggtgggcggatcacctgaggttgggggttcaagaccagcctgaccaacatagagaaacccccatctctactaagaatacaaaaaaattagccgggtgtggtggcgcatgcctgtaatcccagctacttgggaggctgaggcaggataatctcttgaaccccggaggtggaggttgtgatgagccaagatcgcaccattgcactctagcctgggcaacaagagtgaaactctgtttcaaacaaacaaataaacaaacagacaacaaagcctttagagattagtgaggctaaaggtataacttttgtccacccctgtgtcatggaccccccagaattctatcctcagtcctcttgggggtccatgaacctctgcttcaaggcaaaggggttttgattccttaggttagataaacaagaacatcatcaagagacgagagaacgaagagtaaagggcagtgtccagactgggttgggttaagcagagaaaggtttctagatgagtgagtttcagagctgggtgtttaaggtgagtccgtgttggcaggaagcaaggaactgtggttgagggaaggaactatggggaaggtttgcttttgtggctaaatcaaaaacacagcagactaacatcacagccacatcactccagggcaagcccgtgtctcctttgtcaccaagaacaccaaggcattgtccatgtaagacagtgtgcctgtcctcaagcttacatacaaagagacaaaacaaacacaaaagttaataacaagacaaaaattaaactgctagtaaaaaatgcagtcggaagtatctgaaacatgccacatatctggttaagtgcatacaatgcaagccacaggcgttcaaaggtgggggttcaaggtgggggtcacctcccctctgaggtttgcggtgaggaccaaatgcggaaatggacacgaggcccgaggccagcattgtggaaggccggttagagcatgcactttggaccattgtggctacttaacgtctcagtgaccttctctgtaaaatggggataataaataagtatggcgcctgacatatactaatgtttgcaacacggttcaggagacaccagagactggagaacttggcctttaacgtggtaggtgtgaaaacatttgaatgaatgaatgaatgaatgaatgggtcctcgggttgcctcggtctgccccaggcggcccgctaagccccatgtctgtgaaatgaatccccagctctcggggtcagcttcatctcagcgtgtgggtgtgggtggtggggaggtgctgagcagctcagcagaggcgaggcccaggccgagtttgtgggtgtcatcccgggagggtcttgctcggcctccccaacccccatgctgctcggctcctcagtgggcgggggaaccagcgggcttagctgtgcccgggccgatctcgagaggacaaggcccgcagctagcattcgaggagcccacccccgggtccgcagcgtggggcacgggcgccctcttatccccgaaaggtcgatctgggcctccccaggctagagtgggggtggggtgccgatgcaccttcggatactgtggtcccccagcccttccagccgcggtcgcgcacatccgaaggaatttggggccaggggcattgcgggcagagaggacagagaaacggagccctctcggcaggcgacgtgggagaggagcgccctaaaaagtggaaagcgagcgttgccgaggctgctggcccctttaagaggcccggctggctctgcggcggttccagctaacccggtccctggtgcagctctgcggtccgggtcccccagcagagaatcggcacccggcggggaggcaggaccagacgcaggagagggcgtggccccgccggggagctgggcggagtctatgctgcggagaaagcgggagaacccggaggtgggcggagccgagggtctgtgggtggggcccggcgctgcgggcctcgtggggcggagcctcgggctcggggaacgccgcagagggaggaggggtgggcggggccgcggcgggggcggggccagtgtctgcagtgggcggggcccgccgcagaaggggcagtgccggccgagagtcctctgcgtgcggctgccgcggcccctccacagcgtctctgacagcccgggcggtgagacccgcgacccttctggccccgcgcagataccgcggcctccaccgcgtcccgaggagcggccgagtgccctctctcgcctcggcgcccgcatccggggccatccgtcctgccgtckctgcggaggccgcatctggcgcgcatctggaaccgcycggccggccgcgctggagcccgcgcccaccctggcccggccgcgccgggagccctgcccggagctggagccgcacctggagccgcgggcccggggccctgagccgcgcagccggcgcatggtgaactcgctgctgttcggggagatggccttggccttcggctgcccgccgggcggcggcggcgggggctgccctggcgggggcggcggcggcggcggggcagggccgggtccgtcgccggtgacggcggcgctgcgggacgacctgggctccaacatccacctcttgaaggggctcaacgtgcgcttccgctgcttcctggctaaggtgcacgagctggagcggcgcaaccggctgctggagaagcagctggagcagcagcagagcgagcgcgagcggcggctgcgctacaagaccttctcccgcgagcaggccgtgcagaccgggcccgagttgctgcggcccccggcgcccggcggcgggcacggcctcagcagtggcgcggcggccggcgccaacgccaatgccgtggccctgggcggcctgccccccggcggcggctcgcacccgcagcactacggccgcctgcccgggaccatctggagctacacgcaggtgcggcgcacgggcggcggcggcgtggagaccgtgcagggccccggcgtgtcgtgggtgcaccccgacggcgtgggcgtgcagatcgacaccatcacgccggagatccgcgcgctctacaacgtgctggccaaggtgaagcgcgagcgcgacgagtataagcggaggtgagtggccgcccctcccccgccgccctgggacggggcgcccaggtccaggctgccgcggaatgcgtatgcgggacgggggccgggcgggcagctggtactggcaggtgggctggaagctgtgtttgcagagcgtcttacgtacgccaggaaggcccagttatctagatcccaggatgggggcgggcgctggctaccgtgggggccacctcgatgctgtcactggtgaggcacattgttttctaggtgacataataactgtctgtgttttatgcgatctcatttaattctcagcacaatacagcgtattgtgtaaggcagtcttatcctcatctcgcagatgaggaaaccgaggtgcagaaatgctaagtgatttgcctaaggtggcttggcgagtaagtggtgaaaccgggatttcaaccagagattttaaccactcctggctagtctgtctcctagcataagtatttttaccaaggaagtaggaaatatgctcccctccctcaacatatgaaaagaaaaactctaaccaacccactgcctttttatttcttgaattaaatgagatcacgtttttgaaaatggatggatctgcccctaccccctggggccagtgtctgccgtcttgctccagctctgtaaggtccagcttgctgggttggataaccacaactacaacagactgctcacaagcttttataaaatgcctcctttcatccctcttctccccactccctgagtctcatggtttattgagccctaacaaactcagccttaaaagcccccaggagaagataatgttgggctggagactggacattgaatggactgagaccacaatctctggctakaactggggtccagactctgcaagactggccagtgcattcctgcctagcccagattccccagctgggaaactgtcattgcttcctgtctgcagtctggccgacaatactgtctgcttggctttccgataagaggagaggggtctcctatcctcctcctcttcccataagagaagaagggtctgtctttggcatctcaggcctggctggggaaggggccctctggccctggcaatcgctgttccaggcacaggcagccttccattcggagctattggctctgaactccagggcttggaggatgtactgagaaggacccttccttccatctctaaaggtctgtccagggagctgggcataggtctccttccgtattctcccattggacaggctagcaactgggtaggattcaaatgccagccttatacctgctggtgagattatcaaatcacttgaaagcctgtttgctcatcagagaaatgggaataataaaatctgcccacagttgctcgaggagacagcaggatggtgatgctctttgggaggtataaagtaatcatgctggtgttattaaagatgataggcactttgtcaagctagcagggagtagaaatgctgagagtcctcaagctctctcatgtggcgcctagcttcctgggggtaggtcttacactccactgggagacgggcttctctcctgggttacctgtttctctggaggacttgagaatggcccgcctggtgccttgccacagggaggccacctcgccgcccctcatggtcaatgtcattggggcaggctagggaagcaggcacttgctctcaatggtgaaactggggagggatgggccgggccctcctgtctgccactgttgattgtgttgtcatgcctcaggcttgtgttgtgtttgttttattgtgtgtgtgcttcttggacctggctactaaggtgatggaaaaaccgtgcccagtcttggagggagatgggttggcattgagcaacgatctattcaagttgcacccagggcgtggggtgtgatgtcagcttctggcgctggcctggaatgagacggtgctgctgagacaggtggagtgcgggcgtctctcttcccgcccttctgggatgcgtgcacaccttgtcttccatttattttctgaagttaactcaagactcatgttggatttttccaaagcaggtatattcctttcctggggcctcagtttccccgtctgtgaagtgaggttgagggggggctagaattgcggtccttgaaaccccaggctttcttagagatgctttagggtttccttgaatatctaataaaaatgatcatttaaaagaacattaagacgttaatacagtgataaaaatgtgctcacccacctttaagttcttaatattaactcactgggttctactaacatgctaacttgttagtagtatgttttgggtatccctaagaattttctttggggaggagggcagacatttgataaacattttttaaaaagttgaaaaaccactgggctagatgatctcaaagggtcttcccagccttggcaatatataaatctgagtttgagctcccagcccgcttctgatcccctggccataagagaagtcaccgtctaagggatgagacccaggtgtctgcctggactgttgtggccatgaagggctttaaatcatcccaggatatctattacagaactccaagcaatgatgcccagaaggagcctaacccagaagggaaaggttccagggtttcccctggtccacctggaggaagctgcagctccagagacccccacttgcttccccaaaggacaacttaggctgcgaggctcagcgatcttcaagccggacgcttgttgagttccacctccatgatttctggccacatccatgtactaccgcctgtgctattacgtacataaaatattttaacaacttcattgaggtacaacttgcatatcacaaaaactgcccattttaagtgtacaagtcaagatgagtaaattcacagagttgtgcagtcattaccacaatcccgttttagggcattgcatcagcccccaaaaagatccttcatgtccatttacagaaaattccaattccaagcccagcccaggtaatcactgacctgctctgtctctagaaactagccttttccggacatttcatagaaatagaatcatacactctgcagtcttttgtgtttggcttttttcacttagagaattttttttgaagttcatccatgtcgtagcatgtatttgtaggctgttcctttttatagctaaaaatattcctctgtagtatagaccatattgtgtttatgaatccacccaggtattcaatgtattttaaatttaaaacgtcaactgtataccaccgagcatcatctcatgtgccatcagtggtccacaaactgtgctttggaaacaccaacccaaaccagagcccctggcctggggtgcctgggtcctggccccagtcaccactgctttggttttcccttggcccaaccaggtctttaccacgtgggaaatgtggtcgctgaagccgcaatgaggacgaggttgtcaagcgttgatttggaaaccaaaacaaacatctctactctgtcaccacccagggccactaaaatatcttgttctgactttgcaagctgggggcttttccctggagtttcccactgagtttatctgaactcaacagtggagagttccctgagttggcatccaggagacctggactttaggtccagctctgccactaggtgctgtgtgacctctggccaaccgctgccctctctgggcctcagctcctccacctttacatgcaggagttcctgtgggtgatctctctcagcttgctctctactttaggtcagtgactccaagaggcccgtgttgtggctgatctttctgcctctggagaccacactgtgttcgctgaagcctttctctgttctgggcttccccttccctctcctatctctgccccagataactagggtccaggctccaggcataggcagcgctggccatcccatccccaggcttaaccggttcaaccgtttcccctgtcttcattggctccaaggaaggatgcaggaaatctttaaggctgtcaagaaaaaggtccctccagcctggcagctgtcacaaagttgccatggactggtaggggaagttgccctgggctggtagaggaagttgcccggcgctagtagtgctggcctagctgcctatcagacagggcgactcttttgggggcctggtgtccctgtccagaagcctgtccagccatcctggccccctcaggcctagtgtgatttgcagctggctggcctggttccctcccgtgcgagtggctgactgtatgcgccccccagttgaagtcagcctggaggctaggtttctttttttcctggtgcctggggtgattggagggtggtttgggagcctggagagaccactgtgatcattcagcctggtggctttcaggtgggctttttagagccctggagtccatagcagggcgccttgggagactcgggggacagtgggaggctgagtacctgagatttgacccatgttgcccaccatagctccatgcctctctgactcccagactgtccaaaaagtattccattttaaaaagggttctgctgttttaaaaagaaagaaaccgctgattcagctgagtactttcattttaaaggtggggaaaccaaggcccagaggggggctggccctcagtgctgagctggacagaccttccatctgccgtgcagagctggcctccccgcctcgacatgatgcccgcatcatccgccagcagtcgaggctttgttatgttctttccacctttttgtgtgtctgttttaaacatttttttaaaaagccactttctgggatgggagggacttttgtcacagctatttctgactgtgagccggaaggggctgggctgtcggccggaatggaggactccaaaaagggatggtgggtgggtcagctggagtgtcccccgcccattcccgtcacaccccaggggggccctcaagcaggtgggtgctggcccctgaatgtcccgaagcccgaaggctgccctggaatagaaagctgagggctttgttccctgccactcccattgacactttcgttatttctgaagctggcaccgatacggattctttatttctgattttccagtgaggcagccttcgatggtggaaaagggtttygcatcctggctctgccactgtctgtgtgaacatgggcaagtggcttggcctctctgagctgcccgtggagctccccgcttcgtcctctgtaaaagagggatcatcttgttgctctcccagggwttgagaaggaacaaatgaggtctggtgttaaggtacctggggcttggcagattttgggcatacctacctccaccccagcccagcccccttcccctggcaaagtctgttcctttaatttacaaggatttctcagcatggccctgactgcctaacaagtccatttcagggcatgtcgccgctctctctgtcccatggaggcgccagagatggtgttgggggtggagggagaacggctgcttctttgtccggcatctaagaaggctgtttgacctactcttagcagttgatttgtgcctccggaaatctctcgccatcccccagccctttctcccaacttcctttaagagaaacacacaaacccctccatctagcgcctcgggtcccttgagaactatattacagaatcccttggctgggttggcattctcactggggacaaatttgggagcgattctcagagcctcaagctagagggaggggaatgaggtcccagaaaagaaaaggaagcagggagacagctgacgctgaagattccttctcagaggaatgcgaggcrgggctttgccttggcaaacgagaccggatgcgggtccctgggtcccccttccccccacgtgtatgcacactcacactcacacacatgtacgtgcacacacacacattcacatacacatgcagatgcacacaccagactctccgttcagtcctgtggcccacgtccccacacatgaccgtgtttgaaggacacagaagggtagacccggaatttgaacacgccctttgctgcaacgagatgcgttgccttccaggagaattgatttaaactgtgccatgtgtcagtgacaccggaggctgtgggctttgcatttgcagtcctggcttttgatcgyattgagaggtgaaggccggctggcattccatttatttcctatgtcgcggatggctgaaggcccgggacgggaaggaggcagccctgtcatgtccctgtgctcaggattagggatgtgttgctttttcctgactttctgctgtcaggcggtcctaagcacccaccacctcccgatcacagccccccacacccggagttgtaactacctggcatgtgtctgcccctgcatcgactggaagctctgtgggggcctgctccaactctggcttcgtctcccactggcagatcccagccaggacctggccaaggtccatgctgagtaaatactcatgcagcagggaggcctctgtgtctggctgctgtgagctagtaggcctccaggaggatgggacagaagacggacaacacagaccacgtccagggattcggctgtttgtggaggggagggcctgcacttggaatcagaaggcctgggccaaagttcaaagtttgaatgaacccccaagcctggcagtgcrgggtgctggggccccagggcaggagttaaaagccgagtgagcttgggctagtcactgcctctcgagcctcagtttcttcatctgtaaaacagggatgctaagctctgtgtccggaggttgtggaagaagtagacaggctcgcctagctacagcacagggcgtgtaaacagtcaagttcagaatgatttcacagggcagagagtgggtgccctacagaggcrgatctgtgctggccctgtggggtgggcagaggttgagaaccaagctggaaactgggagagggtgtcccgtgccctttgctggcagcatctgtgggttgcacagccctttgagcattgccagactgtgaggtgtttagaaaattccaggccagatgggagactgctgaaggtttgtgatgttgcckccgcctgcccacgaggggagtgtcctcccacccacactgggcaccgggtgcttggcttcctgrgcaggatgtggtttctcattctagacctggtacaagagagggtagttttcacccaacagtaaacctggcaaatggcaatgcctggttctctggagggtccgtggagcccaggtcctggtctgggtttgcctgcgatgtggtctgagcttcactgtgcccacctgggaatggggacagtgggaaggtgggcttgcccagcaaccctgtgaagactacgttctctctgtaatgtagcacaactctgtgcatgccatttaatctcttgcacctcagtttgtcgctctgtamaatgggggtgtggtttcttacgagttctgcttcccagggttgaggtaaaagtcaattaaaacagtgcagtaggaaaacattttgcaaaaggrtttgaaaataaatcaatatggcttaatgcttccgtttattgagcacctactttgtgctaggtgcagtgatgacttctttaaatatgtgataattatgggagcagtcccaagcagtgggaagtgattatgctcattttacaaatgagaggttcaragaggtgaagacttctgtcccagatctcgccacgagtccgtctgggtctctggaccccaaggtcagtgctcctcccaggaggtggccttgtcccatgcccctggaggttgccaaaggctggctcagggtgaggaggcaggcaggaggcacggggtctccccagcacctgtcacaatattgccatggcgggtggcagaataggaggcggctgctgcgctgggaagactccctgctgtcactttacagaaattatttcttgagaagcaaatgaatcactggcagtagcaggcagatgaggctcccgggccactgtagcaggcctgtccaggcccctgctctttggagaaggtctcaatgggggctggcagggctggcaggggaggagttggggaacagggaacacatattatgacccgtctggtgatttccacgcggtctcatttaaacccggtggtggcactgcaggatggaaaccgaggctcagagaggagaagtaacttggaagtcaggctccagatccaacctttatcctgtgctgtacccagaaagggccatgcccattgcaagccgctttcctgctgtgagcctcagttttcatttctgtgaaatgttgcctagcaaagctggggcaggctgtggatctcaggctctcaattaatgctccatttatcttgcccggcccctgagtgtcctcagggcacagccagcccgaggttctcatccacggatcaccagcagcagagggcctcgggcattctggtggctgtttgggagctcgcctccgccctgggctggagtatccctagcttttgctttcagtcagtgctgtgaactttgccagggaacagggaagttgttacaatcgtttggtgcctcttgttggggaagatgagactgctgggtgtggatgtctgagaagccaaagtggtggtggtttcagaacagtggctgagtacccaccgtgggccaggcccctgccctcgagaactcagaatctggggacatagacaaatgtgtcatgccatgtggcagcatcatgtgacaacagcatgtgcccagtaccttctccaacagtgcttgcggatagtaggaacacaataaacatgtgttagttaatgaatttcattaaatatttatacaacatttactctttgccaggcttcattcaaagtggtttgcaaacatttaattcatggaagctgtaataaccctgtgagttgggtgctatcattagcccattttagagatgctaaaactgagccacagaggcaggggagggaactgggccaagacaccttgaaagtggcaagcccaggcccggtgcggtagctcatgcctgtaatcccagcactttaggaggccgaggcgggtagatcatgaggtcaggagttcaagaccagcctggccaagatggtgaaaccctgtctctacaaaaaaaatacaaaaaaattagccgggcatggtggcaggcacctgtaatcccagctactcaggaagctgaggcaggagaatggcttgaacttggagggcggaggttgcagtgaaccgagatctcgccactgcactccagcctgggcaacagagtgagcctccatctcaaaaaaaaaaaaaaaaaaaaaaagaaagtggcaagcccagatctgaccgcaggaagtcaggttccagttccaaccttaaacctgtgtagtaccagaaagggccgtgcccattgcaagtagcttccctgcttgagcctcagttttcacttctatgaaatggaagtaataaatctgacctcatgaggctgtttggagggctgtctaaaatgatacccgtggagcactttgtaaactggcaagcggagtgcctgtggggaccaaatccttgggagccctgagctctacccacactgcggtttcttttccaacttcccatgcaggctgaagctccttgaagctccatgcaatgccttgtcctctcttgcctttacattcacacctcccctagatcctgggacgggaggttggacagaaacctgctatgttagacagcttagagcagaacgtttgtgtggaacccaaaagctgggaagagaggaacctgcagggtttatttctgctgcctgtcagctctgagaccttgggagagtcactgtgcctctctgagcctccgtttcttatctggaaatgggaatggtcatgttgcgtggatggcaagtgcgatgatggtgctccgattctggctgctgtggcaaaaatcactaaataaggctgggggttctggggagaggagctgggcaggaatcgaatggcgtttgggccttggccctggcagaagcccctccatgtggctgtgctgggggtggggcctgtctctgagctgtctctgagatgcttgctcagcgccctctggcctgcgtgctccgactctgggatgtgtgttcacacagaccctgctcatctgctgctcgatggagagaggcccctgcagcggagacagcgccttccgccctcttaattggctatctttattacttgagttatttaagacggttcttggctcactgccgcctgtttgctgtcttgggggaggggaagagctactggtctaagtagatcttgtgaagttccccagcagacaggctcctctctgtatagggtcagcccatcttcccagggcccgttggcacccccgttttgctcctggcccactgtggcaataggcagaaggccatcttggggggtggtagtggaagatttagggaaagcttgttgcaaagtcacgaccagagagtctcggaggtctgggtgggacactggtgagaccctagggtgcccaaaacccagggattctggaaggtacccaagccagttcagggccagtcaagaaaggtttcctggaggtgacatcacctaggttgtatctggaaggttcagtaagagtggaagagaaggagagagggtgttccagatagagaggacagcgtgtacaagggcctggagttgagctgctgtgcagaacagtgtggagctgctcctggtgcccgggcttgagcctggcactgccagaacttggcctgtcctgtgcttgcttctgccctgtcttgtcccctcctccctcctcatgctcttcttggctctcattttctgtcttgctctcctttcctctccctctttcctttctttcttgttttgatctctactctttatggctggctgtctcactcccatcctgcttggggcagggctctgagggacatcctgtcccccatccctcagccagatgctgggccctggtgagtggctcttactgctggggccttgtgagcccatgagtgtgcatgtatgtacgtgtgtgtgtgtatacacgcatgtgagcacaggtctggagcctctggatttggagcccttaaggtcattgccctgcctgtggcgggccctgcagaccccttgtactatggggctgggggtagggtcttgacatcatggtggggggcaagggaggctgcctagtgagagagaagctgctggtttggagctcaatgctggccactggagaccctcagcctccccatcccccattatggtccagggcctaggattagacacaggtcaggaattggggctggggggaggcttggctgctccccttacctctccccgccccggcccccgatcgccctggctgtcccttctccctcacacctatgacttcctctcatcccctggatgccccagaggacttgaggtacccttcaagctcatctcatccatcctcctgcttccaggcaaaatcattccctgacatcccaaccaagttagctatgccttctgtctttcaaagcgaccttcagccattctgtagtggtttctatttctctctcacccctatttgcatattcacgaccattttatagatgagaaaactgaggcccagcgaaggagagcagctaccttgaggtcacgcaacagagcaggggccggaacccaggtattttcaccctgtcccctccacaggactccccttaaacccttgagctcagggctccctctgggggctgctggcactttcaggaggggtttggaaaactcccagaggacagagcacttggagcagagaagcaactgccaaaggcatgactcggagcctgtacagtggggtccgcagagacagggccctgctccttgaccagacatctgggtccctggcgctgtggatgaagctccctccacctacaaaagagacatctgaggttgcccgtggggtttgtctccatgtcgcaaaaggcacttctccagcctctggcctggttttgaggtcttgggatgctgacactgatctgccttcccgatctgccagccctgtgcttggctgcaccatttctctgtgcctcgttttccttttgtatgggatgggatgggatgatgatacccacagggtgttggtgagcctgattcaggaaaggctgccctgtctccttatctctgggttaagccctggagctggaagtcttgagaactttgcctagaatgttggagttgggtgaaccgtagaggctgatctttcattccccataaagaccatgtttccagggctccttgtctgggcatgtggcctgacaaatagtactttgggatttgcacatgtttttatatggaaagacattttttttaagacagggtcttgctctgttgccctgcctggagtgctgttgaatagtcactgcttgctgcatccttcaactccttaggcacaagcaatcctcctgcctcagcctcccgaggagctaggacttcagacacacaccactacacccagctaatttttttttaaaaaaaataatttttgttgagataggggtctcgctatgttgccggggctggtcttgaactcctggcctcaagtgatcctcctgccttggcctcccaaagtactgggcttacagatgtgagccaccatggctggctgagtcttaatattacattgctgttggtttcacacttacctttaaataaaatattagcatttaaaacatcaggacttaaatttgccgggtgtggtggcacgagcctgtaatcccagctacttgggaggcagaggcaggagaatggcttgaacccgcaaggtggaggttgcagtgagccaagatcttgccactgcactccagcctaggcgacagaatgagamtccatctcaaaaaaaaaaaaaaaagaaataatataaaataaaacatcaggacttatctgacttggagactgatggccygaactcagcaagctactgctggcagagccagaattaacctgatgccaagttgagggacctccaacttgtaggttattccttttctgagccctaagacataattcaattgtggggaattaaaaagaaattgcttcatttgctcttgcttcatgtttcctgttggcccgtgatttgggccttctcttgggtgggaactctggctctgaggtgacactgcttggagttgtgttactgctctgagcctcagttctctcatctgtaaaatggggatgacaatcttagctgatgaggttgcgaggatttgatgttgcctgcagagtgctacgtgtgctgctggcccctcagctgttaccgctccctccctcctgccctggcctggctcccaccagcccccaggccccaatttgtacacataaaaatgtgaacaaatgccaaagtactatttgtcaggccacatccccagacaaggagctctggaaacatagtctttgtgggggaatgaaggatcagcctctatggttcacccaactccaacattctaggcaaagttctcaagccttccagctccagggcttaccccggagataaggagacagggcagcctttcctgggtcaggctcaccaacaccctgtggttctcatcatcccatcccatctcatacaaaaggaaaacgcggcacagtgagaactgcctgctccctcccgctttggctgaagactggccttttgtgttctgagcacttcctctccccggtagagccgcctgggcagccaggaggaggtcatgtcccctctcttctcgagcagactgtcagcacagggtgactgggaaggcaagacctggcattcaaggctgtgtccagtgcagggtgtcacctggagcctgtggctcctaggagggcctgatggaatgtggacatgaatgggggaatctttccctgtccccgcctccctggggatcatggactgtctcagcctccccgttgtgtggatttggaagcagcctcagggggtcacattgctggtctgaggtctcactatgaggtagggccaggatcaggattcgaacctgcctcttgcagactgttacccaaagtactctctgccacacatgcaagctcattctggcaggctgagataggggaattggaagacaggggttcaagccctgccctgcacccagcagcagcaaggcagccgttcctccttctgggcccctgtaggcgatgggtagatggtttctgtgttttcatagactgccttgcgaggccttgtgggtgaagggcccaatcccagaccttggcagaggagtgacgttgaaggctggcttggcattgtttttccagagttgacgtcagggcagctggtttagggtttcatctgtgagacaaaggctgctttgtagcttctgcccggtttaagtccaagcacatcaccccccaaggtgggaaacgaggtggaagggattgcagggcccaaacagagaagccttgggaggcttggcttgcgctcagcccctccaagaagggagccaagatctcataattctatcgccatcttgctcacttcccgagagcactctgtatgcccactgcagtgtttgaagccgcacacatgtgttctctggaacatcgcaccactccagcaaggtggctgtgggtatgtccattgtacagatgagaaaactttgagtcgtgccaggtgaaatgacttgttccttgtcaaagctagagagtggcagagtgggcatgtgacctcaggtctctttggcttccaagatcaccactgggttccaccactagagtctcgtgttgcacccagctttggaaagggaattctaaaagccaagataccctggaatcagactggagcagataaacctcatggcttttgggggggacttggagctttctcttgtcaggattcagagttgggtcactgctttgagcacgtgttgcgtatttgtatctgcatgtttaggtatttgcacgtgtacgtacaagttaaagaagggatttggatactggagggtctgtatcactggcaagtgattccagggaggccttgtgggcaggtgtaaagagtcatcccaggggacacctaggaccttctgctcttctttgccaggattaccctacttgatcatttattcttccatccgtctgtccgtccgtctgtccatccatccatccatccatccatccatccatccatccatccatccgtttgtccatcagtctgtccatccatccatccttttctgggccacggtgctcagtccctatgcttgggctttggggatgatgctgcatgaactgggagcttgcagaatctggggagcttgccaaggaactgttaaatcagggctggaagagtccttagagattggttagatattttctctcccttttgtcagagaggggcagtgacttgcccaaagttgcacggggcgagtggcggagctagggctcaaagtcaggtctgtaggtcccagccccaagtttctgcttctctgctgtgtcaacagacagctctcactcctggccggcagctcccttacctagctcttcctcctctgctgttttcatgggttcttggcttttcgggagttgctggcagcctctgttctgagagacttctagaggtgtctactgaaccagcatgcaggccccagactggggccaagcttggctatgctctgccctgagatgacaccctcccgcatctggaacagcaggttggctgagcccctgaggggagagactccaaggccctgtttactttaccctactggacactggcttcttttcctccaagggtctccagaggtcatctgtttcttcctcatcttggggctaggaccactgcaaatcctgcctgaagatcttactgcctaggaagcacattccagaaccctttctgagacgggccgtccagtgtccttgtggccttttccattgggaagtgcttcctggtgtctaaccatgatccctactgcttcatttccccctttgtttagcctttcacagaggaggaaagtggttggatatcaattgcctggtggttctcaaggcagcaccattaccttgctgcgtaccctcttcccacctacaatctcccttttctccacttcctgagagactgtgccttgactcagatacaagttgagacacaatcttcatgcagaaaagatctggctggtccctgtagtatcccacaagtttctgggagggaggcacattccttttctaggagtcagggagccctctgagctagaagtggcctgaatcccagggatcactctggtcccatctttcctgatggggaaactgaggcccagagaggttgagcaacatgtccacagccattcagccagcctgtccgagttgggtgtcctccttcatgtggcaatgctgtttctatggtttgggcagggggcttgataaaggtggccggtggcctctggcctggtggtccctgccgcagacagatgtcctggaagcagaacagccagccccatgtggccccagagggctccctggcctggaatcagtgctcctgcctgctggttccctgggttggcagattcctggcggtcctgggctgccctcagggccaagcagtggcatcttctccgctcccacccaccctgtggcttcctctctcccacagcctcccagcctcccttttggccctagaggtgccagggaggcccctcacctccaaggggagaggacaggaggcctgagtgtacaccagtaattaagttgccagggggacactagctcctgtggctggggcaagaaggggttaagcagtgttgcctgccagggctggactcccagctggtgtcccggcccctggggccaaccaggccatctggcctgacagataccacactgtgtcccatctgtcccaaggcaaaatcaccaggaggagactgcctactgcctttgagggcctgcaggggtgggcgtggcccctgctgtctgtccctgggggggccaggccagttgggaggggctccccactgggcaggctgtcctctggccaccctccctgcagggtctccctaggtgtgaggtgggggagtctcagtccctggtgtggtcggagcttccttgtgcagaaggtctagagaggtgcagggatgggctcaaggccacacagtaagtcagcacaggcagagctgggcttcccccgaggcctgctggtggttacgcccagtggctccagctcacaagctcattcatccagtcagtagcggttgagggcctacggtgtgctgggcacttggtcactctggataccagacagttccccagtcccagcatgggagagggaacccagagacagagcctctaaggggaagcatggtgcagctcagccaagcccggggccctggacgctgtagcagccctcccagtagcctccctcccagcyttcccagcagctggaggtggggcttgctcactaggaggagcaaaataatgttasgcactggtgtttatgatcttatggggtcttcaccatccagggaggtgtaggtactattgttattcccattttacagatgaggaaactgaggctcagagaggtaaagtcgctttagcagatcaccagctgcggagcggctgagttggacgcccatcccagctctgcctgacgtcaaagtgttttgggataagggacagggggtggctgcaagtggcctcccactttgccccaagccggcttcttctcgccatgctggcctggaccatctcctttttggctttttgctgagtccgggctgggaatcctgtggctggaggcccaaatctcagggggaagagagcccccgctgggttggagttgagaagagaggctgtgctggtgccggttcttttgcatagctggggctagtgaccctctgcatcccatgtgtggggtgctcggcagcatctgggcagcgcttgagggattcccctcggaggaccctccatccatctgagagccccaaggctctgccctccagtggcggctgggccaggccgttgggagcctccataatgctgttatgattatgtgaccctggatgagtcactgcaccttggtgagcctcactttccccatcagcagaatgagggtgaggagatgacaagctccaataaagatgccctccgaggggctttgcagtcatggaagggtccctgggaggctttgctccatttcattccccgtctcatcttaaggggactgacttctctctccagccccatgggtagttgggaggaacactcttgtttgtgtgttgtggggttgcctggtgctcagcctccacactccccagtggttcacatcaggtggaatgccagggcccgccatgatgacaggagcctgggattaagtaatgagtccatccccttgagctgtatttagtcactaattcttttggtgcgcgtgtttgcagtctaattacctgcctcagctgcgctggaacctgccccttcccagcyagtgaggaccatgacggctctgcacagacaggtgaccgttgccctgttacccatccttggttgcacaagccccacgtgtcttttgttagctgggtccttgtcactcttccctcctccctcctggagattgctctggaatgttctcctccccttaccagcggcatggcaggcagctcctagtctctggagttgcactgagccagccgctgcctgtgtgggaccttggacatatcacctcccacctctgagcttcagacttctcatttatgaatgacctggacttccccgtctgatgtcctaggatcctgtgttctgtgctttttttttttttttgccccacctgcagccwgtttgtgtttgcacatcctcattgaatccaggtggggtcattctcacccattttacaggtgaggagactgagccctagagaagtgacttggcttaaggccgcagagccttgctttcaacccaggtgtgctgactcttgcctggtgggctctgcctggctgccagcccctcattttttcaggctgcacatgataaggaaaatctgggctcccaggcagctggctccagggcggctgcgggtgagtaagtatgcgggagattaccctgaggtgccctacatttacctccagggcagcacagtcacttggaataaacagtggagagacccaaagtacatattaggtttccaaaatagccttgggagttgctgtttttctcaaagctgtaaacataaccctgggcctgggggcccccacactctcctgggcacagaccccctgggcctcctgcctcttgacctgagtgcccaaagacctgctgcccagaccccctgctggcttccacttaagcaagagccagcagacacgggatggggatggggtggagggtccatgggggcttggccaggcctaggcagaaagacaatgtcccagggatggagagccgtggacaccaactttcccatcatctgctccatgcaaggtaggcccaggcttcaaggtgcagagaagagagtagcagagttggcctggactgtggaggttgtttggggaaactgaggctggcagggaggggctggcagggtggccatatctaaggcgacagggctgcattggcctagattggatctcctagagaaggccctggagatgacacttactgggcctttttaatccagtgaatatttatggggcctcctatgtgccaggctctgtgctgggcactggagttgcagctgtgacccatagatgggcctgatcttgaaagagatgagggccgggcgcagtggctcacacctgtaatgccagcactttgggagtctgaggcgagaggatcgcttcagcccaggagtttgagaccaatctgggcaacatagtgagaccttgtctctacaaaaaaaaaaaaaaaaaaaaaaatagaaaaattagccaggtgtggtggcatgcacctataatcccagctacttgggaggctaaggcaggaggatcccttgagcctaggaggtcgagagagctgttgttgcacccctgtgctccagcctgggcacacagcgagatcttatctcaaaaaaaaaaaaaaagacagaaggagagagagaaaagaaagatgagttaagcagaggagaccagcaggggatcagtaacctcaataccaagtggcccagagcctttgtagtacagaatagtggcacttgaccctgaccaaggagtcgggtcagcctcctggagggggttataagctgggtcctgaagtcacattaggtaagggagagagagaggaaaaggacaaaggggaaggggtgtagaacctgttgggcagagaatgcagcccatgccttggaggtgtgatggagcttggcacaggggggctggaggtgttggggggatgctattcagccttactctaccctagcacgtggccttgttctccagggcttatcacccaccaggtgagacctctgtctacccttttggagaagaagtgtctggcccatttctcagatgagcctgatctcccaacccttgctccttggggaaggtagagggccactggtgaggaagaacagtatttatagcggagtcttcctgcacccaacggaggcaatcttttgactaatgaggaaactaaggcacaaaacattgttgctgcaggarctggagtaagggcccaggaccctgcttttccttggctccctgggcaactgggagcctgtggtagagaatgccagagagcgttctctcyaacacgtcacacatggctctttagaggggcacaaaagccttttctacatctgcacacttgatccagaaacccaatctgggtatcccagagggatacctggacacatatgcaaatgtgagggtacraaggtgttcacagtcttgtttagattgcaaggactctgcgctgacagtggaggacccatcaaaccagtggccctgcagccacctgctgtgtcacctgctcgggaggatgctgccgtatattgttaggtggaaaaaatgcatttgaaaaccacatatggtcgcatccygttgtcgttaaaaaccaatctcataagaagagaaaatctcataagaaaaagttgggaaggatatagagccgatgttaaccgtaattctctcagggagggggattcatttgggtgggttttacattggttttatctggcttacctgtttttttctttttctatttcttgtgtaatcattgtaaacactcatgcaatttaaagcaaggggaaaacgagcaggtatttttgtcttttaaaaatttaagtggttttgatgttttgagcaggtatacatgacatcattcaaaattaaaaagatacagaaggaggggaaattctgacacacactacaacatggatgaaccttgaggatattatgctaaatgaaatcagccaggctgggcgcggtggctcacacctgtcatctcaatactttgggaggccaaggtgggagaattgcttgagcccrggagttcgagacctgctggacagcatggtgaaaccccgtctctacaaaaaataatttttaaaaattaactgggcatggtggctcatgcctatagtcccagctgctccagaggctgaggcagggggattgcttgagcccaggaggtggaggtgcagtgagttgtgtgattgtaccactgcactccagcctgggcaacagagtgagacgctgtctcaaaaaaaaaaaaaaaaaaaaaaaaaaagaaataagagaaataagctattcacagaaggacagatactatctgattctatttatacaaagtacccagaagtcgaatccacagagacagaaagtagaagggtggttgccaggggctgcggggagaggggtacggggtactactgcttaacaggyacagttgcagttttgcaagatgaaagagttctggagatggatggaggtgatggttgcacagcagtgtgaatgcacttaatgccactttaaaaatggttaagatggtaaattctatgttatatggtttatttatttatttatttttgagacagggtcttgctctgtcacccaggctggagtgcagtggcgcgatcttggctcactgcagccttgaggtcctgggctcaagcaatcctcccacctcagcctcctgagtatctgggactataagcggtgccaccacacctggctaaattttttgtagagatggggtttcgccatgttgcccaggctggtctggaactcctgggctcaagtgatccacctgcccaaagtgctgggattacaggcgtgagccaacgtgcctggcctgttatgtgtattaagaaaagatacagaggggacagagtgacagttctaccccataatccccagccacccacgtcgctgctgaagggaaccaatgttttcagtgtgatggtggatgcttggtttcctttctcgtgcccctgggtacaaatgggcagtggcaacttggatggggccccttcactcatggacggaggaagatgccccctgtcccagggtgagcattcccttccatccctgcttgcctggcacaaggcagycagtgcccagaacttcccacacttcttgggttgaagggattgaggatctgaggctggaggagccagaggtcctgccccrgcgagagctccggaactcgcctcccctctctcagcaggaagagaatactcttaatccacttctgtgtccccagcacttggctcctgggtgagcacttgggaaatgtttgttgattctgtcctgggggaagaagatgaaatgtaagccggcagccagcctgagttgggctgtgggagatattctgggctgccgggcctgggtgtctccagaaacmcccaaygctcgctcatgaaggctctcttggtgccaggtcttgtgccaggcactgggatatggtgccgaattggatacaagggagatgggacgtcctcctgtgtgtcttgactgtcggtgtgttgccgagcattggtagcagagggggctggtttggcacccaggtaccctgcctcatccccggggccttggccagtctacacagaggaactgccctccagctgagttacccattttccatggcagggaggacagcagaaaggccgtgttccatgactaatcatagcttccatctattgagcatttactgggagctgggcactgtgctaagtgtgaaacgtgtgttgactcatttactacaacaacctggcaaggcaggttcttccgttagcccctgctcaaagctaggggacctggagcacaggcggtcaagtgcttggctcaaggcacacagctcagaagtgcagatcctctgcccctcctggcatcccagtctgggggggtcaggggtgggatctctgcagtcagtgcctgggggctggatgacaagctgcagcctccccgcaaccccacgatttccatagcgcagtggagccagaaagaaacagaccattttacagaccagagaaacaagggtgctgctctctcagaccctggagccagtgacagggaaggcggagaagggacgagagcctccgtttattcggagcctgtgtataccctccttttcacaaactgtagcagcctccagaggcaggggggatctttatgatgaccaaatggggaggcttagggattggaaatcacttgcccgggagcgtgtggttggtaccactgggatttgagccttgttccgtccagctccagagcttggtgcctttcttgctcaccacgtgccggccccagctcgttgccttggcagtggaggtggtggtgtgccgaggccttcctgcaccctgggttctctggcgctgagaaataagtgcatgggcaaagtggctttgtttccaggtcagtgactgtgaccccatgtgtacacatctgtgcatctgaccgtggcactgtaacccaggggcattttctaagtgatgtgctgggggtgtgggcagggagtggggcttatggagccgacgagacaccatcagaccatagagaggctgcccaggcttgggagccatatggacctggatttgaccttgaacaggtcatttcacctgagtgtgtatagtgggaatgataacatccggctcacagaactgtggtgagaattagagatggtgggtgtcgaatgattagcacctaatcagcattttacaataaatgcaaattcttcccttctcgtagaagagtggagtctgatgagagagacagggaagtgaaaattcacagcccctggatgccagtgctgaaggagtgggttcaggactgggaacatcagwatgggcatagtgacttattctggggaagtcatgaaaagctccctggaggaggtgatgaaggggtacccaagcctggaagaggctggcagtggtactccagaaacttcatggtggcctgcaatttgtgatgcagatttttcctcactgtgagatgctggttgagacaatttcctccttggagtggcctggttttttaggggtagggggagtgcccacgtgggtgtagtttctagacagaagcagtgggaggagggcactgccaagcatgctgcttgggattatgggtgtccacagagctgcagtttctccaaaggtgttttttgtttgtttttgagacagggtcacactctgtcacccaggatggagtgcagtggcccgatcctagctcactgcaaccttgaactactaggctcgagggatcctccaacctcagcctcccaagtagctaggactacaggtgcgtgccaccatgcctggctaatttttaaaattttttgtagggatgggatctcactatgttgttcaggctggtgttgaactcttggcttcaaatgatcctcctgcctcagcctcccaaagtgttgggattacagccgtgagccaccatgttcagcctctccaaagttgtgttcaataagcaataccaagtggcagtgatgctgggaacctgggcaaatatagacaggagrgaattggacaggtggctcagaaaacaactgaaacctcagattggcattggggcaggtgacccgggggttccctgggccccatgttgcccaaaagagccagcagctggcctgggtgaatacccttaaatgccttgtgtgtgttggaaggtgccatgagaccagctgggctctcctgccctggacccacctgctgccacagtggcccttgttaggacagacctcaaagggctgggcatgcccattagttcctggggtatgtctatggggtgtggacggygaaagcagggttttcagtgggttttgctgacgggggttctgtggcattagcatctggcttctttccttctgccaccctgtccccttgtactgccagccacccagccaggtgaaggcggcatctagctcattaccatgactatcaacaacatgactgttatgcagacagtggctctggggtcagatggccttgggttcaagtctgaccccctcacttacgatgtggtccaagagcattctcccagcctctccccacctctctgagcagctgtcattgggaggtcgtgaggatgagaatgacaccaatggcatgctcatggtagaccaggcactattctgggcacttttcatatgctattccatggaatgtgggcaaaacccctcggagctgggaggtattaccaaggcccagagagggtcatagcttgctcaaggtcacagaactgcaagatggatagctgggatttgatcccaggaccctctggctccagagtccctgctcccctctccactacacacactggttggaacgcaaggacagacgtctcagctggcttttgagcatttgtggtttgtcaggcggctttgtggtcagtgtaggatgcttgtccagggatcatggcagttgttttctggcttggctgggtgggcccttagaattcatccagtttgacatcattgcattactgatgggaaagtggtgccagaggaggggaagggacttgcccaagatcacggagccagctggggcagaggcaggactagcttcaggacttccagcacaaggctgctgcctcgttgcctgaaggggtgtgtggctggggggccggagcccagttaggggcttgccgttctttcccactcacctctcaagtcctstyrrstcaccacagagagcccagagaccagctagctgccctgcaaagggccccttggtcaccaggaaacaagtggggggaatgtcaggtgaggggaatgtcaggtgggggaatgtgatgaccccacacagctcatcccccctgcctggcgatgggactcactttcacctccttgctgggaaaactccttagcaactcgatttcagtgctgcctctctcagttgctcctgggtccccagagggccaggacaggttggagaagtgtccttgctgagggggcccagactttcacccacccatttgcccctccctcccccaggtgggtagagccagggtgacaccggtgaagagcatgggcatcatctgtcaagggcatctgtgtgcctcacttgagcctgctctcctgatccatccatgagccctacaaggtgggattgctatccccgttttacagaagtggagactgaggctcctagcttgaggtaggcaggccctcaggggatcacacagaggcagatgactttctcagctcacctgcccttccttctgcagaattgcctacaacctttgactctctaaggcctgcggggctcgtggcaagccctcaggaactgtttatggaatgaatgagtgaggggcaaacgaatgaatgcatgctcccacaccacgctgctgcttcttctgggagagggcacccagcgggtgtctgctgttgagtgcaggctgtcagagccctgatggcacccaggataactccggatggagttggtatccctgaggctgtcaccacttctggactccaaggaagggccctatccagggcgtgcaaataacactgcaaatgtcatgtcccgagggattttgggagatcctattatagatggggagactgaggcccagggcagagaagggacttgctcagggtcatgcagcaaattagcaacgcagccagggcatgaaccaggacctcctgcttcctagcccagtacccgctcttccacagggaacttccctatggatgtcagacccctctgcctctcccctgagcagccttgcgcagacctggcacgctgggatccctggaggaggctgccgtttctggttgaaagcagctctgtgtgtctgtgtgggtggcagtgttctgggggcacacttgattagtggcttctcaaacctggcccccatcctcagtgtacagcctgtgctccgtcctgctcaggccattactgcccgcctgtaatggaatcggctgccctggttaagtgttcacattaaattaatacctcctccgtggagacaatcagttggcatttaatttgtctttccttccgagagctggagagtacagctgggcagccgggctctgatgggcacgtctgcgagacagcctttccttgggatcaggggctccatggagatgggagccgggaggccacaagaggtggtgccaggtgtccccagggggtggggcttggggcaggcaggagggggcctctttcatgcgcaggggctagagcttattggctgtccattttcgggggagaagacgggcttgcagcgtgccatgtgggagagaaagtcaggaggcaaggcatccacacgtgcatcagtgctgagctgcccaggaggtgagccctgtgttagcagtggtggcgggatttccacattgtattcccagccctgccccactcccactcccttatcggattttctttctgccttaaatatgaattgtctgtggtattcgagggggatggtgtgcaaggaggaagttgactcggttgtggttttcaggttctctagaagggctcagaagaagcaagtggaggctgttgggggcacgcagccctgaccccaccggggagcctgctctggtcttcccaatccatcagcttctgcaaaactgcatttgcagaaagggctcccctggtctaccactgtgcctgcagcctcttcttccagctcagatattattttagagaagaacagctgattggggcccccaggcttggccctggctctgctgtgaggatgcctctgtgcatctgcaggtgggcaaacacaggagctagggcagcgcagagctgaggggcattggctgggccaaatctgtggtttgagcagccgggctccagcacagctccctggccacctgcatccagccctgctgcagtggggtgagctccccgaggccagggtggagctgagaaggtgccagccctccacccgccgggaaggaagctgctctctgcccccacctgccctctgccagaggccaggcccacgcttggcccagaatgaagtcttccactgagggctccagcccagcctcacctgagctcatttcccttcacctgagtgagtcggcctaggcgtgccggccgctcgccttcccgcaaggtgkgggccatttccacacctccctcccaactctggaggtgggaggcagccatgcgctgtgccgttgacgtggagctgctgaacacccatggtctgctggatgccagggtgcttttacccacaccatccccttcctgtagttctcacagccaccttcgaaagggggtggctggtttcccaactcacagaggggacaactgaggcccagagagggtaactgacttgctcaagatcacgcaactgggaagtgatggggcaggatttgaacccgtctcttgctgccctggtgtcttgggatgctcactccaggagccccaggttcgtccctggagggcttcattgttttgctgggcctgcacctactttcctcctgagcgggagcctcgagcctctttttctgactgcacaggaagtgaaaaatctgtgagtcagcccctctgctggtgacttcagcttgggtttccgcccctctgtagggcaggcttgtcggtccctttcctgcgggtctgtgtgtcatcttgagctgacgggagagggggaggcactggccctgagtggggtgggggtggggactggcatagaatctgcccaccccttttccccagaggccagcagagacttctcgtccctcacgtggttccagtggtggctcctcaggaatgcggagagaccacatctggctggggtggtgctgccacctctccctcctggccaccagcctcagagagtgcttgttctgctaagatggtggccgaggcccctgatctcagctgctttgtgcttttgtggagtcatttcctctccctgcactctttgttctgacatccctgcctcccctccctggcccagggctgtgggaagtgggaaagggaaggtttctccttctcctgcctgcttcctgccctggccatccctccccctggcctggcctggcctctcccaggagaggctctggagccgaatggatgaagctgagtgcaggggctatgctgggaatttgcctcctgtgagcccctgggctgggatgttcagtctaaggatgctctgggggaaaggagttctgtctggaggcgagggccatcagggcactgaggagtaagtgcagctttggatccatccatccatccatccatccaaccaatccatctatccatccaaccaatccatccatccatccatccatccaaccaatccattcgataaatgtctgactccttagcaagtgcccagccagtttgaggtgcagggaatacagtagcaagcacaggaatgatcatcataaccagctctctgggcctgcagaaggactggacccccgacctgagacccggctcctgtgcctgttttcccacctagaccagggaacttgcctcttgcttcctctttgccccatctctgtgcctgagacctcccgagatgagtgccagcccccggtggcggtggggaaggtggaagtggcggtgaccacacaatggagccatcactggccctggcgtcacgggactggctcctttgggcaagagctgtgtgccgtgggatcccacaaccatgccactggggaagaggagatcctggggcctccactgctttaagctgtggggcaaacaatggaagtggatgtgaggcttggggaagagatgacatttgagacaagcctgggagaatggctagggtttcaggaggctgaggaggagasaggaagaggggaaatgagttacctgacctctgagcctcatctgcaacatggggatgatccccaggggagggctcagcgggattttatagagggaagtatgagtgcctaatgtggtggataccaccgagaaggtaatcaataaatgtcccttctctcatccagcgctagaaaagagaaggatttggaagttttatgagctgttgggtcagggtgggcaggggcggctctcagtgattcaggccgtgtcagccgtggctggagttgtccataggccctgggtcttcattttcccacttgtaaagtggggacagggtagctttccagcccagtgcatgtgcagtatgatggaggggatctatggaaaggccctgcagagagcactgggatgtgtttgtcacctcattttctgccagtggcaggcctgtcaatattctggagtcttcaaaagaccagaaaggacccctccccagccaacagaacagctcctggactgctgagggagactcgaggaaaatggcctttgtgccccaaaagtgatctctttatgttcactccagccttccttcccctttcagccttaaagggcccgggcgtaggattctgtcagacctgggttcgaatccaggcgctgccacttcctaggcagtctttgggcaagtcgtttgctcagccatgggctggggctgggagaggggatggtgcaggctgaaaggaaacgatgtctgcaaaccgctgatccaaagtaggtgcacccgcctcttggtggcagacagcgcctggcctgtcccttcctgctgccctctttgtttctgttggtccctctgcctgaaacaccctccccactgaaaccttactcttgtgggcagacccagggaagagggagggttgtgcttgggaagctggtgttgaaatctctgtgccagcaacttggttcaccagttctcagttaagctgagtgctccctggctctgggtgggtgggcagggaatacaggtgtctggagtgccgtaagaaacacatcgcccacctggcccttcatgccagtcctcagaacgatccaaggacagagcttttctgcattgtcaacactggagctggcggagccaggttttctccaccaccgccgggagggatgtcagggcgggcgacaggctcttcagtcaagccagctgctgtccacatgcggggtctgtcctcaacctcctgggagcaggccagccggctgcctcccccgtctggctttggaaataaaaagcccgtgaaatcatttgtgcaagctcatcctgggggtgtggtatgtgcagtcaggaaacacgattgagatgtggggttgggagggtgcagaactcggggcaggaagggagaggtgaggtggaggggctgggttgtgtggtcttcagagcctggccactcagtgccatctgtagcccagcatcactggggagctgtctgccccmgccctcgcctgcggaaccagcttctgcatgttaataagatgcccaggtgattggtatgcacattctaggctgagacaygctgctttagagactggactagctttgagtcccagctccctgcttgctagctctgtgaccttagacaagttactttacctctttgaacctcagctccctcatctgcaagatgggcttagttagaaattctttccccaagagggttaataattcacattcaagccagtgatgtgtgtgtccaaggcagtgagccgggtgtgtggggcccagaacgtaccccccagttaatggttgctggtgctgttgctgttattgtgtctggaaagccaaagatctgggctcctgctgtcaccttgggtggatttggggcaagtctcattccctctctggtcctcgttttctccgtctgtacaagggttctattggcccctgcctcgccttcctcatgagatggttgctcaaaggagaagtgaggggtgctgggcctcattcccaagggcccctctggggaatggggagtgtcggggaggtgcccctgggtgcctgcgtccaagggaggagccatgccattctttattttttgtgcccttctttgctactcctgctcttgctgcaagatgtgttagcaggttcgctctagactccaggctgcagccagaggcttgccggggctcrcccttgcacctgccctgctcagcggctttggaattgagtcgccttccccrctctgagccgtgtggccaggagagatgattcagctcgggacctgtgctccagcctttaccccccagagaagccccagatgccctgtgctcctgggcagggatggggtggcctgggaactttccccccattgtgattcctgtccccaacatggggcctgctcttctcggtgagaggtggcctgggaccggactcctagccttgctcctgatatactgggtgatstgggcaaatggcttgaccactcggsttcagttgccccatctgtacaatgaggggaggttcagtgagatggtcctggctggattaggcccttaggttccctccctgccccctcttagctttctctgtgccctccagccctggaaggaatcccagccccttgccctccaggtccggrccygggagcccacgcagatctcagcctarcagctaatgctggggctgggaaaggctggagaaaagggggagagggagagagtgtgtgtcctccaggagccctggctgggctgtctcctgtgggagagaggaggaattttcctctgtgtgtgcaaacagtatccgttttctcttgtttccaaaagccggtgacgtaaccggctctccacccctccctcccctctggcctatttttagctggcccygacagcatcctaaaagggttccagactgccctgctccgaggccatgtagggagggwagcagtggggtgaggaaggaragaaactcctctgtctgtcccaggatggacagacatccgaggagggaaagaacctgcccccagcttcctccagggagggaggaactctgttggaggagctgggttagggcctttaggctttgacagttcctgggtctatgaggagctccgcaaggggattctgagcaaccagtctggagcgtccccacctgggtttcagtcctagttccacactatctcaccctggccttgggttcagcttgtgcctctgggccttgctttctgcacctggggataatgacggtgcctacgtcataggttgttacgaggattgaattaacttcatgtagaacagtgcctggtacaaagtaagtcccagtgaaggtggttctggaattggtaatatcatccagtcccagggaactgctcccaccccttcctgcagttaagggcgggggtccactgaaccctcctttgccttctcccctcccgcccrcgtttcctattcagcttcgggcagtactcgtgtcaaagtagtggtgtggaagcccttggaacaacagggcttggcacatagtaaacgctaaatcagtgggaactgtatttattgagttttgtttcaatgtaataaaacagccccacctgctgactcgctgtgtgtctttgggttagatgtttatttaacctctccgagcctcagtttccacttctgtaaaatggaatgataacacctacgtaggagagatctgtgttggtttgggtaggctgtcgggcatcgcaatgcttagcacaataaaagtttgtttcttgtgggtgcaaagaacagcctgagagtggagctggctgcagcctggctcctaaggactggctttgctactgcatcttgcagcaacaacaggagcagcagtgcttgcacagcactttacagtttgcatgcaggcagggtggtggtccctcccacctctgtcttcacgaagtgctgggctcataccttaacgtggcacttgtcaccaccacctgatactctggttatatgtcagcctggctgtcytctcacaccacctcccctaggctgggagctcccagagggcaggcagggatggatgccccaatgcaccttccttgcccagctcaagatagtccctgggtgggtgttggggttgtgtctgagggctggactggcacagggaactcaccttctgaccacctgttcctcttggcttttgcaggtgggaggaggagctcgccaagcgcatgaaccttcagaccatggtggacacgctgcaggaggtaagagccctccgatatcccgaccaggagaggcacgccagagagycatgtggccaaggggcacagtcttcatgcggcaaagccaggaaattcttgcacagcccctactctgttacctcctaccacctcagtctctcctttatggagccaagagatcccttccacttcctctgcttggaagctaggaatggaccagcacagtgttgcacaagagctctgatgcaggggttgagaagcctgggtccaggtcccggggtgcaagtcccagctgctgtatgacctgggaccagcgacccttctcacccgtcactgtctccccacctgaggcttggactaggtggtttgtaagcccccaagcaagaagggtgccctcggttggggctgaaggccttggagagggcaggtgggcacgtcgcaggtgggctcccagcctgagcaggctctctgtggtgggcatttgggaacattccccttgctgctctagctggaatctctgcattctgggctctgcaactcccccacctgcggtgtaacctgggcagcaaacttcatcttctcagcctctattttcctctctgacaagtgggagcaagagtagcaaccccatgagaaggcatgaaaagttcttccaaaaatgtctagaaattgcgttctgatactgaaagcatttgtcgtctaagacagttagagacagattaagataattgtcaatgcgtagaaggaaaaggttgaatatctccctttcttttataatgaaagggcttttttctttataaatttaacgggttcatcgtcaaatatgtggaaactatagaaaagcccaaaaataaaaattatttccagttcctccttccacagttgaaaaactggcgtgtgaccttccgatcttgtctgtgtggacacacacccacgctcttcagacgcatgttaggtcgacacacatgacattgtcatttttgaaagcagagatggcccaatactggcagtttcacacggattgatctcatatttttaacgtaataggattgcttgttaattaacctgctcttttaataccttccatggattttcccacgtaatagataacgctttgaaaagtgttttaagcagtcaacagtgttcagtgggaagtcaggctgggatgaggtccttggtgccccttccctggctgcaggtgcccagctggggtggacatcgggtgcctagggctctggactcaggtgtccagaccctcctatccccagaggacccggcccctctgaagcctccccatctccgtccccgcaggcagcacaggaggctgatgccatccaggaggagatgaatgagaagatcgagcggctcaaggccgagctggtggtgtttaaggggcttatgagtgacgtaagtgccgcccgccgcccctgggtgtcatgacctcccccacacccatcatgcaaaatgcttcattccctccgaggctccggggctcggcttctagttagaatcctggctggctgtgtttgaccatgaggatgacggatgcattggatgcatcggagaccaggcaccctcctccygccccctccccacttctgcttccctcggtctgagtagagatgcattaatctgccgcttaacctatcccgccctcccccgggctcccctgatggtctgtgtgtgtttgctcccactccttcccagctcrccttgatgaggrcaggcctcggtgtctgggcgtagcagggcgtctgkcaggttggsccaggtsccgtctggtctgtgcgggcctgagagactcgcaggcccagcggcctttggcagggttgctccatgaggtcaggaaaggccagtgcgcgtgtctttttgacaatctggggcccctctaagtatctgtgggtggggggagctgttggcagcaaagggctccttgctgctggggacccaggtctcctccccttcaaacagtgggcagtacagggggagaccccaccagaaggcagaaggggccagaacgtgggtgactgagcctggcatggctcctggtgtggagggacgtgaagctgggtgtggttggtagaagcctcccaggaccctagttggaggccactgggctccctctcacttgtgtccaaggggatcaaccctgtggtcctcagtgactcccactgccggccttgggaggcatccaggagagagagctgcctgtgtgggggacaggtggggtgtgccggtgggaaaagaagggctgtctttctccagcgggagttgtcttttttcttcgctctaacaaagtgaacacggaccctgtgtctgctgggaggatgccttccagcccttagggagagcagcacacacggcgtcacactggcccctgactcccaaggccccaaccccatcccaccctgaccagtgccgccgcagccctccactccacggaaaagcccaaggcaccctcggactctggaggcctccccgcaccacccctgctgacacctaggggtctccccacctctctgccaagccccccaggcttgctccatccctcgctcatgtaaaccctgctgtcctccctgcagcccatgacagacctggacacaaagatccaagaaaaggccatgaaggtggacatggacatctgccgccgaatcgatatcacggccaagctgtgcgatgtcgcacagcagcggaactcagaagacgtgtccaagatcttccaggtgactagggctgccctgctcaccagccaaccccccactctcccagagcagccctggcctccacccctgcccggccaacccgtttgcctccacatcccactcactccctccccttccccgagaggtagcactacctgaccctgtggcctccccaggaaaacgtagaatcaggcacccrtggactcataggctcgtctgactgcttcatcctatggctggggagaccgaggcccagagggtgatgtgctgtgctcacggaaggaagtggcagaaatcagtctcctgcccctccagggcttggttcaccagcccacactgtacccattgtcccgcttcctgccccttcctctgggtgccagaactgggcatcatccccacggttggggaaccctggccaggttatggggagaagtgggggagctggcctgagctctggtagaggggcctcagagttcagaagaggagctgttggcctttgactatttttcattccaccccaaagaggctctcgatacccccccgacctaacgtgcaagtgtgggtgcccccgagagacggcgatcaggttagcgccagtgaggctgtcttccagagagggcttggggggccagtccagccgaatgaggcacatgtcattctccgaaggctgcttcttgagtttcgggttgtggtttggcttttgcttgagcccagggcaatacggtgtgttgtcgctctgtgtgtgtgactttgacgtcgctgggccagatctgggcctccctggggccctctctccacctccatgccttcttgctgtccctctgccgggaagcaggggaggccaacgcagccttcgtttgctcgtggcttgtctgcttggagtggaagctttcggtgaaccttgggccgtctgtcctttgcctttgcatgtgagcaggagggctctggtcagcatggggccgtatagcctttgtcaggggttctccatctctctggctggctctgagatatcccaggcaactctgtgtcccggtctggcctgctcctctccccaaactgtggggctgcttctgtggtaaaagggcgagccgagccggcgcacccaccaggccgcccagggcagggaagagtccaggccgtctgtgtccccctgcatgtctcccacctcgcgcttcctgctaacgccgcctgcttcttagaggacctgcacctttcctggcactggccggccccagtcacgctcatcatcctgtgagatgccggctcccttcccarttcacccctaccytccatcctagccgagccccccagttaccttgattgcttcctttccggttcaggtggtccccaaaaagaaagagcgtaaggtggcttccgatgatgacatctctgagcaggacggggaggtgaaccggttctcggacgatgaggtcggctccatgaacatcaccgatgagatgaagcgcatgtttaaccagctgtgagtatcccsgtggcccgcacactctccgtttccccggattgcttgcacaggggcggtgaatgggaggcttgggctgagagtagcctgcagcactggaagaatttgaattcatttcctttttttttttgagacagggtctcactttgtcacccaggctggaggctggagtgcggcggcatggtcacagctcactgcagcctcaacctcttgggtttagggatcctttcatctcagcctcccaagtagttgggagcacaggcatgtgccaccatgcccagctaatttttaaatttttttgtagagacagggtctcactgtgttgcccaggctggtctcaaattcctgagctcaagcgatgcttctgccttggcctcccaaagtgctgggattacaggcgtgaaccactgcacacagccaagactcattttcaacatttgtaatttgggaaatttcatatgttcagcctctcttggaagctcgaggaggtcaggcattgctgagcctggggcacagttgacagggctggatggcagctgctgaatctggacaggcgcatactcttccattcgccagcatcctttatgttccctgtctgccattctcctgcctttccttcgaaagcttcctccaaaaaagcggtgggagaaggggtgttcttgcccatgagatacaggggctgggctgtcctctctctggacatgtctgtgtctgaggatgtcatgaacccagaaggggcaatggcagatgtggtcttatttgtaggctatttttttttttgagacagtctcactctgtcacccagactggagtatagcggccagatctcggctcactgcaacctctgcctcccgggttccagtgtttctcctgcctcagcctcccaagtagctggaatcacaggcatgcaccatgatgccyggctaatttttgcatgtttagtagaggcagggttttaccacgttggccaggctggtctcgaactcctgacctccagtgatctgcctacctctgcctcccaaagtgctgggattactggcatgagctaccattcctagcctgtgggccgttcttgagcagaccttaaccagacccacctgcactagtttcccttggtgggctggctgtgttgaccgcacggcttgcagaaatggctcctgatgttcgcttggagggggcttcacaaatgtcactttgctcactccagacgcccatcctaggagatggggtatcactccccttttgtagacagggaaactgagactctgagaggagaagggacttgggtaacaccactcagctagtatgtggctgagctgggattcagagccaggctgcctcccacgctagtacgctgtcagtaggaaacactgcttggggtggtggcagggtctgggctgggtatgatcagtggtgggcgagcctgctggygccagctcttagaagctgctatacccactccaggctcagtgatgtcatattagtaccttaaaatttgccattgcaggaaatcagcaaatgctaccaatcagagctctgggaggctctgccayctcccggaasccccccagagagggcatgctccttctagcagatgcctttgacatcatttgtttcaaaagcccagggcacgggctctcctaacctccctgcagagctctgaggctggctcagaattccatagtccagagctcactctgccyagccacttcattgtacaaatgagagaatggactcagaggggcacacagagccaggcccccaactcttggtccagtgctttgtcccccacgccatgcctggaagagaattctctcttctgtccctmttctaggctgacttttaaggtagacaggaggcagaggcagggttggaactgggtggggacaggaactcttttgcctgatacttcctggacctgccattcccttgaaacagaactgggatcggagctgtattttgggggtttgctatttaagggtgataaggagacccctagattcttgattcctcttttgataccccccatctcatattctcatcttttgctgcctgccaagaggggcttttttttttttttttttgagatggagccttgttctgttgcccaggctggagtgtggtggtgcgatctcagctcactgcagcttccacctcctgggttcaagcaattctcctgcctcagtctccgaagtagctgagactacaggcacacaccaccacacccagctaatttttttttgtatttttttagtagagactgggttttaccgtgttgcccaggctagtctcaaactcctgtcctaaagtgatccgcccaccttggcctcccgaagtcctggaattacaggcatgagccactgcacctggccaataggggcttttggaaagaagcagtggttgggtctaggttttctgaacgttgccctgggcacttctgagccctaagacaggattgtatgtcccggagatcccaggctgggtccatgtggttaaattaaaggacttatctgaagaaattgttgtccctgcttttataaagtccccagggcattgttaagctgaccagcaatggagtgagctaaaaaggagacagatcagagtggaagccagggggccccatgggcaaaggctccagtgtgtagaaagagcattcagatccaagtcaggcgagactggctgcaggagtgggcgcctctgtgttgatagagctaaattgggttcagtatggaattcgatttagctggttgtaaagttacctaagttaaaacaaacaggccgggcgcggtggctcacgcctgtaatcccagcactttgggaggccgaggcaggcggatcacgaggtcaggagatcgagaccrtcctggctaacacagtgaaacgctgtctctactaaaaatacaaaaaattagccgggcgtggtggcgggcgcctgtagtcccagctacgcaggaggctgaggcaggagaatggcgtgaaccccagggggcggagcctgcagtgagccgagatcgcaccactgcactccagcctgggcgacagcgagactccgtctcaaacaaacaaacaaacaaacaaaaaaacaacaacaacaacaaacaacgaaacctctgatcactttgatcaccccccacccccattctgcagttctgtgtgggccgccctgaccccaccccaggcggggccctgggcctttcccatggacrtctccaccagctgtgggcaggaccctagccaggctgcccctggccagatctgatgaagtgtttgaataatgcagccgtgttacagttgtgttttgttttgatccaagtcggttgtttgggcttcagaccaaggagaagagggggaacgtgtgggtctcccccgctggggccaaggctcctcctcagccccactccgcagatttgtgaagtggaggcctcttccgagtcccttctcttgcccgtctttctgtcctttccagcttcctgtccctcggctggggtttccttcagatcccagaygctgggaaggaagtgaagtcaggaattgagtgtgtgatgcagtgaccactggaccctggcggctccgggccacacggccctctccagcacccaccccctaccagctcaggaccctggactcggggagccacctatgggctcctgtgggaatggcttttggaggggagccggcccggcctgactccagggggcgctcgaggcagctttttaccagacggccttcttgggaccggcccagtccccaacccagtccattgggaacactcattgttgctctggaggatccaggaaggagttgagggagggcaggcaatggggagagccctgggatggcagcctggagacagggtccacattgtcctgtgctaccgatgcactgrgtcaagtgatttcactcctacagactcagccttccccttggaaataggggtatgttggatgagctgatctttaggtctcctccagttggggtaaccaakgcatcttgggaaccccttagtcccaggcaaacctgcctggttggtcaacctacttctagttctagccaatagggaggtcttgacatctcccaggctttgaattcaaatctcatttccagcatgtattggtctagaaggccactgaatccctctgagcctctgtttcctcacctgcaaawtgggaacgatagttatgcttacctcataggattgttttgagggtggaattgttttgagggcgttgcattttgctgcatgcttagtggctggtccagtgcccagcacctaatgggtgcttggggagtgtcttgatggggaggaaaaarctgtaggaaacagaaacattcggcattctagcctatttctgctacatgctagctgtgtggctttagacagttgagttatcctttctgagccaccatttcttcatctgtaaaataggtataataccaacctttccaaattgcagagaaratgatattatattgaacatctcactcaaactagaggctcaagaaatagctgttaaatgaatgaggaaaattgcaagattggacttggaggaaaatatctttagtcccaattaattaaagcctgacattaaaaaaaaaatacacatttttaattgtacaagcaatacataaatacattctgcattttaaaagagttaaactccttttggataaggcgaatgtcccctttggcttactacccctgtctttcctgaggacagccttgaagctgtgtacctgctgggcagctgcccctttctgtcccctgtatgggtccctggagcctgccttctgttcagtcatgccctctggtgtcacccccacaggcgggagacstttgactttgacgacgactgtgacagcctgacgtgggargagaatgaagacacgctgctgctctgggaggatttcaccaactgcaatccgaccatcgacctgcagggcgaggtaagcccagcgcctggcttcccaaaggccaggactaggggtctgggggacaccgcctttcaatggtccctcatccctgttatttttctacagcccccaccacacagctaaactgtcccctttgggccaggcgcagtggctcatgcctgtaatcccagcactttgggaggcygaggtgggcggatcacctgaggttgggagttcgagaccagcctggccaatatggcgaaatctcatctctactaaaaatataaaaattagccaggcctggtggtgggcacctgtaatcccagctattcgggaggctgaggcaggagaatcgcttgaattcaggaggcagaggttgtagtgagccgagatcatacctctgcactccagcctgggtgacagagcgagactccgtctcaagaataaataaataaataaataaataaataaataaataaataaawaaaataaactgtcccgtttgttctatttccccagcaagaggaaaacttgggcaacttgatccatgagaccgaatccttcttcaagacgagagacaaggagtaccaggaaacgataggtcagatcgaggtgagggctcgggacgtggagcccactcgtgaggctctcctgaggtccacatggttgagatcctggygatcaaacacccatgtgtcatgggcaggggctggtagagtggggcaggcgcaggatcgggagtcaggaggcctcggggcgagtaatgtctttcttagggcctcagtttcctaatctgtcaaatgggggtggtgatccttgcctgcctcagagaattagaaagaatatatgtagctgagatgatcccataataaccacagagctgacattcgagtgatagtgagtgacacaaggtgctgagtatgcccggtatccttacctgtgccctatgcagtaggcaccgtgcaccccttttacagaggaggagatgaggctggaaaggaccaagtgacttgcccaaggccttgcggccaggaagcagcattgaagtataattctctctggctccagaggctgtgcatgtgatcacttctataaacgatagtyattgctattatgcaggagaaagggaagcccagctccttccctagaggaagtatcacttgatagaggacaagagtcagaaacatgaaaaagccttcaggatttttrtaatcrggtctggataaaggaacccaaagatgttgagttctcagaaccgggtggggtgcatcagagccaggctgctgctggggttgctaagcaaccattcccctttggccagaaggagttctaggggaagtggacccatgtgcagagagcagagggtgagggaggttgatgtcyggaggcagggtcctgatggcatggtgtccaatggtggccttgatggcaccatccctgaggaatccaggaggagaggttgccgaggcttctgycacgaggatgacttgccctcacccttattcctcattggttcctcccagctcgagctggccacagccaaaagtgacatgaaccgacacctgcacgagtacatggagatgtgcagcatgaagcgaggcctggacgtgcagatggagacctgccgccggctcatcaaaggctcygcagacaggtacccrcccatcctcccaggggattcagctatggcatccttggaggggaattcccaaggctgcaactcggccatgtgtcatgctcccaacctgtctctctgtccgtccatctgtccgtccgtccgtccatccatccatccatccatccatccagtgactattagcacacctatgtgccagatgccttacatatctaacctcatgcaagtcccaccaccaccctgccctttgttgattcaatagatacttgscaaaggcctgctctgtgcaagacggtggggccagtaagtatagcccctgccctcaaggagcttaagccccattttctgctgaaatggggagcagaggtggacagggcatgctcccatttgctcacaggaagtgatttcccttcctttcccatctgttagtctgttctcatggtgctataaagaattgcctgaggctgggcgtggtggctcacacctgtaatcccagcactttgggaggctgaggtgggaggattgcttgagcccaggagttcacagctagcttgggcaacatagcaagaccccgtctcaaaaaaaaagaaatgcctgagactgggtaatttataaaggaaagaggtttcgttgactcaccgttccacatggctgaggaggcctcaggaaacttatagtcatggcagaaggcacctcttcacagggcggcaggggagagaatgagtgcctagcaaaggggaaacccccccttataaaaccatcagatctcgtgagaactaactccctatcacaagaacaggatgggggaaaccgcccccacgattcaattatctctaactggtccctctcatgacacgtggggattatgggagctacaattccagatgcaatttgggtgggaacacagccaaaccatagcatcctcttccaacccagggcctgtccccaggagactgacaagtgtcaggcatggcacataaagcagagcccctgccttcaaagacacacagccttatcgggggacagccacgctgagaatgagctaatatgaggagaatgcctgccacacagcacaaatacgttgtcactgttttcctcgttttgctgcattactgtacgagagggagggacagctctgtgggggccagatctgtgtgcagggccgtagccttgcctttcagacctttaactcctcaaacccccagaacccagtgtggttatctccattatccagacagaagagcagacgctcaggcaggttaaacggtttgcccaagttcccccacccccagctcatccgagatagaatcagaactgcaccccagtgatgttaaccatatcccgcatggcctccttttgagctctgagtcattcaggttttacttagcacctactatatgcccagacatgggttaggtgcttggagagtaacagccaaacttgatccacggtccagctcccaaggggctttcttcctagagaagccaacacagccagaccaagtaggggctggtgcagggggttacctcgtgagcttaaaggatcttaaggatagctgagtgaggcaggagctcaggaccaggcccctctgagagtagatcttatagaagtggcagctcagccttcccactccttgacccttcagaggcccagggctgctctctgaatttccccactctcttgtgcttctcaggaattcaccgtcccccagctccrtggccagcagcgactcaggaagtacagatgagatccaggatgagttcgagcgcgaggcggatgtggagcccatggtcagctgatgactgaggccctgcgagcctggtggtcttggtgatggggccctgccacctctcctcatggggccaggaaggcccctcggagtggggttcgaagccacaccacacagactttctctgccctcccttctctggaggcccygagggactgctgcttccttccttccttccacaccaccaacgggtgccccgtctccatcccccacccacccaaggaatggtgctgtcaatttctattgttctccacattacaaatgcagacttctgtgcggactttgcagtgttaactgtgccttctcccttaagctgagccactttgagctccaaagaattattcctagcaggtgtttttatacagaactctaagctgagggccgggccaaccggccgtggtgtaatgtggtttctgccgtccgtcccacctgctcctctgattggccatgggctatgccctcccttcctcctgagccagcccagactcggcctggagcttggggtgctctgccaacccccaggaaggagccgcttgcctctgtgagctttctaggcctgggtagggaccaccccaattttctcactccctgaaggagagaaaggtggaaggaagggaaggaggacacattttaattttttggggggatcgagtggcaaagttgaagggacaaggcactgtgaggggaaggcagagcctcactgtgtttaaactactatgcaaaaaacaaaacaaacaacaaaagcagcttgccttatatcattgtggaaggcaggacctctcctgggctcctggcttccccctggagctgggagagaggccggggttagggtgatctgtgtggcagcactgactgggtagtgtgggtttggccgaggttggtcatgaggctggggttcccgcaaggcactggcctccctgaccgcttgcttccttccggacctctgggttcagggcgggggcggagggatccttgatttccctgataacttgatgttcttccctccctcgccagccaacaatagaggcttagagatctgtaatttctctgtgagaaagtctgaaggggccaggcctggtctctgctcccttctacccgccttgggttaggactgtccggcagttgcctgcttttggctgctggcaggagagaagcagggtgggctgctggcagtgcaggagctggagtgagggccatcctctttctgctcctcgacacacgcaagccgctctcagcagttccctcgactggccagtcggggtattgatctgagccagcatcccccaagacttgaatggcttgagtgggactgcgttgaagggcactgtgtggcccccttccaaatctcagcttggagccagctgagcaggctttgctttattattattttttaagcctactgcagtgggtctgttgccaattttaattttttattgtcccaggagctccctctagtggtcaaggtagcaaaatgtgcccaaggactagaacttgggtccctctgccttgcctggaggcagaaggagggggctctgggtttgactgggattgtggtccccaggggtccgtggcctttaaggctcttctctcttttctgtttcccccacctgtgttacagtcttaaaaatactgtacataaaagatatatgtagagagagagagagagcgtgagaatgtgttagtgactatgtgtgatgtaatttatcacgatttggtggccttcgtcatgagttttttcctttgttttcttttgctgggggcacctcccacgggtcccctgtggcagtctggctgtgacacttccatagtcagcatctcttgttagccaaacagttccctttgacaggtacttggagggacaatggttttggaagagagacggcccttctctctcctcactcacccttgttctaaaggttacagggttcaaacatacctgattcttgttgttattgttgttgaatttttattttaaccaaaggttatcagagccagttgggcttggacctcagctgctaaaaagattttccgtttcctcgagggcaggaaaacatccaccctcgtgggtctcctccgtccagggccgagggaggcattggacaatgtggtatgggagtttcgtgggcagcgtggaagccggccctgggttgttccccaaggtggtgggagggtgacagatatatctttagacttaagactgtaaggcagcagtgttagcatgggagtaactaaggttactgtggttatcggtgtccggcggtattatttttactttcctccttgtatacataggtcatttgtctttgaggactagggtactctagggagtttgaaaactgcaggagccagaaagagatcctggcctgagagtcccttctggctggcttttaatatctgctctcctcttgggagtgaggacttggggcaggtgggtaggagagggaaagccagagtgtgatgggcctgcctcctgggctggttcctgggtccggcctgcctgcctgcctgcctgcctctccaccacatgcttttttcagttaatgtcagtgggccctgcttgtcccctcaccatgagcccacagcttgccaagaaagaccccaacgctcgctggggcagcaccagtcctagctgggacgaattggtccatcctttgtaaagctgtaaatacttaattttgactttctatttctaagcccagtgtcatattgacactggtattttagaattttctcagatgggctctcctgcgctgccctctgtctcctgtttttgggggttttatacaaacagaggattggggagggataggaagactagcatccttttggctccctggttggttgtgaaatacacacacacacacacacacacacacacacactcgcactcctctgagactccgaacagagaaaaaaattattggcaaatcaacacatttttctttctcgtcttgagaaaatgtcttgaggtccctgaagggccaaatccatcgtggactaactctgtgggtagagctcagatgacctagggagaattaaaccacttaagcttggagtgggaggagagggggtggggtgggggagaatataagatgtaacttaagctaaatgtaatctatttataaagcaagagactctcatctatttttatgaaaggaagggttttttaatctagggtaggcagttgtggtagcccagcattttcctgtggacgagacatggtgcatgttgttgctggattgaatggaacccattcctgtcccccggcctcgtcttctgtcctcacttttggtcatccacacccatgagcagcttcagcagagtgtaggtcccacttcaccccattctcctctcctctgacccctcagctccttggaagtcttggggtggggatctgagggggtgggtgggctgcaggaaattcagaaatgtggtgggtgggggaagggacaaggcgcattagggagggaacaagctgggctctggggataggctctgattaattagttactctgactctggtctgccgagatccatttccaacccagttgcgttgggagagggttgggaggcagcagagcatgggtgacagtgggagcacacgacttccttggagcctgggcctttgcgggtcccaggtggtcaggcagctggagcagaagtggaaatggcttaagatgctcatagcccagccccggctgtgtctactccaggccaagcctgggctgcagtccttgctatgttccccccagggccctggggggagggatcagggtgctgggggtttcctaggacaggggtcttcccccttgagacaccaagctctggctctagaagagctctctcctggagtggggagtctggaggggactgggtgggtgcaggtaaagccagattctctctggaagggaattttctatgaatggatgatttccaggctcagggtgggctgtgtgttagttctgagcaaatccctcaccaagacccttccctcccaagccctcaaagaaatgaggcaaagcccttccctgcaagaccccttgtggatgtttttgcatctacctgatttttagccccacccagggagactttataccccatgatcctgccccaccgttgctgttgtctgccagctgggtctagcatcacagggaagggggggatttatactcatggaaagactactgatcctaccggaaaccaacctgtttactgtactgttgtaaatatcatgccctttatatcctgtatattggcttcttttaaataaagtgaaatgtcttagaactgatggtgcttttttttgtttttgtttttaaacagaagatgaatctggtgttgggggaggggtaggaggacggaaggccacagaaaccctcaaactcattagttaattagccataaaataggggatttcatatcacctgttacatttgtagctcacaataaaagctttggaagatgacaaagcaggaatcattacacacattttactgaaggggaagagaggacatgagacatcacaggctcagtaactggcttggcctggtttggaactgatgtccttttaaccacaaagcccccatttttccaggctctccaacgtgcccacaggaggtcaccttcccaggctctggatttgacagtaaccaatgttctagtttttcttgtcaatgggcatgttcagggcaacattgcccaaatgtgaactgagcccacctgtctagggttttctccaaaggtgaagacaaatagccgccaccaattccaatttgctttttgccattcctaatacttggcacttaggtaatctccctctcctactcttcatttaaatgtttacattctcccaaagtacctcaaatggtgtaatctggagaaaaataagtggcttaagatcacgggggctttgtgagttgggtactattacttccgttttacagatgaggaaactgaggcccggaaaggatatgtagtctgcctagtgccctgcttgaggaaccaaaatcagcatgggaactgactcctaagcaggtgcgcggttcatgctgctggaagaaatataaacaaattagaacagagagtaaggaaacgtaacattactttaggaatagattgggtccctgagacctcgtcatcagagaagacttcagaatccaagttttaaatagcattctagtgtttaccaagcacacaacattttgcaaagaaagctgaaatttttacttgggggtaaaaggctcaggaacaactggttttgcggccaaaggctttaaatgaaaagctaagcgttggccagctcaggttttatcttgcattgatcgtaatctgcaaggaagctaagaagctggccggccccgcgcctggagggtaggtggagagcggctgggtcctggccaagaagctggaaggcaggctcattccaggggccgcagcccccgggaagaagcagggggctggccgcgctgtggccctgcggggtcgaggagtctggtagcggacaggtttccagccttgtacaagccaccggcagcccgagagaagtcagtcggactcccatcgaacccggggcgcacgccagagggccggacgcagcgagtccttctgccccgcttcagcacgtgtcccatttcggttatctcattggctctattcagcccctctctgctccgctttggaaggctgccgcaggaccgccccgctgattggttcagaagctttggtgtgtcactctgactggtcgacagagttcacgccctctctcccgggtcataccataaagagaggaggggaaaacgcatgcatttcaggacttcgctttcgggttcccttgtcctgtgttgtgtaatgcccccgttatggcactagaaatattttttattagccgaagctaaatatagtgggactttggctgatcccgagctcggaggacagccggggtgatccgtttccccccgaggatcgaggtggtgcgctctggacggggttgtgcattctcgccgcgcccgggcggacgatccagcgaacagccccgcttctaacccgagatgctgctgccggcgcccgcgctccgccgcgccctgctgtcccgcccctggaccggggccgggtgagtgagcacggggcccggggcggcccgagcgcgcgcctggggcccgggagcctgagagtcactgggcgtcccccgcgccgcactccctccctgccggacccccaagctgcctcggtcaacgccgggttcctcaggggctcccctccgacccccacccaggcctttctcccactgagatcccttagcctcctccctcaggtagtcaccttcctttagcgaggggacccctcttcccgaatcctgcgaccgagtagggtgcctcggtggccctgccggttcccacgctcggaaagtagcctctgtagtcactcacctcactcctaatactggatcttcgcaatttgctggcttcccctgaggggcccttctatttttagcacaccacacatctcacttccccaccctcgtctcacgttcagtgtccccatcccgccccggattccccgagtcctctccttctaccaggatttctacctctctcttttccgctccccacacaccccgccgcccgtttttttttttttttttcaagttaaatgttggacagaaaaaaggattcctttcttcttgtaggtggaataatcatatttatagagtgcttataatgaaccaaatgctggccgggc

SEQ ID NO: 97821 - DNA, 44186 bp, Homo sapiens
aaacaatattgtcaggactgacactacctgacgttaagacctcctctaaagttacagtaataaaaaagcaaaagcaattcaaggaaaaaaggatattcttttcaacaaacaaatggcactggaacaactggacactaatatgcaaaaatattaatctgtacaatgactttacaaatttaataaaaattaacttaaaatgaatcacaggcctaaatataaaatgccaaaccataaaacttctacaagataccacaggagacaatccaggtgccttgggtttggcaatgagtttttaaacacaacaccaaaagcatgatccatgacagaaaaaaatgagttgggctttattgaaatttagaacttctgtcctgtgaaaaatactgtgaagagaatgaaaagtcaatccacaggctgggagaaaatatttctaaaactcatctctgataaaggacttgtatccaaaacaaacaactcttaaaatgcaataagagaacaaacaacccaaataaaaaaaatgggcaaaagatctggaaacttcaccaaagaagatcaacagatggcagggccaggtgcggtggctcacgcctataatcccagcactttgggaggccgaggcaggcggatcacgaggtcaggagttccgagaccagcctgaccaacatggtgaaaccccgtctctactaaaaatacaaaaaattagccaggcgtgctggtgggcacctgtaatcccagctactcaggaggctgaggcagaagaatcgcttgaacccaggaggtggaggttgtggtgagcagagatcgtgccattgcattccacctggatgacagagcaagactctgtctcaaaaaacaaaaacaaaaaccaaccagatggcaaaaagcacataagatgatgctcagtatcatgtcattagagaactgcaagttaaaacagtaagatatcactacacacctgcaagaatggataaaacccaagaaactgaccagcaaatgatgatgaggatgtggagcaaaaggaactctcattgatggctggcagaatgtaaaatagtacacagccacttgggaagatgttctggtagctttttacaaacctaaacctagtcttaacttacccaactgagatgaaatgttatgtccacataaaacctacacaagagcatgtaaagcagcttcattcatgatgccaaaagttggaagcaacccagatgtccttcaatacatgaatggataatctaactctgatacatccatacaatggactattattcaccaaaaccacaaaggagctattaagttataaaaaggcatggagaaaccttaagtgcatactgctaagggagagaaggccatctgaaaaaaagcaaatactgtatgattctggctatgtgacatgccagaaaagccgaggatctagcaatagttgagagaagtggttgtcagggttttggggagagtagaggagggatttttagggcagtgaagctctttggcatgatattgtaatggtggatacatgtcattatgcatttgtccaaatccgtggaactgtataacaaaaagagtggatctttgttttttgcggtttgaagacagggtctcactcccctcacccaggctatagtgcagtggtgtgatcatggcttcctgcagtctcaacttcctgggctcaggtgattctcccactacagcacgaaaaatattaggtttggttttaagaatgaatctactaaaggaaaagataaaagctggcaaatcctgacaagctctgttatttcagagcacaaactacctgccatgactgttctactacaacagcttttcataatcacacttgaaaagtaataccagtttttggtcaaccttccttttttggtgtagtaatgacttttctccctgaacacaaaatttattggttataacaagtcactcttggatattattgttttaggcagacacttcaactgacacaagtttctagtcagagaataccatatggtataaatttgaattgaataccatatttggacaaacacagaatgttttggtttccttaagtactccaagtcagaggtatgaagaggtagcatcttttgtgataatgctacgcatttgccctaatttcatgtgttttaaagcactctcatgtttagctttcatttaattctgaagacgtctatgttactactttaattgttaggtacaatttgagtaagaacagtgatgagctaattgaactctctttagggatagcttcctttattaaatataaaagttttgcaaatgaggagataaagctctgaatcattgcacgtcctgagatcctcgggagactaagaaacacagtggagggagaatcaaatggaccgtggattaccactatctaccatgattccacagcgctgttataacagctgacgaaggcagtggaggagggagtcaggaatgacacccttccaagaaactattgtttgagagatttttaaggagtatattaagatacataaaaacttaaaaagcaagcaatattggctaattctcaacgaaaattatgaagtgactctaattctgatattaagcgtgtaaaagtccattacctgccaccagcaaaaactgactccttcacacttacctaacccacacccatgactgcatcatctttttttttttgtttttgagatggagtctcactgtgtcgccaggctgaaatgcagtggcacgatctcagctcactgcaacctccgcctcccgggttcaagcaattctcctgcctcagcctcccgagtagctgggactacaggtgcgtaccaccacgtctgggtaatttttgtatttttagtacagacagggtttcaccatgttggccagtatggtcttgatctcctgaccttgtgatccgcccgcctcggcctctcaaaatgctgggattacagacgtgagccactgcgcctagcccgactgcatcttcttttcctcttttcgcaagtccaagcaatcttcttacattacatttgatgtagaaactgtacttaaaaactcttcatttctctactgatatacagcatttggatccctatcagcatttctcccattgtcctacatgctttgcaaatactctaatcctcacactaacccactgaattgtgcacttttattgcatatatttgacagatgaggaactggtgggacagacactgagtaacctgcccaaggtcacagagctgctaagtggcaatcagaattcaatccctgccgtctgaatgcagcccttcagggctggctacagagtctctctcttcatacagtactacactctgctgcctcacattttttacatttattagtaaatatctgccctcatggtctcagatgacaatttgtcttttctctcctgaaatgccatctccttatcggtatctgtagtttatgactactgacacgttattaaaaaacagttccattttagagactactgaactctaagaaatagaaatgtttttcccaaatttgaagacagtaaaatccgggattctttctctcaaatttttaatttccattttcttatatgctgctttaaaaaaaaggtttaattttcaaaacgttagagtattttgccgataccctaacaactattaaaataaccactgtgaatttaagtaagcctaatgtttttatgttagcatggtagcctctctgaaaacaaaaactaaaataacaaattgtactttaaaaaacttccagtaatcaagacagaagcatggaaatatgcctcttcatggttcgttaagacaaaggtcttttcttccccttccaaattaattctgtggagtggttttaatttctgaattcaaaaggcaattataattcatggaaagagaaatggcagaagaggaaggaaagacattaagcaccagcagtgaaggaatacatgaaaagaagaagacagaatatgctttcatagtggaacactgttgattgatgatttataaaaccaatattccaaagggattaaggtcaggattaggacctttatatgctgattgtggttccgatttaagctcctaacagtagttgtcttgaactgagagctcttatttaaaacaatccttcactaaaagagcttcaaattatcttacaggtgctttaaaaaaagatatttctaaaattttttgtaaaatattgtctttgtttcagaaactatttccacttttttaaagatcaacttagaaactaaggttgtaaaaatactgacagataacattaatgcgtggcaagaaggtaaggccaggagagctgatgttcgcagagcaccactgcatgccaggcactgtcccaggaaactgactgagaccttatctatttgctcaccatcacatttgggcactttccaagtaccaccgggtggagtggaagcactcagctaatgtctgctgagtggttaacaagtgggacaatctatacaactgagaattcaactacagtgaccttttaattcccatgaatgttctttttccatattagagaaaaaaaaatctgacttccaaggccaagccaccaaaaattttatgtggctaattcacatcagatatcattctgaaaatctcgtatattactatcagttatttgcttaatgaaaaacctatttatttcaactaatgctttatggtcccttcatataaattaggatacgaaaatctagtttagcactgtagcgccttagaaatcctccacactgttaagagcagggaattgctacgacacagcctagaatccccttagcagcgtgtctggaattcttccagattccgtcaagcttcaaaactgaacagcaccacccacaaaccaacttttacctgcccattcccgggccttctaatatgcacttcccccagcccaggtccccctacccggaactaatgtttaaaattctcgaggctcgtggcaccctttagttgcatgtcagttaacaaatgccacttaaaagcccaccgaactcctcccccaggacctgggggcaatttcatgaccttgcagggttacggtttcagcaagtggtttcaaggtagtgctaggtgtccttcccttccccgccctcagacagatctgtacggtcccttctgcaccaaaaccaccctcagaggcatctaggatgttcgcctttgctgttgcagcacccagcaaagcgtctgcaacacgggaggtgctcgacggccgcgctctctgactcgatcgaatcttaaagggtcactctgtccagcactagagggtttcaaagggcgtcaaggacaaaaagcacgacttaaccttcccctgggctattgctcaggctcccgtcaccttgcaggccctgagactgggggcctggcttgcagtggaagtggaagctcaggaagtgctgattagctgagggaactcaagaccgcccagacgtcaatttggactcaggccgcagtcccgaggtcccaggtggccctccgacctcagggaaccgggcgggaccttgctccgccggagcccggccctgcgcacaccttgcccgacctcagagccgcttcctgcagcccccgctacccggcgcctccgacgggccaggggcccagctaggccctgcgaccccagatctgcccccgcgcccatctcctcctccctgccccgtgcccaagctcttccatcccttgcggtcctgccgatcttcccgcaagctgccataccattgcggctgcaaggtccaggccgacagcccagcgacacccgcgcgagagaacatggtagccacagccctgctgaaggtcggtcaggcaggcctcagcgcgcatgcgccgaagctccccagcgcgcccctcccaccttgctctcttcttcagtctcgtttcttcgcgctacggcgaggggagtctcgcgaccgttgcaacccagtcttcccaggccccacctccttccgcctctcagctgggatttgtcccgcccaccgccgccagcccggttccgtttccggctggctgagtactggggtccagaaagtgatcgctgccgtggtcgccatggggaagtcggattttcttactcccaaggctatcgccaacaggatcaagtccaaggggctgcagaagctacgctggtattgccagatgtgccagaagcagtgccgggacgaggtgagtgggcccggagtggccccrtcttcccaggagggcccctggcaatccaggatcaggtcctggacgcggggctgagggcgcggggctggggctcccggggtccgggtcgtgaggcttctgaggtctgcagtgggcgagtcaactactcagcgcacgagagccgtccctccccgcagcccccgggcccagcgggcagcctgtgttctgcgacccctcattcctccccagtccgatccccaccaccaaagaaatgaaatcagaaaaggttttgcacccctcacaggggcggggatactgcaatactagacgcccgggcaatgccagtaacagtcatcagctctkacttgacttgactcttaagagaaacagggtggttaggattcactcctcttttgggatcaggtgaaaaaggagagctaagctcttccacactactcatctagcaagcatttattgagcacctacactgtaccgggcacagaataatattgtggttaaaattatggatttatctggtttatggatatatcagactgtcaaaatttaaagtcaagcagggccacttaccaaccgtgtggtcttgggcaagttatttacttatattcccctttacttatctgtaaagagggaataataatttcacctacttgwwggattgtcgctgagttttaaatgagtgaagtatatatagagtggctcaaggagtctgggcagatctcgaaaagccttatatggctacactrtggaatttacacttttccccattaaagaggtggttgattgaatgctgtgcaggctagtgatgtgatcatatttttctccggagattggactggattgggtaagggtggaagaacactgaggcaattggaataatctaatccagtgtttctgcaagtgaaggaagaggtattttaggtaggactcatactaatattgatacagttactctctttagttctattaaggaatacctgtatatgcattatctaatgtcttagtctgcttggactgccatataaagtgcrgtagactgggtggtttaaatgacagaaatttatttctcacagttctggaggctgggaagttcaagatcaaggtgctggcatggtcagattctagtgagggtcctcttcttggtttgcgaaactgcctctatcctcacaaagcagatagagcaagctctaatagaaacttctcttcctctttttttttttgagatacggtcccaccctgttcatcatgcaggctctacccttgtgacctcatctaaatccagtcatctccaaaggcccaccttttaattccattcccttgggggttagggttcaatatatgaactttgaggggacgcagacatgcagtctgtaacacccagacttaacactttaagtaattttgccgtatttactttttaaaaaatattttaaggtaaataccaatatcaggatatttcacctttaaatacttaaataggcatctctaaaatttcaggatacttttctatataaccatagtatatgtcatcaacataayamaattaatagamgttcctctttatcatctaatacacattcacacttcctcagttgtcctccaactgctccttgaaatcaagattcgatcaaaagcaatagactgttataggtttggttattaggaycyccgctcccctctccagtctccctcatcatcaacatcctgcaacgaggtgttatatttgttaccatggatgaaactacattgacacatcagtatcatccagaatccatagtttacattagggttcactcttggtgttgtacatcctatgggttttgacaaatgcataatgatacgtattcaccattataaaatctcacaaaatagtttaactgcccaaaaagtcctctgtgctctgagttattaggacttttagttttctctaaatttaattttctctatattctgaatttagaatataacccattttccctccacccctttttcttttttttttttttmtagacagagtctcacctrtctcacaggctggagtgcagtgatgcgatctcagctcactgcaacctttgcctcccgggttcaagtgattctcatgcctcagcctcccaagtagctgtcccagctactttacaggctgggattacaggtgcctggcaccacacctggctaatgtttgtatttttggtagaggcgaagttttgccacgttggccaggctggtctcaaactcccgacctcaggtaattcacctgcctcggcctcccaaggtgctgggattacaggtgtgaaccactgcgcccagccktctttttcttgacattgacttgttgaagagaggaggccaggctgttgtcctgtagcatcccatatatgttgacttgtttcctctggttgtcttttgccttctaactcgtagtttctgtcaactggaaattatatctaaaagctttgattgggttagattaaacattttggggagaaagaatactttgtaggtgatcttgatagattaatttcaggttaaacatttgcagggaggaatatgatttttttttttttttttgagacaaggtctcaattggtagcccaggctcgtgtacagtggcgcgatcatggctcactgcaaccttgaccttcccagctcaagcaatcctcctcctgcctcagcctcccaagtagctgggaccacaggtgattgccaccatgcctaattaacttttttatttgtatagagatagggtctcmccatgttgcccaggctggtctcaaactcctgaactcaagcactcctcctgcctyggcctcccaaagtgctaggattacaggctcaagccaccatgcccagcctatagtattctttataggtgatcttgtatatctcatatagcatcatataaggaagccaataatgtttggtagtacttaaattgagtaaaggtgacagcttgtaaataatattagaaagtattattttcccccttgtaagagcaagtgagtattggggtaatacttagaaatcatacctatatatctagtttcccattaaccttttacctgtgtgttttagcatccttgcctgagtcagttattttattaggagttgcaaagaggttatttttctaatttttttttaacatttatgattggctgccatgcttttgtacaaatgagcttttgctcatcaactagggctatttggttatccttaaacttatttttttttgtttttgagacagggtcttactcttgcccagactggagtacagtggctcgatcatagctcacagcatcctccaactcctgggcttaagcaatcctcccgcctcagcctctcaagtagctgggactataggcacataccacccatgcctggctaattttcaaaaaatatcttgtggagmtggaggtctcattgtgttgctcaggttggtcttgaactcggaggctcacacaatcctcctgccttggcctcccaaagtgctgggattacaggcatgagccactgtgtctggccatccttaaatgttawactgagatgcaatttttttgggaaaggagtaaaggattaattcttttctgtaatctcctgatactggaaggctgaagagaatgaaggtcagagccagggtatccccccaatctactcctgggtttctaggatttagtaactgtattgtttgttcattttattttattttttaatatatggaaagtgatactgtttatttatgaggctgataccaagtttcttttaaaaataaatttaaataataactatgattcttatagggcacagatgaggcaaaaattgtgtaagaggtccatgatctaaagattaggaaactatttgaagcaaaatcgagtgtggaaatctggacggtgtcagtgagattgatcagagggactgaatatgggttattaagaagctgaatagacttcctattaaattggaggtagaaagagaagaaggaatctaggatgttgtctggtttcatggcttgggtgcttgtgcttcagatagagatagggaatacaagaaaggcacattttttgtttctattactagtgaagaatgagggtcaaatattaaggagaggtatactaagtcaaaacttgtatgtttttttcctgtcattttaagaaggtacagatttaatatgtttaacaaggttaatataatatgcagcaatgtattttggataatgagctgaagtagaggaaagtgagcgaaagtagtttctgtggtggaaattcactaatgacccattttactcctttgagcacttgtctgacactttgtataaagtatgtgctcaatgagaattgattaacttaagtctaaaaaatggaatctctcttctgtttctgtgcctggtatgtttcttattaatgtctgttttctacaacactcttttgctgtctctttgatctcaaggattattctttgattagcagagttgaaagctcaactctataaaaawtttttttgaaaacctgatagagtagttacagctaatgatttgattatattttaatttatcatcaaagagcagattttttgggttttaactaaatacttctatttagagcccattttgatgacctaaatcagaatttattgcttttacattttttgtagaatggctttaagtgtcattgtatgtccgaatctcatcagagacaactattgctggcttcagaaaatcctcagcagtttatggattatttttcagagtaagtaactcaaagaactctttatcttataggctttattcagttgaacatttaatagatggttaatattttaaatattggaagttctattatttcttatatgttaactgtattctctctatgctcagtttttatcttcttttgaaaattaatcatagtataaaactgttacaaaattatttctcacaacttagtttttcctttcttccacttcagatatacaaaactgtctttcattctaatacaattgtgacaaagaacataggttctgcattcagacttcccaaattcaaatccttctccatttaaaaactgtatgcctttggatgacctacttaagtttttctgtggtttattctcctcatctctaaaatggcactaagaagccaggcgaggtggctcacacctgtaatcccagcactttgggaggctgaggcgggtggatcacaaggtcaggagttcaagaccagcgtggccaagatgacaaaaccccgtctctactaaaaatacaaaaattagccggacatggtggtgggcacctgtaatcccagcgactcaggaggctgaggcaggagaattgcttgaaccggggaggcagaggttgcagtgagccgagattgcaccattgcactctagcctgggcgacagagcaagactctgtctaaaaaaaaaaaaaaaatggcactaaaaatagcaacctcttctaagtattgctgatccttcatagagtttatatgaaggtcaatgaattaacactttatgagtgcttagaagagtgcctatattcaattcagattagctgttcttatcattaccattaataaacatytctttgcttcttaccatctctttctttccaaacttctagacattttggtcctaggacccctttatacttttaaaaaatattgaagaccccaagaacttctgtttatgtgggttagatgtatcaacacatggaaataaaaacaagttttttaaaaaaattggtttataaattwttattattgttattattattgagacgggagtttcgctcttgttgcccaggctggagtgcagtggcaccatcttggctcgctgcaacctctgcctcctgggttcaagcaattctcctgccttggcctcccaagtagctgggattacaggcatgcgccaccacgctccgctaattttttatatttttaatagagaaagggtttaggcatgttggccatgctggtgttgaactcctgacctcaggtgatccacccacctcaccctcccaaagtgctgggattacaggtgtgagccaacatgccaggcattttttttttttttttttttttttgacagggtcttgttttgtggcatagtcatggcttactacaaccttgacctcctgggctcaggcgatcctcctgcttcagcctcccatgtagctgggaacatagatgcacaccaccacacctggctaattttttgattctgtgtgtgtgtgtgtgtgtgtgtgtgtgtagagacagggtctcactttgttgcccaggctggtcttgaactcctgggctcaagtgatcctcctctctcgatctcccaaagtcctgggattacaggtatgagccatcatacccaggccaaacaaaattatttaatgcttttctattgactgcacaaaactcagcctctttcgcatgacattcggggtacttcaaaaattagccaaaccttattttggtttcccagccacctcgtctcccttattctactctaccctcactctcactctyatttttatcagccataaattttagtcaaattaggccatttctcagatctgtgaggctttcatgtttctgtgccagctggaaatagctttctcttgcagttcacctctagggttctacttatccttcactgaccacaatgaaatcacctctgggcatctcctgtgactctttcaatggtattttgttacacttcttcttcagtttaacttttgttatgattggttatgctagattgtaacctccttgaaggttaagatttatgtcttattcacccacgtttatctagcacttaatacggtgtacscagctcagagggacatattaagtgccaatttcatgtggaatcagggcagttttgttgtcatagatagactggggtcattatgccaccatcagtggcactaacagacttcatgaaggacccattccaaaggtatgtggtaactgtttctatgactgctttaccaagacaaaaaatttcaactcccaactgacttttaacttaatccttaaaagctataatattttggagttctttccttgatcagtttttaaaggttcatagccatattcatgtagatgtttcacatatcatttggacattaaaactatactactggctagatgcagtggctcacgcctgtagtcccagcaccttgggaggctgaggcaggtggagatcacctgaggtcacgagtttgagaccagcctgcccaacatggtgaaaccccatccctacgaaaaatacgaaacaaaattagccaggcgtggtggtggacccctgtaatcctggctacttgggaggctgaggcaagagaatcacttgaacctgggaagtggaggttgcaatgagctgagatcacgctattgcactccagcttgggtgacgagaacgagactctgtctcaaaaaaaacaaaaacaaaaaactgtactactgcttaaatttcaaaaagatgatgctatatgtttgtagaaattaccttaatgctttcctttctttctttattagggaattccgaaatgactttctagaacttctcaggagacgctttggtaaacattttaaatattgtgcaaataacagctttataaatggcataatcttctgatgatcatcagtgtcatattttgttctcaggcactaaaagggtccacaacaacattgtctacaacgaatacatcagccaccgagagcacatccacatgaatgccactcagtgggaaactctgactgattttactaagtggctgggcagagaaggtamgaatgagattttaaagttgctttttctttcccacttctaatcttcataggatgagatgtttgggataagaaaagagaaaaaaaattgggtcagtgttttgctttttcatcgtgttagttgattccattttgggagcataatttctgccttaagttaatagaacatcatataactgttggacattaaatacttagatagaactgaataaatactatgcaaggtaatacagttgtctctcagtatccgtgggggattgggtccaggaccccttgctgataaccaaaattcacagatactcaagtcccttatataaaataaaatgatgtagcacttgcatgtaacctatatacatcctcccacatactttaaatcatctcgagatttcttataatattkaatacaatgtaaatagtttttatactctattgttagggaaaaatgggaaggaaaaaatgtctgtgcatgttcagtacagatgcaaccatccgtttttctttttttgaatatttctcacccacggttggttgaattcacatacagtatctaaatttcattaaatataaatatggaaaatcccatttgctgcatgaatttgtgtatttgaatgtgttttagtgtatttggtgttttgttttgttttgtttttgagactgagtctcgctctgttgccaggctgaagtgcagtggtaggatcttggctcactgcaacctctgcctcctgggttcaagtgattctcctgcctcagcctcctgagtagctgggattacaggtgtgcaccaccacgcccagctaatttttgtatttttagtagagatgggatccaccatgttggccaggctggtcttgagctcctgacctcaagtgatccacctgtgttggcctcctaaagtgctgagattacaggtgtaagccactgcgctcggcctgatttgcgtgtgtttgaatgaataaatatgcagaggtgaaacacattcatatttatgttttgctttgattgtatgctaatwtatggcagtggctgtttttttaaggcttgtgcaaagtggacgagacaccaaaaggctggtatattcagtacatagacagggacccagaaactatccgccggcaactggaactggagaaaaagaaaaagcaggaccttgatgatgaagaaaaaactgccaaatttattgaagarcaagtgagaagaggcctggaagggaaggaacaggtgggtaagcaacatcatcctgagaagcaacgtccagaggtctaaagaagcacaatggcttggtttttcttttttgtttttgttgttgttgttgttttggagatggagtcttgctctgccgcccaggctggagtgcagtagcgcaatctcagctcactgcaacctctgccacccaggttcaagcagttctcctgcctcagcctcctgagtacctggaactacaggcgcccgccaccacgcccagataatttttgtattgttagtagagacagggtttcaccatgttggtcaggccggtctccaactcctgacctcgtgatccggccgcctcggcctcccaaagttacaggattacaggcrtgagccaccgtgcccagccagcttgtgtyttttcagcgttgaatcaagttctgtgggcactgttcctgaactaagaggagaaccagcctggtgtcaaaagcacatttttggcattgacaaaccttggtttgattcctgacatactaacttcataatcttgtataattgcataatatttccaaacctcaatttccttatatctaaatagagacgctacctaatgggaagacatatacacagataatttcaactgattataattaattcagtactggaggtaaatgcagcatgtggaaacatagagaagcaatgtttactctggcctggggaggacagagtatttgagggtggatacaaccccagtgcccaggagtcttgaagaatcagtgggtgcaagccagatgaatggggagggaaggagctgaggtgttagaataactaggttggggcatttatttcaacatatatttataagcgcctccgctgtgccaggattcttgtaggcacagggaatactcagtgaacaaaagatacagaaaactgtctcctgtggcttacatttttttttttttttkgggggggacggagtctcactctgtcgcccagrctggagtgcagtggcgcgatttcagctgactgcaaccccygcctcctgggttcaagcgattctcgtgtctcagcctcccaagtagctgggactacaggcacaagccaccatgcccagctaattttttgcatttttagtagagacggggtttcaccatgttggccaggttgatctcaaactcctgacctcaggtgatccgcccttctgggcctcccaaaatgctgagattacaggcgtgagccaccacgccctgcctcctgtggcttacattctaacacttgtgtgtgagcaggcaaatatagcctggtgtgtatgtgaaactgagtgttttttgaactggttattgagctttaacatacattgattaaagtgtatgaggtgcattaatcttaggtgtacagttcactgaacttttacaaatatacgtgtgtagaaagagtgacagaaaacctgtggaaccaccacccagataaagatatagaacttttctagtatcccagagggtttcctcatgctcgttgccaattaataccccatctcccagacawaaccattgttccagtataccacgattgattattcattagtttagtctgttcttgaacagacttaaaaaaaaaaaaagcttttgcttttcctaaagtttattgccttatatttttgttacttcctgtttaagttgtaatagaaataaaaatataggtaaacttctgcagtttggcatagaaaagctgctttttggtatttagaataattctcaattggataatatttgcaaagcatgtaagttctattttttttttttttttttttttttgagagactgtctctctctgtcaccaggstagaatgcagtggcatgattacagctcactgcacccttgacctctggtgctcaagtgaacctcttgcctcatatgagtagctgggactataggtgtgcaccacaatgcctggctaattttttttttttttaatagagatggggggctcttgcaatgttgtccaagctggtctcgaactcctggcctcaagcattcctcctgcctgagctcgacctcccaaagtgctgggattataggcatgagccaccatgcccagccaaagcatgtaatttcttttcttttttttttttttttgagacagagtcttgctctgtcacccaggctggggagggcagtggcatgatctcggctcactgcaacctccgcctcccaggttcaagcaattctcctgtctcagcctcccaagtagctgggattacaggcgcccgccaccatgccgggctaatttttgtatttttagtagagacggggtttcaccaagttggccaggctcgtctcgctctttcacccagcctggagtgaagtggcacgatctccgctcactgcagcactcaccccctggattcagacgattctcctggctcagcctcctgagtagctggcattacaggcgcccgccatcacacccggctaaatttttgtatttttagtagagacagggtttcaccacgttggccaggctcatctcgaatgcctgacctcaggtgatccacctgccttggcctcgcaaagtgctaggattacaggcatgagccaccatactgggccaaaatatgtaatttcttttttttttttttgagatggagtctckttctgtcacccaggctggagtgcagtggcatgatcttggctcactgcaacctctgcctcccgggttcacgtgattctcctgcctcagcctcctgagtagctgggattacaggtgcataccaccatgctcggctaattttttgtgtatttttagcagagacagggtttcactgtgttggccagactggtctcgaactactgacctcatgatctgcccgcctcggcctcccaaagtgctgggattacaggtgtgagccaccgcgcctggccgaaagcatgtaatttcttaattaggatcttaatcacttgcgtattagagctgcctgggaacacaggtagcaagtcataatttaggcctattgaatggtgatartaagtgcaatgtacaccaaaaccttaaaactttcttttttttaggaggtccctacttktacggaattaagcagagaaaatgatgaagagaaaggtagttttattttttattttttctttttttaaacatagatgcttttatattggctttgttaaaaatgcaacttgtcaacatatctgagaataagacatcgaatgtgtctgagttacattgttcttattaatttaatgaaaaggtaatactaatgaattgattggataggatagctgaagccacaagtaacaaaactgactacaattaacttaaacaataaggaaatatcttgccataataagaatcccagaggtaaggtggttctgcatgccatctagacacagggtagctgccaacactccagccgtcacatgcagattctgcattgtcgtgaggatggcagagagcatctctggatgctcttctagaatcttgttaggagcaaggatacttttccaagaagacactcctcccttcaatagatttcctttcaaatgtcattggccagaactgtgtcacatgtccactcaaaaagcagtcactgggattatgttgattggattagacaatcagaattcaccccagagatgaaaatggtgttatgtcccctgagccacaggcaagaggcgtggagacctaaacagaattggagtactgttccccaggggaaatggggatagagcagggaagcgccggtgtggtctgccacggtgacacggtgtgcaagttcctcctgttctatggctttcagtgtgggacgttttacaggaatgtgtggtctccgtataggaacattttagctctcgtttattgaaaatgtcctggagttcctctgtgaacactttgtagtatcttatctgagaagttttattatgattttcttgaaatgtatgtatggaataacatttttttcttctagtcacgtttaatttgagtaaaggagcatgtagctcatccggagcaacatcttccaagtcaaggtgagctgcatcattcayggatatcttaaaacattaggatttttgtgaaatattggttactgtattttaaagtattgtgaatcatttttttctagttgtagttttcacctgtttttggtttttattggttgcgttgtttttttagcaattgttctttttttttttttaagagatggggtcttgctatgttgcccagsctggcctcgaactcctgggctcaaggtgatcttcctgcctcagcctcccaggtatsaatagctgggattacaggcacgccctactgtgcccagctagcaactgttcttttcctatttgcctgttatgagatgattgtgttttttgaggaaagcctcattttgattatatgtttcacatcaataaacttttgcttctccatgaatccttctccatttaacggttccttattcgctatrtaaaactgtttcttttcctgtcttagcccacttgtcacagtttaaatgttagctggatmtgcatttttcttttacttgctgcattgtgagttttctgagaatagagattatcaacctctctccttcgtccccagtacagtgtaaatacaccaggaaacactcagtagtcattgcccgcccttctaggtagtctagcacagggcaggggtcagcaaactttttctgtaaagagccacatagtaaatattttaggcttttcggccagatgtctttgtcacaataactgaactctgctgttgtagtgagaaggcagccatggacagtgcaggaaggaactgagcatggctgggttccagtacatttatttacaaaagccggtggcagctggcatttggcccttaggctgtcgtttgccaaaacctggcatagcatgtggtcaggtagttctacctactttctacattatcttctcttgcaatttttatgtattctttcaccaaatctttattcactatttctgacatgcagtacattcagttttgttatggaggttaaaaaagatgagtaagacaagagagtcaagtaccagtatctactggaatttgcttttaagccagatgatattttctattttacttagtactttacatgttgtttttttaagatctaagtttttcgggtttgtttgtaggtcattgtttatttacactattgaataagtggctaggagtatggaaggagataggtaggctgaatcagcaatatagatcaactttaaaatgatttgccagatgtcttaactttgatcaaaataatgtttcaaaattaacacctacattagatatcatcaagaagttggttatttgggttctacatctgggtacattccagaagaattgtctaacattggcatgatatgacctggaagatcggctcaaatataacacacatgccttatacttttagaactttatgcatttctgtctgttcttttgaagtatgtgttattcctagatgtagatggatgttaaaattggttccagtgttccccaattgacctcccttgtattagttttctatggtcgctgtaacagattaccacaaactgggtggcttaaaacaacagaaatatgttgaggtcatattctagaggccagattctgaatcagtatcactggcttgaaatcaaggagcctgctggctgtgctctggggaagaatctgagctccggggaagaatctgtcccttgccttttccagctctgttggccgcaggcgttacttggctcatggttgcatctctccagtatttaagacgagcatcttcaaatgtctctttgccccatcctcacatcaccttttcctccaggtgtcaaatctccctccaccttgctcttacaagaaaagggatgattgtagttagggtccaccttgataatccaggccaagctcctcatctcaagatctttaacttactctcatttgcaaagactcttttcttagataatgtaacattgataggtttcagggataaggacctgacatttttgggggtctatacagcctgctgtacccctatgccaaaccttgatattagcaaaaatattagttttatttgaccaattttgataatttatttgataagttatctatgttaatatgttgtgacccgagtccatgaataaggaacaatatttgtataagaatgtagtgtcatgggtaatacaattgaaagacatctaaaatgttttttctctgaaattatggtacataatatagtttgggattcattctcctgtgcatttatatctcttatatatctaaaacctagaaaaactaaatgatgtggatatcaaagtggacattttaggctatgttgaggcacaaaaatgagcccccttattgcttgaaacagtttacttgattttcatctccatttctcctttgggcttctttatctcctttgagaaaggctagaattcactctagttactgaaagcaaaaatgagggctgttcaaggaaccttactttccattttcattctgctcatattcatatcttgccttgattttattttaactctgccttacccctgtctcagtctctcacccttctaacagaatcttgatattgccagcaaaaggacctttctaaacttcagctcttaccgtgtcactcatttattaacatctcttggtttcagcatctctaagatgacctcgaatttttttacatactattaagtgacttttgtgatcctgtatgtctcctgccgtttgctctcagctgtgctcattgatttgtgctttcctaaatgagcctagggtctcgccctttcttgcctttacatctgctgctccccttcctggaatgccctttacatcaccctgagatcttgctgggctcttctgatcatctttttccccattattgtcacattctaagcatttaatgatgctgagtaaattttctttttctttctttcttttttttttttttttgagacggaatttcgctcttgttgcccaggctggagygcagtggcatgacctcggctcaccacaacctctgccttccaagttcaagcgattctcctgcctcggcctcccaagtagctgggagtacaggcatgcaccaccatgctcggctaatttttttgtatttttaggagaaactggatttcaccatgttggtcaggctggtctcaaactcctgacctcaaatgatccacctgtctcagcctcccaaagtgccgggatttcaggcatgagccaccgcgcccggcccagttgagttttaagaagagtaaataatagccttaaataaactcaagtgtctaagctgagattaataccaaaatactgaaataatttatagatgtattaatatttggggactcactgttgagaacctctgaggtatcatggagattggtagaggagtcagaaggcagaaaaataagcaaatatatttttttaagtggagaaaagtctttagaaaacaatagattaataagcatttccaacagattatgataggaagtaggtggtttgtgaacatgagacgaggaagtggtgatccctcaagccaaaaataactgcttaatcctaactcctcttttgctagggttattagtgcctattttgtagacatattgtagttgattatgatctgaattatccctggatccctagttcaaagtacacytaaatctaaagaacatttaagtagcaagttgaggagcttatcttacgtggatttggcctgttcaaaacccatgtccattatttatagctgtcacaccctgggcaatgcattcagtaatagaaccagagtttaaatatatgttcagtgggttgaattacaggtcaaaacccagtgagtaaaattttacaaaggtaaatggaaagcctgacagttagstaaagaaaaacaacccccataaaaacagagtgacagagtccttacctacaattctccatagagaaaagaagtaggggttttagttgacttcaagcttaaagtaacccagcagttcatcaatctaaggctacctttaaatgcactttttaaagtccaaataaaggaaaataataaatctgttgtattctctactaatcatatatttttttcttggttagctccatgatagctttgtgtaaatatttatcctttgcttcatcttttgtaaatatgacacattaaataattagatgggtaaaagtcatttgatcagccagtattaatggagcatctatttaatgtgagttacaagatagttactgctactttgcaggaaaaaatagatgcttcctccctactacaagagaggagtcgtacatacaaatgattatcatacaaggtgcagtgtgatgcatgccacaaggtactgtggcagttcaaaacactgcaagatccaagaaccctcatgaatggaccttaaagaattttaacaaatggagataaaaggagagattattttaggtataaaacaaggcatgtgcaaattttcagaggctgaaagcatagggcatggctcagtcaatagcaaattgttcttagtgactggtgtacatagtaagtcagggatggtgactaggatggtattctggggccaatggtgacagttgtatattggcagtaaagaatttagaatttacactgtcagccgggcacggtggcttacgcctgtaatcccagcactttgggaggccaaggcaggtggatcacctgaggtcaagagttcaagaccagcctggccaacattgcgaaaccccatctctactaaaaatacaaaaattagcccagcgtggtggtggctgcctgtaatcccagctacttgggaggctgaggcacgagaatcgcttgaacctgggaggcggaggttgcaatgagccaagatcgcgccactgcactccagcctgggcgacagagtgagactccatctcaaaaaaaaggatttacactgttaactctgggcagttgggagcagttaaaaacttttaagtaacacgttgagaactttgctttacaaaaccagaactgagagtaacgtgctagacttaaaccggtcatttgaaaacatgtcatttaattcttgcatttgggttaagagttgggtcatgttattatcttcgtttatagatgaagatttgaggcttaggaaagtgaactactccaagtcctaatagaagtagcctcaaaccctgatctgctcaacaccaaaacctaagctgcctaccatcattctactatacaaagtatagtagcagtgaccgaaggagtgaggagaaggtacagagagttaaagacagcatgggttaaatgctcacacagtgctgataggtacagagagttaaagatagcacgggttaaatgctcacacagtgctgatggttctgtaagagatgtggacagggactccatggttttcactaatctcctgtaaattastatgtcacacatttattctatattgtgaattttgcacatcgtaaagcattcgtctgtgtatggttcttggtaacaagcatggttctcctgttcatcagtactctgggaccgagtgcactgaagacgataggaagttcagcatcagtgaaacgaaaagaatcttcccagagctcaactcagtctaaagaaaagaagaaaaagaaatctgcactggatgaaatcatggaggtacagtttatggattgcgtgtggacaccttagaacccaaggaaaattaaatcatttcaccatttattagattaatagaaaattaggaaaattatcatgtacggactagggaatagtgacctagctacatacagttccccgaactggagttggagcccccctaaataggtttatttatttatttgttttttatttttttgagatggagtctcactctgttgcccaggctggagtgcagtggcacaatctcagctcactgcaacctccgcttcccaggttcaaatgattctcctggctcagcctcccaagtagctgggattgcaggcgcttgccaccatacctggctaatttttgtatttttagtagagatggggtttcaccatgtttgccaggctgatctcaaactcctgacctcaagtcatccacccaccttggactcccaaatgctgggattacaggcatgagccaccatgccccacctaaataggtttcttttaatgcctcaggtgctgtctttgaaactccctgcgcttgttacggtcagtagaattcagttagaaattggagtccttcatggttggcctccctccttcaactgctactctcctgttgactttgacttccgcttagcacctcctagygagcacgagaaacctgtgacatgttttttttttggttgctgtttttgttgttgagacagtctctctctgttgcccaggccagacagagtgcagtggcacaatctcggctcactgcagtctccgctccccaggttcaagagattctcctgcctcagcctccccgagtagctgggattgcaaatgtgtgccaccatacccagctagtttttgtatttttagtagagacagggtttcaccatgttggctaggctggtctcaaactcctgatctcaaatgatctgcctaccttgacctcccaaattgctggaattacaggtgtgagccactgcacctggcctagtgtgacatggttttaatttgatttagcctgatggctaagtctatgtgaaaaatcattggaagtacatgattatccatatttagggccatacttgggctctaaatctacccaagactctagagtaatgctgcaggaggttcttaatttactcctaaatatccccttctccattctaacacatagcctaccttatcaatgaattaagaaaataggtgggagagaagaggcaggatagaggagaaagagtaaatgaatacaagaagctaacttttttttctttaatattatttcctctgtctcctcatttattttcgtcttcattgtgaagggatagaaaatgccgtccagtctttttttttttttttttttgagacggagtcctgctctgtgttctgtcactcaggctggagtgcagtggtgcaatcccagctccctgcaccatctacctcccaggttcaagtgattctcctgcctcagcctcctgagtagctgggattacaggcacccgccaccatgcctggctaattttttatatttttagtagaggcgggatttcactatgctggccaggctgatcttgaactcctggcctcaggtgatccacccgcttcggcctcccaaagtcctgggattacaaggtgtgagccaccgcacccggctggctgttagtcttctctgttcctagtcctcacaccatgcaggatgatctaaaaagcttcaagtataatgtttagatgaaacttactatgaaactgagtcactgttacatgctgcacattgtgcaagcccccgggtctgtatagtagaaagaaaaacagtccttgttagtcacggagctttcattctaacgtcagagctgttcagcagtgaatcagtgaatgatcacaaaatgctgagtgccaaggaggtatgagggtagcgcctggggagagatcctgtgaacggtacctagacaggaacgatcaagcatctgaaggaaaggcccacgggactggagtgcagcaagcacctggtggcgtatgaggtcagagagccaggagggccaacaccatagaggtcttacatgctgtgacagggatttttaaaatttaattttattcaaagaaaaatggaaagccaaatygaccttttttgaatataatgcatactaattttagaacactgtttgttgaaaaggtgaaggatttaaaatgaggttttttktttttttttgagatggagtgtcactctgtggcccaggctggagtgcagcaatgtgacctcggctcactgcaacctccgcctcacagggttcaagcaattctcacgtctcagcctcccaagtagctgggactacaggcatgcaccaccacgcctggctaatttttgtacttttagtagagacacggtttcactgtgttcgccaggctagtctcaaactcctgacctcgtgatccgcccacctcagcctcccaaagtgctgggattacaggcataagccaccgcgcccagcctaaaattaggtttcgaatcaaccaagggattattacattgtttgatcccattgaaaattggtacttagggttaactgtaagcagttgagaaagaaaaagattcgatattttcgccatacagccccacagctctcttttctttggtcactctcatttatctcttggtggtatttttcttccctttcattcatgagctttactgtcattttcaaacagggagccccctgtttgctaccaggctgtatacttaaccacactgtgctacattgatccatgtgttatgattttactgcatgaaaacgtggcctcttttccagctcctgacagtcacatgggagaaagtgggtgagggcaggtactggctggtctttcagctgaataggagttgtgtctgtttgcttcctaggtcagttgacttgctttattatatacttttaaaaactgaagttttttttaaatcaaaaactaatgacaagtaatgtttatttgtatytatcagagctcgcaaattatgtcattggtcttctgtgaagtagaggacttcacagttttatggtgttattttgctaaatagaatggtattttgaaatccaatgaggattttagggagataatttargacattatgtgttctacagattgaagaggaaaagaaaagaactgcccgaacagactactggctacagcctgtaagtattcagttggagtttcttaagttctaaatgtatgtttaagtgaatgatttaactagcatttggtataagtaactaaacttttcaaacacgtataatctatayagatagagttagttataacttataatgacttttcttcctattaratcattaattattggttgcacctctattggagagttacttcatgcttatagactaataatgttctttaagtttagtgctaaacttgtttatgggcatcttaaatttgagccaggaattttcaatttttgctataagacaagaggttatgttttcagaaatgagttcaaaaagtagaactgtaaatgcccaagtgttggttttcaatttacaacttattggaactagaatgtccatttattaataggtacattgtggagaaaagcaggctttaatttcacaaactcaagggagttttatattttattgcttatttattattgcttattgttttaaaataatttaaaaatagtttttaaacatttaacaatattttaaaatgattatttattgatgctctattttagacttactgagacatgacattttcataaaactttcagagtgtcttattcttttttttatttttaaatagagacagggtcttgctctattgaccaggctggtctgaaactcctggcctcaagcgatcctcccacctcagcttccagagtagctaggactacaagcatgcaccactaatgccctgccaatttttgtattttttgtagagacaaggttttactcttttgcccaggctggtcaacatagtagcctcaagtgatcctcctgcctcgacttcccagggtgttaggattactggcccgagccactgtgccgaatttttttttttttttttttttgagatggagttttgctctcattgcccaggctggagtgcaatggcacgatctcagctcaccgtaatctctgcctcctgagttcaagcgattttcctgcctcagcctccctagtagctgagattacaggcatgggccaccacatccggttaattttgtatttttagtagagacggggtttctccatgttggtcaggctggtctcgaactccagacctcaggtgatccacctgcctcagcctcccaaagtgctgggattacaggcgtgagccaccgcgcccggcccactgtgcctagtttttaaactcagaaaggaaatatttttaacagatctactgtggataagggccaataagtacagtgatgtaatgaattatcttccaattactagagtgtgaacccatgagagcgtttgagaaattagcccagaaaatagtatgactaaattggagaagttgttttggcattaattggcttcatttagaaagtcttaaaagagagacttcagaataagaccgttcacatttttccgtaaacctatctttctactattaaataccctctccccaaagtccttcctaaagttttgttagtacgattttaagcatggctttatgaaatacttgaccatctctttgatatattcacttgaagtagcaaatatagaatcactgcagtaatattgcattgttaggcaatttaattttcattattagcttttagacaactaatccaaatcaggaaaaaatggtaaagaagcaaactctgaattcattcataagaagtaagcccagatttccctcccatttgagaattagatggtcagaagaacaatacctttagctatatctaatctggaggaatcccaactgtatgaaaattcaaagcaacttaatgagaaaggggcatagtgagaactgtcctgcataagcttgcaggctcagtgccttgcaatttccagtgagtctcttgcaatctgagtttttatcagcagtgaacaactcagcgcttttcacttcctgcaatggaaagaaaccatctacgaaagacgtgaagtactagagttgaattttaccgataacagtcctagatttccagaaatctgcaatgtagaaatcagacattttttatatatatgtatatatttttttcctcttgctaaccacgttgaacagaaaggggaagaaggaataaaagattgctaaggaaatgtttgtcattgttgggaaggcagagaactccagcatttcttatttggcagggcagttacattttcctgtggttttgggtgaacatastttaaaaggaagaagtaaatgacaaaygataacttctgtctttcctttcattttttttgttattattttctaggaaattattgtgaaaattataaccaagaaactgggagagaaatatcataagaaaaaggctattgttaaggtaaggacgtgcaattatgaatggaatttgtgaaaaaagcttgggtcactgagtgaagctmttttggtatttcttgaaaatcaagtcctagtagcagaagtactatgtttaaaattcttgattattccatgaaatggaagctgaattcatgattgttggagaaatatttctttttcatccatagtttctactcagcgttgatctrttttcttactaggacagatagtatgtatgaaggcccatcagcacctcttcaaaacctcagcatgcatgccttgcttgtcagtaaaatgtactttattttttaatgataggccatatattaaaagtagtggcaaaaactgcaattacttttatgccagcctaacaattatactstcagaggtctcatgaggacttcttgtgttttgcttgagaaactgtcttttggctactctgggattttatttatttttatttttatttctgagacagagtctggctctgttgcccaggctggagtgcagtggtgcgatctcagctcattgcaaccatcgcctcccaggttcaagtgattgtcctgcctcagcctcccgagtagctgggattacaggtggccaccaccgcacctggctaacttttatatttttagtagaaacggggtttcaccaagttggctgggctggtctcaaactcctgacctcaggtgatctacctgcctcagcctcccaaagtactgggattacagatgtgagccactgcacccggcctactctgagattttaaagtttgtatcaatattctaggccttttctccctttttgcctttcctaaatttagttttattctagcacccagccttgtgcatgcctattgcccttcttccactgtacattaagctaggcaaaactacccctcttgttagatttcttaaagtcttattccaggaccaccaatctgttattgtttccagatgaaaacctttactaagctttgaattgakttctttatkgagaaccatagactgggaaatcatgtatggaatctagaaaatagtgtcatttatagaaggagttactcwttcttttgattgatattttatttgtcttcatttcatttgcttttgaccttttaaatgagtgtgcacatatttcttctattataaaagtgttcattttacrtgacaggaagtaattgacaaatatacagctgttgtgaagatgattgattctggagacaagctgaaacttgaccagactcatttagagacagtaattccagcaccaggtaaatctgtttgcagaccatttaatacatatgccatcaaaatgagcggttccattttcaaaccactgtattttgacagtacttgttggttgttatttttctgtcttggcgrcattaactgccagcgtaactcatctctgtttggattcaagggcatcgtagtttactggctctctgatgaagctgttttgtggcatcaatggattttcctttcctggaatacttttttttttttttcctgaagcaaaacgtagacatatatggatagcatttgttatattaggcttatggttataggttgagaatctctcatctgaaatgcctggaccagaagagtttccaattttggattttggaatttgcatatacataattggatatcttagggttggaacccatgtcttaacacaaaattgatttatgttttattttatttttatttatttatttatttttgagacacagtttcactctgtcacccaggctggagtgtggcggcacgatcttgacttactgcaacctccatctcccaggtcaagcaattctcctgccttagcctcccaagtagctgggattacaggcatgcatcaccacatctggctaatttttgtatttttagtaaagacggggcttcactgtgttggccaggctggtctcagactcttgacctcaagtgatccacccacttcagcctcccaaagggctggaattacaggcctgagccaccatactcatcctcatttatgttttatatacaccttacacacatagcctgaaggtaattttatacaatattttaaataattttgattgcatcttgacagtggcctgtcacaggaggtcaggtgtggaatttcccacttgtggcatgatgtcagcactcaaaagattttacattttggagcttttcaaattttcagattaggaatgttcaatctgtgatgtatttgtttagctctctgcsatagtcaagtgaaagtctgtgttattttgctttttttccccttaggtgtctttgccttttggaaacttatccgtatctgagtacaaacactactttgaccaggttgtttacctctgactcaaaatcttcctgggggtgtcattgccaatgtagtgataacatcagtctctggaacttcttattatcatattctttattctttttccccctaaagtaaaaattctttttacagattasaaaaatttatgttagctttattgtggtaaaattgatgtacaataaatcacacatatgtaaagtatacaattyggtaagtttcaacatgtgcctacttccataaaaccatcactacaatctagctgatgaatagatcctctcatttccctctctaatccctccctcctaccttctgctcctgcatcctctgtcttcctcgacatctgctgacatgctttctgtcatagttcagttcatatttttctagaattttatataaattaagtttctataaatataaatgtgtcctgttttctggtctggctactttcactcagtgtaattattttggattcacctatgtggtggaacgtatctgtagttcattcttttttcttgctgtatgtcattgtatggatatgcagtattcccccttaacctataccttccaagaccaccagtgaatgcctgaaaccatggatagtaccaaacactatatatactatgttttttcctacatacatatstataataaagtttaacttatgaattaggcacagtaaaagattgagaataataactaataataaaatagagcaattataataatatagtatgataaaagttwtgtgaatgtggtctctttctctcaaaatattttattgtactttacacacctatttttggaccacgctgactgagagtaaccaaaacctgggataaggggggactactgtaccagtttgtttatccagttatctgttgatagacatttggcttatttacagcttttggctgttaaaaataaaactgctgtgaacatatacgtacaaagctttgtgtggatatctggtttcttttttcttgggtaaatacatagaatggctcagtcacatgttaggtataagtttaaatttttgtaaaactgccaaaccatcttatgaattttgcaaagagacaaagtaagctaaattgtctctgattacttctggactctgaacattttctccaagtaccttatattctttgcagtctaaaagtaaaacatacatattcctttaacaaataattgggggaaaaatgagaagtcttataatgttcgagtagtgaaagtatccatacaccgcactaaaatactacacacttcttaaatgattgagaacttctaagaaaaagggttttgttttttattatgtttattcagtgtagtacattttgctgtaacaagttagaagaaaagtggagatatttcttcacattaatttttatattcttttccrtcataggaaaaagaattctagttttaaatggaggctacagaggaaatgaaggtaccctagaatccatcaatgagaagactttttcagctactatcgtcattgaaactgtaagtttgtttacacaaagacagaaatttcaaaatgctttaaaaatgtgccatagttttttttaattggattgttctttattttagaatttgagttttttgttagccttctatcctatttggaaatctgtaagcttattttctccagtgactctgccattgctaaagtattttattttctgattataaaagaaatgtgtactcatgcataaaaccccaaaaaacataatttaatataaataattataaaaattaatcatagtcccccagcccarcaataaaccccattaatattttggtctgttcctttccaatcttggtgttttatgaaagtgtgtgtaataggtacagttttatatccttttttcccctcatatcgaatataaaactcaatttggcatagtaaagttagtgggggaagtaaagtcattgtcaagagggagggaaccacagaggtcaaccactttttaaaatgtctccccttttttcataaaggatttaaggtagcagagatcaatacagtaatttaaagaactctgacttataaataaagttggttattgacttagaactgatatttcactcacaggtctgtgagtgaggtctgagatatcttcagaaagaaagtttccttttagaactctgaactactgcactgcatatctttgatgctaaacaaaagaattttttatctccagtacagtcagttttagtatttctgggggagcttgggagtaatagctcacttagagagtttaatgaaagtttagactcttcaaaacattgcacataattgccaaattttatttgttctcttggggagtttataggccccctaagcccatggacctgttagagaatatgtgtctaggaaggttttctggaaaaaccatttaggtccttatttgagagaattctcatttcagtaaatcaagcttttctcctttttttttttctttctgatcctgacaatgctaacctagaagctgttacttgctaactgttactaacgtaaactaaggggaagaaagggaaaaaggactcytacttggcattgaggaacatgtcagtctgactaaattagcagattgagttttaacaaaaaactctataagattttctctgactctatcagcataaggcagtagaaaatccagtatttccttgacaacttgcttatccttcccttattaatttcttttttttttttttttgcatggaccatgcatgaaacttaccttattaatttcatagtgctatcaaatgcagatcctgtttcatgttttcatctcagggaaacacaaaacaactgattactgttgaggctgtgttgagttccatctcgatacctttggttcgcaggttgtgtccattcatcaaaaactaatttctcaccttctgcactgtagacccagtttcatcttctgtactgaggtagaacttagcagcaaatccacatgaaaagcctttctgtttgattgcaaagcaacatgtacttcttttagaagagggaatctaccagcttggcatggtggctcatgcctgtaattccagcactttgggaggctgaggcggacgaatcacctgaggtcaggagttcgagaccagcccggccaacatggagaaaccccatctccactaaaaatacaaaaattagctgggcgcggtggcaaatgcctgaagtcccagctcgggagactgaggcaggagaatcgcttgaacctgggaggcagagattgcagtgagccaagattgcgccacttactccggcctgggtgacagcgagactccgtctcaaaaaaaaaaaaaaagggaatctgtctcctaatttttttttcttcctttcttcagcctgtcctcattaaaaaaaaaaaaaaaatctctgtatatgcttgtgtcatcacttgagctttgcaagtggttatttttatcatttctggcaccttaagttttcatgtcgttgataatatttgaaatttatgcatatatcaagcagatttttaacatccaataaattgttcctaaatagcttcagctttttagctatttgccctataagcccaaatgtctggctcccttcttattctccagatttatggtacttatcagaaaaatgtaattgaccatagaccattaaacatgataatgaaaaatctaacctaggttatactttatctgggaacttaattcctttaaatatgataattatttgttgtgaagggaagcagtaaaaaaatgttaaaatctcagttctagggttagagtcatcatcattgtcatcatcattattgtcatcatcatcatgttatattttgcaagggagaggattaactgtcaaatttaattttaattttatttaatttaattttattttattttattatttattttcaagacagagtctcactctgtcgcccaggctggagtgcaatggcgcgatctcagctcactgcaacctctgcctccgggttcaagaaattcttctgctccagcctcccaagtagctgggattacaggtgtgtgccaccatgcccagctaatttttatatttttagtagagatagggtttcactatgttggtcaggctggtctcaaactcctgacctcaggtgatccacctgcctcggcctcccaaagtgctgggattacagatgtgagcactgcgcccgacccaactctcaaattttaaacaaaagattaaataataattagagttgaaaattattgagctctcactcatattaagttccaggtctagtcactttatatgaaataactcatttatatttcccaacaacccaatcatacagacattaccattatttccactgggagataataaggcacagagaggaaactgaaggacagagaggttaaatcaaytgttgaaagtgagatttgaacttggggagtgtaggttcacagcccatattcttagcctctgtgttcccaggttatatccgcttttgtgatagaaaatatctttcattaattaagttttcctctttccctttttgttcgatatgaaagaagaaaataaagttaaagttggactctttttataatctggaccagtgtaactatcacagccaacctagacaaacrtgtttgagtatctgtaatgcttacaaaatgatatttcctataaaaaaaagaaaaccccaaatggacaatggcacaaacatggtagaagttaacgtttcactctaaaaaccccaaatgggtatttttgatcagggaactctttctaagtggcgatttgtgaacccagggtccttccagctagtgcctctactgccctcaagtggcatctccagttgccatgtctgtgtgcactgggcaggcaaaaggagcttggcagattgtgtgtcagttatagcacgtctggaccgtcacttctgtttgctttcatgggctggagctccatgcatggccacagctaaccacaagggagccaggaaactggctatttatccaggaagcagaggagatactgaacagctwgcaggtctctgccacaatgtctattgataacgtatgtcagatgtcacagaagaaaatatggtagttcttaatgagaatgccatagattattcttaaaattcatagatgtatacaaatgttaacaatcttaatggtattttagggatgcggaaaaggcaaatttgtatccataagtatggtgtcatttttttgtcttttargaatatgtgtttttaaccttattttaaattattttaatttgtagggccctttaaaaggacgcagagttgaaggaattcaatatgaagacatttctaaacttgcctgagtttgaaaawttgttaacaatacattaaaatcttaaagcatcaaattggtgttcgccaaggcattatgagactctactgtgttagggtatattcttttgtataaaacaaacaggtttttgaaaatattactgtatagttagttgttcagctaaactttgagaagaatttaattatgtctcatgaggtatcaaactatgtaattttgtccttgttatttttgtttcctttgtaatttacttgatgagtttatatcttcattaaagaatgttattataaagtgttttatctatgacaatttagaatcatgtaattggaggaaatccttcatacactctatattttcagtagtagagtagtaaagttgaactctaagtgtgactaaattttaaatgtcaaactataaatatagaagcagctttattgtggtaataattcatataccatacagttcactcatttaaaatatacatacaattcagtggtttttagtatttttgcagaattgtgcagccatcaccactgtctgattttaaaacactttcataccccaaaatgaaaccctttaatagtcaatcgctatttttcccctctgccctagccctagacagccactaatgtactttctgtctctatggatttgccctttctggacatttcttataaatggaatcatataatatgtgatcttttatgactggcttcttacacttagcatcatgttttcaaggtttatccatgcagtagcatgtaggcgtgcttcatttgtttttatggctgcttaatattccactgtatggatgtaccgtattttgtttgtccattcatcagctgataaacatttagattgtttctactttttggctattgtgaataatgctgccatgatcacccatttacaggattttatgtgaacagaagctttcgcttctgccaaactcttccagagcagctataccattttacagtcctaccagcaatgttgaactatagttttatttgtttttaatttttttacttttagagacatggtctcactgtgttgcccaggctgctgtcaaactcctgggctcaagtgatcctcctgcctcagcctcccaaagtgctaggattgcaggtgtgagccacagcaccctgcctaaccatacagtttgaaataagtagggcagtgtattattagggaatgcaaaagacaggaaacccacatttgcctgtgccaaaggaaaaacgaagggatatttgtagtgcacatgactgaaaggagcagacgctagcttccagggcagcgggaccgggtgtgaacagccttccctgggcttccgctctgtctctggctcctgtgctggctctctacatttacattcttgggcactctaggtttacatcttacccttcagcagcaccgggaagagagagatgatctatcttttctttttctttttttttttttttctgagacagagtctcactctgtcacccaggctgattgcagtagtgcaatctcggctcactgcaacctccacctcccgggttcaagccattctcctgcctcagcctcctgagtagctgggactacaggcatgcgccaccacgcccagctaatttttgtaattttagaagagatgaggtttcaccatgttggccaggatggtctcgatctcttgaccttatgatctgcccgcctcagcctcccaaagtgctgggattacaggcatgagccactacgcctctttttttttgttctgttttttgagatagggtcttgctctgtcatccagcctggagtgcagtggcacaatcatggctcactgcagcctcgtcctcctgggcttaggtcattgattctcccacctcagcctcccgagtagctgggactacaggcatgcactaccatgcctggctaatttttttgatttttagtagagatgaggtcttgctatgttgcccaggctggtctcaaactcttgagctcaagcaatcctcctgcctcggccttctaaaatgttgtgattacaggtgtgagctaccacgccttgcctgagttgatcttctacaagagttcaaacaaaaaacagaccataccaggatgatcacttcaaacatgaggatgggtataagctgacgtcagacacaggtacggtgccaaaccctgggatctctctctttaactgagagtcagggagggctgattgcttctattctcagaagatgggagaacgtatgctgttagcagaaatgtaagaggcagtaaagaaatactaataggatgatggcagaagctttacagaaaatgttcctcagggatgaattaaggtttttccaaagtaacctgacagcacattatggaaagcaactgggttttgggtgtgggcagtctttagatcaaattctggcagttctgttcattggctttgtaatattagaatgttaatgttcttgaattgcaatgtttttaatgtataaattgtcaaaatgtttttcagcagggttgatgggagacctacagaaaatacatataaatcatcagacatgaagtccagcacatagtaggtattgaataaatggcagtgagtggtcatgtccagaaatgaagccaagaagttgagcctggactactaagaatctggtctgaagaatttcaaaaaggagaatggttctccctgataacaaatagtgatgagtaaaaccagacaaattacatatgcctcccccaagtatgtacgtttggaatcaacttggtggttttcttcagagaaaaaatgtttcatgtctgcctcccacatttaattctccaacgtctttctgaaattatttcagaatgaaatgaggcagcatacttgaggttaaattcaataaaaaatatctgaagcataaaaatacgattatagacttcacagtagttttttccctctgagtctgtagaacttgatagagtttatgctaagcaaaatgactgcagataactaacaacaggtctcatattagactttgatttttgaagtatcataagctatttttctttatttcaaacatagactttactttttagagcagtctctgtgggttttgacaaatgtataatgacatgcatctgccactgtagtatcacacagaacagtttcactgccctagaagtttcctgtgttctgtctgttccctgtctccccccaaatccctgctgaccgctgatctttttactgtctccctagttttgtctccatcgaaggtcatatagttggagtcacacagggtgtagctttttcagattggcttctttcacctggtagaacatatgcatgtaaggttcctccatgttgttttggttaggtttttgtggctcgatagcgcacttcattttagcactgcatattctattgtctgaatgcaccacagtttatgcactcacctactgaaggatatcttggttgcttacaaggtttggaaattatgagtaaagctgctacaaacatctgtgcgcaggttttttgtggatagacgttttcaacttatttacgtaacgaccaaagagcacaattgctggatcatatgccaggagtcttctgagaaactaccaacctgtcttccagagtgactgtaccattttgtattcaaacgagcagtgaatgagagttcctgctgctctgcatctccgtcagcatttgatgttgtcagtgttctggattttggccatcttaatagctgtacagtgggatcttgtcattgctttaatttgcatttctttgatgaagtatgatgtggagcatcttttcatgggcttatttgccacctgtatatcttctctggtgagatgtctttcaggttttttgcccattatttaattgggttactcattttcttattgttgaattttaagagttgtttgtatatttcagttgtgttctttatcgaatgtgtcttttgcaagtattttctctcagtcagtggcctgtcttctcattttgttttaagctattcttttttaacaccccaagattttcatcgttacttttttttttttttttttttttttttttttttttttttgagacggagtctcgctctgtcgcccaggccggactgcggactgcagtggcgcaatctcggctcactgcaagctccgcttcccgggttcacgccattctcctgcctcagcctcccgagtagctgggactacaggcgcccgccaccgcgcccggctaattttttgtatttttagtacatcgttacttttaagaccactgtgcacacataaaatactaaaagctaaacttaatatctgcaggtagaagttttaaattcaagattttaaccaaataacagagttaatgctaaaatctcacttttgaagtttatgttgaatattagcattctaatatttaatatttttctatttttgaaataggaaatggaaaagatgcagtaggtttttcaaaagggtatcataggtgagcacttcttatagaagaagaaaactaagaggtagtgctatttacctcttcagcactaagtttatctttatttttatttatttctataaagagatgggagtctcactgtgttgcttaggctggtcttgaactcctggcctccagtgatgctcctgccttggcctccgagagtgctgggattataggcatgaggcaccacacccagccagtaatctttagcttctagaaacaatcagatttccttaagattttgcaattaggtttagaggagctcacttgctttttcaaatatgggttggatatgtccaaaaaaagagttttgcctctacaatgaaaaatgatttttaccagattatggaaaggaagattcataaaaatgtgcctttaaaaagcttttttaaagtgcaagttcaccaatttgacttttgaaaatacgttcattttaggaattgattttttaaggaaagttgtaaacacagcaaagcacagaattacactggttcagacttgcatcttagcaccaaaatccactatacaaatgcagacagcataaagtaacctagtttcgctttaaatttgttgcttattttattctcccttataaatgtcattggtcttttgttagaacataatttactactttattttgaaataaagtctaagatttagcatgtaagtggtattactcagaaatggtttaaatgcaaatgaaataacagttctaccaggagtactaaaaaagatgctgtgttcaaggtatattaaatttgtgtgaaacttgattcacagacacagagggcttccagagaatttggaactatgattcagaattcatttagcaacattaacaatgtgtataattagccatctgaggtaacatcctgagcgattttaaatatgtgcagaatttgggagcaacaaaaactccaagtagggctgggcatggtggctcacgcctgtaatcccagctacttgggaggctgaggcaggaggatcgcttgaacccgggaggtggaggttgcagtgagccgagattgtgccactgtgctccagcctgggcaacaaagggagaccccatctcaagaaaaaaaaaaaagtaaagcaaatcaccctcccttgtgtgggtgggcctcgtctaatagtcaaaggcctgaatagaacaaaaatgctgacttcccaaagtcgggggattctctagtgtacggccttcgaacttcatctgcagcatcagctcttcctgcctgatggcttttgagctggaacactggctcctccctagttctcctgtaccatcagcctactctgcagattttggatttacaagcctccataatcacatgagccaatccttattgtaaatctcctatgggttctgttttcctggagaactatggctaatccaggcctcataaactcaaaagggacccagggaccaacactatgaagagaatcttggctaaaaatactgggctatcacaggcaccatagcaaggctatccttgctttagtataaatctctacagagggtaacagggctttagtataaatctctacgaagcacctaagatcaagtaacccccatttcttgttctatgctcaccatataaccctctcataattgtacttcccatgtaactagcagtgtaaaaatggacgcgatctgcaaggttgaggacctgagactcaacagcagtgaaatgatcagctgggcatggtggctcacacctgtaatcccagcactttggacggctgaggcgggagaatcacttgagcccaggagtttgagaccagcctgggcaccatagtgagacctcatctctgcaaaaaacaaaaattagc

SEQ ID NO: 97822 - DNA, 148075 bp, Homo sapiens
atatcatattttgtgtgagaacacttaaaaatcttctgtcttagcaattttcaagtatgaaacatactatctacagtcactgtgatatacaatagatctcttgaatttattccttctgtctaatttggtatcctttgaccaatatctccccaattatcctttcacccccagcttctggtaactactattttactctgcttctatgagtttgacttttttagattccacctgtaagtgagatcatagggtacttgtctttctgtgtctagcttattgcacttaacataatgtcctggaggtatcactcatatcacaattgacagcatttccttcctttgttaaggctgaatagtattccgttatgtatatatgccacattttctttgtccattcatctgtttatggacatttaggttggcaccatatcttggctattgttaataatgctgcagtgaacacggcagtgcagatatctcttcaactcacagatttcatctcctttggatgtatatccagtagtgggattgctgtatcatatggtagttctatttttaattttttgaggaacttccatactattttccataatggctgtactaatttactttcccaccaacagtgtacaaaagttcccttttctctacatccctgccagcatttattaatcattcagcaatttataacagtcattctaacaggtgtgaggtggtagctcattgtggttttaatttacacttccctgatgactagagctattgagcattctcccttcttatgactgttggccattagaatgtcttcctttgagaaatatctattcaggtcctttccccatttttcaatcaggttatttgttttcttattattgagttgagttcatttatatattttggatattagctccttttcagacgaacagtttgcagatatagtctcccattctgtaagttgtcttttcactcttttgattgtttcctttgctgggcagaagcttttaagtttgatgtaattctaagagaatttttaaaaattccattttgtcttctttgctggctcattagttataattctgttttgtatttttagtggttgctgcaaggtttacagtacacatctttaacatactccatctccaccacatacatgatataagagctttgcaaaaaaccttggtactatgttgccataacttttacttttacatgttatacatcttacaatgcattgttaatatttttactctcaacatagttgttatttttggtgctttttattcctttttgtagactcccatctggtatatattttattctgcttgaagagctttatttaacatttctttccctggcctctcagctctaatgcaagtctgctggtgataaattatttcagcttttatgtgtctgaacatctttatttcacctttgttttagaaagatcattttatctgggtatggaattctaatttgatactttatatttttcccaatacttgtctggcttgcatcatttctgcaagaagtcagttgttgttcttatttttgttcctttttcttccttatgtaatatgtctggttttttttgtggctgattttactgtttttttccccccttgctggttttaagcaacctgtgatatgaaaatttagtatagttttcttaattgatatttatgaaacattttaggtctgtttatggtttcctgaaaatttggaaaaattctggtcattatatcttcaaacattttttctctccccacctcctcctctttgtcgggactttacacatatactagattgcttgacattgtcctacggctctctaatcttttttcagctgtttttttgtttcattttggatttctattgtgatatgttcaagtccactatctttccttctgcaatgcccaatctactaattccatttgtgtgttctcctcagaaatcttaactttttttttttctttttgagatggagtctcgctctgtcccccaggctggagtgcagtggcgtgatctcggctcactgcaacctctggctcctgggttcatgccattgtcctgcctcagcctcctgactagctgggactacaggcaccagctaccatgcctggctattattattattattattatttgtatttttagtagagacagggtttcaccatgttagccaggatggtctcgatatcctgacctcattatccgcctgcctcggcctcccaaagtgctgagattacaggtgtgagccactgtgcctggccccagaaatcttaattttcatttctagatgtttgaatagtgttttttttttttacatgaaatgtctctacttaacataaccttttttctacctttctgaacatatatagttataataattgtttaaatgtctttgtccatcaatttgatcatctctgccatttctggttcagtgtcaattgatatttctcattatgtgttgtattttcccgcatatttgcatgcaggataaccttgaattaatgcaagctatgatgactattaccttgttgagtgatgcacattttctgttttctttttcttttttttttttttttttgagatggtgttttgctcttgttgcccaggctggagtgcaatggtgcgatctcggctcactgcaacctctgcctcctgggttcaagtgattctcctgcctcaacctcccgagtagctgggattacaggcatgcaccaccacacccagctaatttttgtatttttttcttttctttttttttttttgagacagtctcactctgtcagccaggctggagtgcagtggcacgatcttggctcactgcaacctccacctcccaggttcaagcaattctcctgcctcagcctccccagtagctgggattacaggcatgtgccaccacgcctggcttatttttgtatttttagtagagacggagtttcaccatgttggccaggctggtcttgaactcctgacctcaggcgatccacccacctcagccttccaaagtgctgggattacaggcgtgagccaccgtgcctggcacattttctattactatattcttgagctttgttctgggacacagttgttactcagaaacccttatccttctggatatggcttgtgttaagcagtaccaaggcagtatttagtgctaagtagttcccactactgaggcaaaactcttctgagtactatgcccactgctccatgaattgttttctacaaatgactgggtggaacaggcattacccttgcatgaggttcgatgaattgttccctctaatactttcaggtggttctttcactggcctcatttagttttcttacattcatgtgctgatttctgcagatctccagagctgcttctttggtatccccccaccccgctcttccctgcagactctagctgtcttggcctccctggcctctcagttctgacttcttaaccagagagaatgccaagctccaacttgattttcctctccgtgtgccacaggctgggccaatcatagaggtcattttgtttgttttcctctcaaggatcattgttcttcattgactaatagccaatatcttaaaaattgtttttattctgatgaaaacattgtgtgaatttattatttcatatatctcgtttcttcattgtcttaggtgggagagtaaatctggtacttgctgctccacgttaagtgaaagtggaagtcttaaaatgcaagctgaaaacttgaatcctatgccaggaagctctgctcccacccaatcatctttcttacagtctgtgaatcctattcatgacaccttgtttttttggagatggaggggggacagggaccactctgtcacccaggctggagtgcagtggcatgatctcagctcactgcaacctctgcctcctaggctcaagcgatcctcccacctcagcctcccaagtagctgggactataggtgcatgccaccatgcccagctaatttttgtattttttgtagagacagggtttcaccatgttgctcaggctgttcttgaactcctgagttcaagtgatccacccacctaggcctcccaaagtgctgggattacaagcatgagccattgcacttggcccatgataccaggttgatacatcttttgaaacgtctctcatataccttgttgatacatcttttgaaatgtctctttccttttacctttttccaccctgtgttaaccaccccacatctatgctatttcattcatgctttattgttttaacctctgaaaagatcttcctgcctctagtctttaatcgagttcatacatttctatgatacattttttttactgctatttcctagaacctagacactaatgtaccctggcactcaacaaacttgctgaattaataagccattcttttttttttttttttttttgagacggagtctcgctctgtcgcccaggctggagtgcagtggcgggatctcggctcactgcaagctccgcctcccgggttcacgccattctcctgcctcagcctcccgagtagctgggactacaggcgcccgccactacgcccggctaattttttgtatttttagtagagacggggtttcaccgttttagccgggatggtctcgatctcctgacctcgtgatccgcccgcctcggcctcccaaagtgctgggattacaggcgtgagccaccgcgcccggccaataagccattctttaacaaccaatttattaggtacttccttggcttaaaaaaacctcataatttctcccctctatccatagatcaagtccaagctgagactgccaattaatgctttacataatcagctattaatcaagctatgtgaaccctgccacttcctagaatatgtggtttattttttaacatgacttagagctattactaacttgtagctttttttccatctgtaggatcttttctattgtctcttaaattttacccactcttcaaatcccttaaaagacccacctttccaatgtccatacagaattcactcttctctgaatttctatagcatctattatctgtgcttgtttcagcgctttcagtttcctctctgtgtgtgtgtatgttttagttgtgcatatatttacatctattttttcaaatggaccaaaatctcagagaggtaggaaccatcttttataattgttttttatgtatcttaagacacagtaggtatttcaatgggtatttcgaaaatgaaggcagaggtcagcttgattaatttgcacaggctaatggaatcactagtttacagtaaattggtgccttgctgctcaccgtatgcttttctccccccatggtgcgaaatgacactgttggtgaaaatcacctcaaaataagagcttttaggttttaaatcaaattctatcttagagaatattattggatcaaggttctggagtatatttcatcttattcttttcatttaacaaataaaatgctgtgccccagtttctacaaaataattaatttaatataagggatgtcatatcaaataatatttcaacagaagccaaggaaatcctggtatcacatagccggtgaacataaactggtatttatttatgcaaacacattgcaaaattcctctaaatctttgaaaaatatttatgttgtcatgaacacataaaatgaaaaatctaaagtgagtatcaagatttcatttttagttcataaaagatattgaagtcaaattcctttctacaaacacagaagagttggccacagtgagaaaatgtaaaaaaatatcagtttctaccgtggaaaacacatgagtctatttttttaaaaacgtatttcagtgacaggaattcctataaaaagattaaactttcttgtcataatgacaagaaaccttcatagtttcaataatcttgaaaaccttcacagcttcaccctttgccaactaaatttagaacacatacaataaactcctcatacagaatacttttgtaccagaaaacaggtaattcacattctgataaagagcaaaagacaagtgctttattatgagaactgttcaagtaaaatttcagtgtgcaccagtgaaagtgaataaagatttgcatcaatttttttttgaatgaacactaggttaaaaaggggctacacattttttttttcaaacaccaccctttgctaaggcaaaaaaaaaactcacttaattttaaaacataactgttacagaagaaagctacatcacagtacagtacagaacataaaattcaccctagtctggaagccattatggaatggcacatcacctacacttagaccttctaatgtaggttggaattacagtatttatcacagctttattttctttaaactgataaaatttgaatacactttctgtttttcaggagtgtgcagatggggcccatatgttggtattacagtaattacaacagtaaataacattgcacagtcaacctccaaggctaattcagtataaaataacaagtattaaaatgtacctttactagtggttttacatcgcatatatcactaattatgaaagaaaagtaggcaaatgcccaatcacaaagcggcacattataggcataatgatgtggaataaatacaagaaatctggcaaaatatttaaaacaaacgagttacatgggaacaaactgaacaaccacataagcataaatcaatcatatactgttataaatagtatgttttgctcacaagtctcttaagtacttatagatattacagtggcaggggtgaatgaagaggatagcaggagaatgaggcaaatgttcccaatgccagttaattcctgaggtggcattatttcttaactgatgcattgatcaacactgtaaagatgagtttgtgctgtgaaacagtcccaatattattatattcccgcaattaaattgcggtattctgaaggcagcaaacctacgtgacagtttatgttataatagccagataaagtatgttttttttcttttaaattttgttgctacagttagcagtgggtcagaaaacacttcaaagttcaaaagaaacttgatgtagatttaacttttttcccggtacttcctagttagctcaaggcaatgctattactgaatttcatgtacttgaatttaaaaactctaagtgccaacactgtaaacattttgtatcttctcaactaaaccttgcgggataacaaggaaaagagcaaagataagcagtaataattttgtgtataataaagctgatctatttttcagcttctggtttaaatttaaataagattttaaaacaatttttaaaggtccatgctacaattgtaaaggctatttctatgcacttttaattctggacacaattttcaaaattgcatgatggaggtaagaattttaaaaacccaccagaatgtaaataacagggaagaacattttcaaatcaaagcatcaaacatacattcaggtgcagaaatctagacaactatacaagtttttaagcaatcatgttttattatacaactctatgaacagaaaatgaacagaaatacacaatatacttacctgtacatgtgaacctactttttaagctacagatatttattatagttcatactgactttaattttacagttcataactatgtataaccttattgcattaagggcaaattctacatggggagattcacaggcagaccacattaggcattaccagtacattcaaaaactgtacctcatatatgtatgtatcttccctgaacctgtaaatttggacttctttacagcttaagctcatttgctatttttgatgcaatgttcttaaaggcaatagatgtcccagatattcgcttgaagcgaaccccattaagtgacagtcgtggcaacttgcagacttccatctcccactgcacgaggctatcctgtctagcgtctccatggacacagaaaagcaaaaatctctctttttgctcataatcacagttatttgcatctaacacttttcggatttctctcatcatgtcattagggtccattgaactagtggtcttcatactccatgtgaaccgcaaagaacgcggcttagaatctttaccctcttccttgtctctttcttttggttcccctgatgtacttctggaacaagagggcaaagggaaagaatgaaagcaaatatttcactcagcaaagagatcaaaacacacataaaatctaagtggtcatagttcagtgcctaataacactacctaayttgcagaccaccctcagatggacgcaaagatttatgttatcttgctgttacagaaacacaccccaagatgccatctgttttgacttttaatattgtcaatctaaaatagcatttttcttaaatataagtggtttgagggaaacaagtctgcaactgaaagtgaagaacttaataccttcttcagttccatatttctctgttcaagcacacacacaaaataggaaccactaatattctatttgtaaatatacatttttgaaatataaaaaatttcttttttctgcctttttggataggaggaatgtcgtaacttcagagggaaagataattcgtttacctggtaaggttgagaaagaatgttgtactgcaattaggtaaagatgttagattataccacacatctcaatgtcctccagtgacttctcatttcactaaagacatccttaaaacagtctacaacgttccccatgacttccattccaactcctactacccccaatcccatttcctagaatttttctccttcctcactcctatcagaacacaatggcctccatgctgctccttgaacacacgggttatgttcttgccacaaggctgttgcacagactgttccctctgtcatgaatgcttctccccagatggctgcgacgctaactcctttgcttttttcaaatctttgctcatattgtaccctaactcctatcctagcatggccaagcccccttagcctgctttatttttcttgatagcacttacacattctaacatattatttaacccatttgttagggtgttgtctgaatctaccattagactgtaaactccaggagggcaaggaattttgtctatttcattcactgatatatctcgggcatctagaactgtgctgggtacatagtaataattaacatatttgttaaatgactaaatctcactgaattttacttattgcaggcatcccccaagtaatatggaaacaaaaagcctatttcaaacagtcatagaaagaaaccttcatagcttcatcaaagttaatagattattcrtgatacagaaaatcctgtaattaaatttcttgaacaattatccaaatagagatgttataattgcaacttgttaacctatctcacttatgtgatttaagaaaaaaaaagtcccttgaaaggagtttataatctactgcatacatcttttaaattaatatatatacattttgtatcaatagtatgatatatattcatgtgtaattttatatatattatctacttcatttccaggtgtctgagcctaggtatctgagtccccaaagctctgcaaactatgcaatcttgagaaaataaggaaaggaatacgtagagaaaataaatttccaaagaccattaataagtatggaaagtatttacttcatcgtgttctctatttttctctttttgcccactgaatctaagccattgcatcacaggcctcttagggcttgcaagccaaccagagtcatttaccaaggtcacatgtataattctggtggaatcggcatcctggaagggtcctgagagatcagttgactgagcactcattttaaagatggaactgatggctggaaaacttaaaattagttttctgtggctcacacctgtaatctcagcactttgggaggccaaggtggcaggaccatgagctcaggagtttgagaccagcctggccaccatggtgaaacctcgtctctactaaaaatacaaaaattagccaggtgtggtggcacgcgcctgtaatcccagctacttgggaggctgaggcagaattgcttgaacctgggaggtggaggttgcagtgagctgagatcgtgccactgcactccagcctaggcaacagagcaaaactttgtctcagaagaaaaaaaaaaattagttttctgaagttatagagctaatgagttgaaaagtgaagactagaatttagggatattattctaagtctagtttccttctattccaccttaagatgaccttaagacaatgaaatatttttctgcatggtctcacagacattaccactgataatgtccattgtagaaagctcctggaaatgtggatattaatataataacagctaacatttattgagtacttactaggtgcaggaattgtcctaagtgcctaaaatgtattaattactcatttacccctcagaacaaccctatgaggcagttagagtgaggaaatggaggcacgcagagttgaagtaacttccccaaagccacacagtaaggtaagtggtggaacatagctgaaacccatgcactctggctgagaacctatacttctaaccacagtatcacctcatctccctgaaatgacagaaccttattatagctggcttgatcccacctatgttccttgctgttttttttcatctgtaaaataggcattttcacctagttgttgtgaaaattaaatgatcagaaagtactttatagttagtattcaataagtcagttcaaaagcaaaaatagaaccaaacccaacaacaaccaaacaaaagggaatgtgaaaagtattgtgtaaacatttataaaatatcagttactaattcttataatgtaataaaattatatagttacattaaaaggacaaaaatgcaactattaagggccacttgcaatgccacacactactaaatgtctcagagggaaatttagtggaaatataggatgaaatgcaaggaggggctcaaaagtgaagactaagtgagggagaggctaagaacaagtcctccatgtttctataaaaggcagaagaaagtgaagaatatttgtcttgctcccctgtggctccctactgtggtgactcaggtacctaactctacaaagaaacatttcaactattattactaaatgtaaatatagcacagtttgttaaaaagactacatgggaatgctatagttttccaaagttaattatgttttatattttaagtaacttgaaaagtagaaatcaaattggaggtttgtgttcagctggtcacaatcgttcctgaatgaagccagagcctttcatactgtggaatacttgttggttgtaaaatttacattgcatcccttaatgcttgggtacactcaaaataaattaatgtcttcatttcttaaatttcccgtttgtaaaatatgaacacaagtactaacatgtccataatgtggtccctagaacagcagcataagcatctcctggggacttgatagaaatgcaaatgcacaggcacctgcctcggcccctgaatcagaaaccctgggagtgggatccagcaacctttttatcaagccttccctgtaattctgattgtgctcaagtatgaaacccattgccagaatgaatatacaactagcatgaaatgtcaaaaaaagaaatccccaaaagtatgcctggatagaatttttaaatgtggtcaaacactgaattatcacctaaaatatattactaatatcaaatcttcctacatgtaattatctccctgttctgtgttatttgtgctatttgactcagactaattttagttacattactttagtgagaaaaatatcagtacatttaatctattaattctttagcttgacatactttatagaacagaaagcctatttctataccaagtacacaattcaaatgcatgtttggaaaacaaacttaaagttgactgacttgaatgctaggtaacattatgaaaacccaccccaatataaaaatctaaaatacgcatgctatctagttattagatctattcatgatcattaagtgctgtaagtatttcaaaagtacgttttcatacacagggacctagcagcgaagtattaatagtggctcctcaccttgaggtgtcggttctgccactggcttcgccttcacttggatccctcaaaacaaagtgaaggttgagatttaatgataaaagtaaaaaatatatcaagaaaacctatatctaaaattattttaaaattagcttgttgagcaaacttctaccatgacagttttctattactagtcagtctgagactatttctcatatttttcaccataaccgcatgtaatttatcatttattgagcgtctactcatttttgtcaagaggcaatatgaggtgaaagtttgaaatttttttttcataatcttccaattcccagccatgattcatttgaagtcataatttatcttttggtttagtttaatctaaagttaaaactatttaataattatcaatagcaagattcaacttcaaatttgtaattatgtataattctagtagtcgctcaatttagaaaatatatacattaacyttgtagttagcaaataaacaccaatttccaaataagcaatttcttttagaagttatgctaacaattcatgcacatgataaaatatcacagcaaattaacagcctatccatgtaggcaagtctaaaaacacggattcaatcttaaataaaaacactgaccttacctggatatccacctgcgaaataaaaccaggaaaacactactaattgttctgtgttgcatgtaattaatatttttgaagtctaccaaaattttaatgctttgttatttttaaaggtaattaaatatcttgtgataaagggtaaaatactattaaatagtgggaaaaatcaccaacttgaatccttaagttaatactgtcttaatgttttagccattccagaaacatttctattatttatgtaaaacgaatgcaataagaataaaatcagtggtactctcccatcccccaaattcataaaacacacccacataccaagccctaaaattttaaattgttcttaagaatatgaacgccttatgcctctcagggtctttaactaatacatgcctttcttaacaaacatattatgaaaaaaaaaatttttctatctgaatttaaaagaatactaaaatgtattctcacattcaaatgtaatttcttaaatttctatttttaataactggcattttcattgggaagtataataaaaattcaatgccatctatacaaatccatttttattatagcacattgaaataaataaaacatttttgagcaggctgaaagtgaaatgtacattttcagttacatgtagatgaactgatatacacagatgggcagtataccaacttggcaagcaagacagtaatgctgttgactcccactgctaagacaaaattcctttaggaagggacaaaaatctcactggacttttctgtcctatttatattatgctttattattcactattagcaaacacctataccacagctgccaaacttaaaacattaggagtgaaatgtcccttagaccctatctcctctgctgtaattgactgaaatagcaattgacccataccctgttcctgcctacctggatgccagtaggaacattggaaaaatttctgctacttggcaattgtttcaaagagcccaggaagtctgctttaagtagccatggtaggaggcagatggagctacagaaggtgcagctggctctaacagcatatgcagcacagcatgctctccaacacttaacacttaaaaaacaattacctacagatagcaatatatactcaactgaacaaactgggttgttccctatataagaatgagctatggttagaaaatcataaggtttggtgtagaagtgagccatgcaggtattcagggcagagaattccaggcagaaggaatagcaggtacacaatgccaaagcagtgcttaatgtacttgaggacagtctggtccctgtgtggctggtgtggaagcagcaaggggaagagtgggagaagaggtcagagcagaaatggatggccaggttacacaaggccccacaggccacagtgagggcacagaattgtattctgagcaaggtgaaagctaatcaggggctttaaatttaagagtgacatgatcagacttgacatgacactgctgaaacagaagaggaggacaaggacagaaactaggagacctatgaggaagtgaaagatgaatagtggttcagagtatgaaggcagtggcgggagtgatacaagcagttaaatcctggaaatgctgtgaaggtaaagccaacacaaattgccaatggatctgaggtggtatgaggaaaagaagtgtcaaggataactccaaggcttatggtctgagcaactgtaaggacaaggctgccaatttctaacacggtgaagaatgagggagggacaggtttgggaagaggaacgagagtttacttttgaacatgttctgtttcagagtctataacgtatctaagtggagaggctgagcagcagttggatatgagtctgcagttcagsagaaagatgtgsgctagagatacagttaggagttgttcatacaggacggaatctaatgtcatgagcctgactgagatcaccaagagtgtaaggaaaaccagagaaaaaaatgtgtccaaagactgagctctggggcattctaatatttagaggttgggggaaaggcaagggaatctgaaaaaagccagcaaaggagcctgagaagtgatagctagtctgtgaggtaggagaaaaccagagccaagcaagggaaacgctttaaatgtgtggaatgtttcaagatagtaagttgctcacaggaaggcaggagacccatcagtctcactcactgccgtagcaatagctcctacaaaagggccttgcgtgtagtaggtctccacatatgtgttcaaagactatatggcaatctttatcagaacctcccaacagaccagctctaaggcactttcttgctttggcattctatctcacracttcctttccaaagtactctgtttcccctagagtctaaatttttgttgcagttaagagaaatattttgcacaatgcttaatgcacaatyagtaatcaagcactaaactataaacctatttttcttcactttaaaattaattctggcttaaccatgagaaagtactggctttttgaaatggccttaaatagacaaattccaaaagcagaaactactgataatctgactagtaccctgcagatggccggctaacactatgatctaacttccatgctgactctgttggtgaacttttagttctttctctagcaagtttcatgctgcatagtaattgccccaatggtacaaagtcactgactgatatggttagaaatttatgttacatttgaggctttaaagtttttaattcagctatgtgatactgggcaaactgatgtatgaaccaagcctataaatagctccatgacaaggcaagtaagactgaagctgcttcttctcttttccacatccactctttgaaatcctagaaacactaataacattggaaactaagtatttaattagtatttcttaaagcaagtataattatttcttacccatcattgaaggctcagctgaaatgattatatgatagggtgccttcactgtctccctagatagaaacaattgtgtcttcctctggaatccagcatgttgcccacactttttagcacatgttctgctttatatcatggctagttgtttgtctgcttcttacaagactataagaatctggagggcacagatgccatcttacctatctttagattctgttctgcacctaacacagtgctttgtctgtcgcagggcttaagtaggcatttagtgggaccaggaatagatgaaatccacatcagcctgcattgtagtagcaacttgtatcatcaatgtgcactgtacacgtatgcatagtaagcatagtaagtatgcttactttttagaaagtataattgtattgtttaagtagattagacctttactatacatgtattcattttgtgtttactatgttttgatgataaggttttatgatgtaaaattgcataagtgatctgtgactctggtgtgtaggctttttatgcaagaagaaaaaaatgtaaattatatattattagtaagcaatttaaaagtattgtcaagataaatttgaaggaaacatgtaaactcatttcttttcctcaatcaaggcttttaaatataaaataatcttttgttaaaacacacatttttgaagttaagtctttgttctttccattttattttacagatttttaaaatctcattttgtccattttttcctttctctctcttaaggaaaaatactttatgtcttcctagatttttttcttccaactctgtaaaagagcagctctaatgaaatgttatgaaaccattttagaaaattattataaagatttttttaaaaagtctagtttcctttataatttctagaggaatcaaaacacgacagtacattggtactgacctgcgaacaaatttggatgtgattttgcttattataccagttgacgttccccttctggcatgtgcaaatgcacccgtttcatgggatggtgaagcaggtggcccattataagcaacgctgcgtcgctcccggagctgttcaccatggaaagtgcttcggcttgagctccctcggggaaaacgggtccggtctggagtcgcagtactaatactgtgagcagatggggaagcagcaggcactctctgggttgtactgctgggacaaattaagatatatcattcagaataatgacaagaaaacctttcactcaagctaaaaacttgaaacaaatagctatggctacttcttttggccctactttatttgttcacattagagatgtgagacatgggtttggagtaaaatttcagtttgaaattaggtaccttttgtttggtcactaaaaatcaagaaatgactgaaacagggacacaaagataaatacttttcagtatcaggaatgccaaaccaggagtactgcaaatatttttttaatattctcctgaaaccacttagcaatgttgaacacaaattttattgtttattaaaaaggctttgaataaaataatttcctatttctaatttaggcctcagtgatgctacaataccacatggcaccaccaatatgcctaacaaatctaacagagggttaaaatgttcagatgtactgaatttgggaaatcttaaaatagaaaaatactagaaaaacaattatacaattttatatctgaacaggctctttgagttcatcagtttcattgacaggaaaactgaagcctggttttattaagaacaaggaattgagcctgatcattatctgcgggtctcaactcacagtctagtgtttgttcgtatggtttaaataataaaaaaatcaatttacctaaatgacaaattaaacagcaatttttaactttatagacggatgtaaaatcaaatccttaaaamaattcctctagaaaatgatttaagttatatgcaacatttccaataacagccaaagtacatagaaagtttatgttacaattcaatttttcctccataacaaacactgaatcttattagaaaggtcttaatgtgatggtgactatcatgtattttcacatggtgctrtatttttagaaactcttaaygaacaaaatgagatgtaaccaacacattacccaggccggtaagcttcagagccgtctttaatggttggcagtgtgactttaataggatgaccagaagtggacatggacttctggtggcggggtcgtgctgaggggacagcagaggccacagaagagcctgcagaagatatgctactcacagacatctccgtaaggctttcaccataaagcagttgagaagaccatggaaaaaaagaggaaaatttgtggtttactaaaatttaagaactatattttaaaaaatctaaactgactaacacctttcatgactgaaacatttgaaagaaactaacattagtggcattattaatgactaacaaaacaattaatattcttatgaaaagtatacagggtgaatttatcactatcatctatgaaaaaaatctcacacacactatgtatgtaaatgtgagaaagtacaaaattatttttgtggatatacgatagtttcagataaaattattatgactggagtcattttttacttccccaaagtcacagtttggtgtgatatgttgctgtagttcattgtccattattcatacaatcagaattgataattataccaaaaatattatctctagattcatcaaaacacttttagatcatattatgagtcaataggttaactgttgcagattaaaggagctgcagattaaaatttagtataggaaaaatcataagtctgaaatcaatttccaattatcttatgtccaaagaagatacatttttctttgtatgccttacaatagcacttactttacattcttattaagtgagaagaaacaaatgtgagaatgggttgtacacactactgaaatgactgaaggtggtactaagaaaataatttcattagaataggctccatgtctttgtactatattgatgagtagtccttgtgactcatgatagaaagaagacacatcttttaagtaataaaaataatatgatttattattatttgaaataaaacactttaaaaattatgtggttctgaatgatgagaaataagatggtcacatttttttcagagggagaaaaataaagcctttattgagatacagcaatgacttgatgggaagtgaaagggaaggaggcagcaggtgcataagagaataagattcaaattatgaagatgaaattaggatggtatgatctgctttgttatagaaaaatatttactatcagattttactcagaaattggcaggtaaagagatttgtttcttgttttctctaaatgttttcccatccttctatcctggtacaggaaagatgtcttactaagaacggttggttgcaatcttactatttcatgtaataactgcttttctcctgacccattcggctgcaggcatttcagcaagggsactaacacagaacaacagcaaaggtattactacttggcactgtggcatttacctgctgtcttttccattctgcaatgctacgtatcgatctgtggtcctttcacagacatatgtattccttcttgccatgctacctccagaatacacattgttcttcaagaatwaaaaaaaggcaattaaaaaattataaatatatttgtggaaagccaaagaaatgtatttaagctgactttgagaaaaatccacagaattttaattgatcagaatcttatattaacaagattatcccctgcstctctctaatttagatttcagaagtaaaagacaaagcatcaaaaatgaactmattacagttttagcttatcctcctataatagcagccagcagtttggaagcaataggagagctgggtttctattcactccctcctttgtgagctggtggtagagaaagggcaggagcaggggtgtgagcagctctaagtaacaaggagtgcaagccaactccacactaagtatcatcaccaacaggagcctcgggcagtgaagatggcatgcccactcagaagccagtgggctgcctttcttcacctgcttgggaaactctctcaaccaccaggaatattaagcagactaaatgccccaggatcaaaggcatgtccagctgaggccaccaacagtggtgtgtgcagtgccaccctgaagatatttcctcgagtctcaggtttgagctagaaggcaggccaagtctgaggagccttggagagaagagagaaaataagcaaaaagggataggcaggtaattctccttaccatgcacacaacctttgacctgtaacccactgttgtgcctgccaaatccttgactactcaccagtaataaaatatacagaaatgattttcaatgtggatataatactcttctgtttaatccttacccaacagaacaaaaatttttgctacttttgactaacccagcatttaaaatatataagcaacctaaacattgttgaatcatgagggctacaaacttaatagatacttgcttgaattcactttgaagaaggaaaaaaactcatataaacaaaactgaatacagatttaaaatttttcagtagtgcaggttcctagatggaaggaattttgtcaccagttatataaaaagcatatgctaaaaactataaaagtatggtagcaaaacaggctaagattattaaaatgtttaggtaagacttggaacatgtaggccaattgtgatggctcatgcctctaatcctaacactttgggaggcctaggagggcagatcatttgaggctaggagttcaagaccagcctaggcaacatggcaaaaccccatctccacaaaaaatacaaaaaaattagctgagtgtgatggcacacacctgtagtcccagctactcgagaggcttaagtgggaggattacctgagcccaagaacttgagaagaatacagtgagctgtgattgcatcactgcactccagcctgggcaacagagtgaaatcctgtcccccmaaaaaaaaaaagacttggtccatgttattaaggcaaagaaaattgattcgattatgcagacgcattatgaaactaacttacacaaaagttctcaaaaaactagaaatgtcatccgtatttcacagtttgaaagaaattgtttcattacctgctttcccatttaacatgtcattaacatctatccacatcaagtgatactaaagttttacagctgtagcctatgcaactgtacagacataccatattttattttaatcaataaattcctaatttttgaacacttaaattatttcctactttactcttagaagctactaatatttaattccctagaaattaactggaaatttgaaatctagaggacaaatcttagaaatacgtaataggaaacaggaaaaacaccctgggcaattattaaaactgcacaggattactgaaaagctgtaaaatcaccccatgggcaccaaatgtaccaatataaaaatatttgcttttgataatctcataattttggccaaactgtcatatgaataacttaattccttgtcaaatcatgctaccatacatcttctagaagcctctaaaatgtttctggctattctcaatgacatttctttccttttcaaaggctgatggtgaatgggatctctccttccaagctgtgcctctgaatttgtgctcctcccactctacctcccttgccttggggcttcaatgccagtgacattcaggtatggcaaccatcagttgtatttccccaaggaaatttaagatacaattatgcaaaagttatggaaacacagtgtcactgcttccatttgtcatacattcatataaaactaacttttatagctgactttcctagttcaaataaaaaagatctagttatcactaagcaggtaaggttctttctgctgaggatttgggaactaggtggaaaactacccttgcagactcttaaactgtagtttggtaacttccccaatgtggaaaccaaccatgtaaacaactttttgggggttctttcacagtaaagtgatattttatataattataccataagtttatatacagtattttatacttactatagcattcttaatctttttgagtcttcctaaaagaaatctcttcttccccttattttttaaaatgttgtttcttttttttttttaatttttaaatcttattttataagttccagggtacatgtgcaggatgtgcaggttacataggtaaatgtgtgccatggtggtttgctgcacctatcaacctgtcacctaggtattaagcccagcatgcaatagctatttttcctaatgctctcccgcgacctccgccctcctctgaaaggccccagtgtgtgttgttcccctctctgtgtccatgtgttctcattattcggctcccacttataagtgagaacatgtggtgttggttttctgttcctgcattagtttgctgaggataatggcttctggcttcatccatgttcctgcaaaggacatgatctcattcctttttatggctgcatagtagtctgtggtgtatacgtaccacattttctttacccagtctatcattgatgggcatttgggttgattccatgtctttgctattgttaatagtgctgcaatgaacataagtgtgcatgaacctttataacagaatgatttatattcctttgggtatatacctagtaatgggattgctgggtcaaatgatatttccagttctaaatctttgaggaatcaccaccctgtcttccacaatggttgaactaatttacattcccaccaacagtgtaaaagtgtttctctgaaaccttgccagcatctgttgtttctcgactttttaataatcaccattctgactggcatgagatggtatctcattatggttttgatttgcatttctctaatgattagtgatgttgacctttttttcttgtttgttggccatgtgtatgtcttcttttgagaaatgtctgtttatgtcctttgcccactttttaatggggttctttttttcttgtaaatttgcttaagttccttgtagattctggatgttagacctttgtcagatggatagattgcaaaaattttcttccattctgtagactgtctgttcactctgatgacagtttattttgctatgcagaaggtctttagtttaattagatcccatttgtcaatttttgcttttgttgcaattccttttggcgatttcatcatacaatctttgcccatgcctgtgtcctgagtggtattgcctagattttcttctagggattttatagttttggattttacatttaagtctttactccatcttgagttaatttttgtataaggtataaggaaagggtccagtttcaattttctgcatatggctagctagttctcccagcacaatttgttaaaatagggattcctttccccattgcttgtttttgtaaagtttgttgaagatgagatggttgtagatgcaagttttatttctgagttctctattctgttccattggtctacatgcctgtttttgtaccaataccatgctgttttggttactgtagccttgtagtacagttttatgtcagatagcgtgatgcctctggctttgtttttgcttaggattatcttggctatacgagcccttttttggttccatatgaattttaaaatagtttttttctaattctgtgaagaatgtcaatggtggtttaatgggaatagcattgaatttataagttgctttggcagtatggtcattttgacaatattgattcttcctatccatgaacgtggaatgtttttccatcttctttggtcctctgattttcttgagcagtggttgtagttctccttgaagaggtccctcacttccgttgctagctgtattcctaggtattttattttctttgtggcaattgtaaatggaagttcattcatgatttggctctctgcttgcctgttgttggtgtaaaggaatgcttgtgatttctgcacattgattttgtatcctgagactttgatatagttgcttatcagcttaagaagcttttgggttgagatgataggattttctagatacaggatcctgtcatctgcaaaccaagacaatttgacttcctctcttcctatctaaatgccctttatttccttctcttgcctgattgccctggccagaacttccaatactatgttgtataagagtggtgagggaagacatccttgtcttgtgccagttttcaagggggaatgcttccagcttttgcccattcagtatgatattggctgtgggtttgtcatatatgcctcttactatttttaaggaactcagaatatgttccttcaatacctagtttattgagaacatgaagggatgttgaattttatcgaaggctttttctgtgtctattgagataattatgtggtttttgtctttagtcctgtttatgtgactgattacatttattgattcacgtatgttgaaccagccttgcatcctggggatgaagccaacttgatcgcagtggataagctttttgatgtgctgctggattcagtttgccagtattttattgaggatttttgcatcgatgttcatcagggacattgacctgaagttttttgttgtctgctagattttggtatcaggatgatgttggcctcacagaatgagtcagggaggagtccctccttttcaattgtttggaatagtttcagaagaaatggtttcagctcctctttgtacctctattagaattcagctgtaaatccatctggtcctgggctatttttggttggtaggcgatttattactgcctcaatttaagaacttgttattggtctattcagggattcaagctattcctttcagtcttgggagggtgtatgtgtccagaaacttatccatttcttctagattttccagtttatttgcatagaggtgtttttagtattctctgatggttgtttgtatttctgtggggtcaatggtggcatcctccttatcatttgattgtgcttatttaaattttctctcttttcttctttattagtctacctagtggtctgttttatttatattttcaaaaaccaacttctggattattgattttttgaagagtttttcatgtctctatctccttcagttcagctctgagcttggttatttcttgtctgctagctcaggggtttgtttgctcttggttctctagttcttttagttttgatgttagggtgttgatttgagatctttctagctttttgatgtggtatttagtgctataaatttccctcttaccattactttagctgtgtcccagaaattctggtacactgcctttttggtctcattagtttcaaagaatttcttgatttctgccttaatttcattatttacccagaagtcattcaggagcaggtcactcaatttccatgtaattatgtggttttgagtgtgtttcttaatcttgagttctaatttgattgtcctgtggtctgggagactattatgatttcagttcttttgcctttgctgaggagtgttttacttccaattatgtgatcaattttagagtaaatgccacatggcaccaagaaaaatgtatattctgctgttctggggtggagagttctgcagatatctatcaggtccacttggtccagagctgagttcaagtcctgagtatcttgttaatcttctgtctcggtgatctgtctaatactgacagtggggtattaaagtcttccactattattgtgtgtgtgtggkggkgggggggtctaagtctctttgtaggtctttaagaacttgttttatgaatctgggtccttctatattgggtgcatgtatatttaggatagttagctcttcatgttgaattgaaccttttaccattatgtaatgcccttcttggtcttttctgacctttgttggtttaaagtctattttgtcagaaactaggattgcaacccctgcttttttctgctttctatttgcttggtaaagtttcctccatccctttattttgagcctatgtgtgtctctgcacatgagatatgtctcttgaatacagcacactgatggatcttgtctttacccagcttgccattctgtgtcttttaattggggtattcagctcatttacatttaaggttaatattgttatgtgttaatttgatcctgtcatcataatgctgggtggccaattttgcagacttgttaacgtagttgcttcatagtgtcatcggtctgtgtacttcagtgtgtttttgtaatggctggtaacaaattttcctatccatgtttagtacttccttcaggagctcttgcaaggcaggcctggtggtggcaaaatccctcagcatttgcttgtctgaaaaggattttacttcttcatttttgaagcttagtttgaccagatatgaaattctgggttggaaattttctttaagaatgtagaatattggcccccaatctcttttggcttgcagggtttacactgacaggtccactgttagtctaatggacttccctttgtaagtgacctggcctttctctctggttggccttaacattttttccttcgttttgaccttggagaatctgatgattatgtgtcttggggttgatcttgtggagtatcttattggggtcctccgtattttctgaatctgaatgttggcctgtcttgctagattggggaagttctcctggatgatatcctgaagtgtgttttccaacttggttccattctccctgtctcttttaagtactccaatcagtccttttacatagtcccatgtttcttggaggtttcgttcattcattttcatccttttttctctaatcttgactgcctgcctcatttcaccaagacagtcttcaaactgatagtctctcttccacttggtctattcggctgttgctacttgtgtttgcatcgtgctgtgtttttcggctccaccaggtcattaagctcctctctaaactggttattctagttaacaactgtaatctttcatcacggttcttagcttctttgcattgggtttgaacataatcctttagctcagcaaagttcattattacccactttctgaagcctacttctgtcagttcatccatctcagcttcagccagttctgttcccttgctggagaggtgttgcaattatttggaggagaagaggcattcttcttttgggattttcagcattttcttgttggtttttcctcattttcgtggatttatgtacctttgatctttgaggctgttgacctttggatggggtttttgtggggtcttttttgatgtacttgtcgttgctttctgtttgtctttcttctaacactcaggcccctcttccgcaggtctgctgcagttttctgggggtccactccagaccgtttgcctgggtatcaccagtggaggctgcagaacagcagattgctgtctgctctttcctctggaagcttcgtcccagaggggcagcaacctgatgccagctggaactctcccatatgagttgtctactaaccccacttgggaggtctcacccagacaaaaagcacagtatcacggacgtccttaaggaagcagtctggctgcccattggtggagctggtgatctgtgctcagggaattgccctcattctgaacgcccagactcttcagagtcagcaggtaggactgcttaacctgagaccacagctgcccctccccccaggtgctctgtctcagggagatgagagttctgtctgtaagaccctggctggagttgctgggattcctgcagggaggccctgcctggtgacgagggatggatccaggtcccacctaaagaagcagtctggccatgatctgccacagctgctatgctgtgctgtgggggaatacagcccagtccaaaccatgcagcctccctaacactggcaggggaaaatcactgactagagctgcagtaatggcggttgcccccaacgctgggaacttggtcatcttaggcagactccaggctgctgtgctggccagtggggattccaagtcagtggctcttagcttgcgggggatccatgggagggggacccactgagtgaggctgcttggctccctggcttcagccccctttccacgggagtggacaaatctcttgcctttctggagtttcgagagccaccagattatgtaaaaactcctgcagttcagtgcctgtccaaacggctgctgacaggggcagctgccatgggtctgcccagttttgtgcttgggacccagggctctggtggtgtaggctcatagggaatctcccgatccatgagttgcaaaaatctgtgggaaaagcgtagtgccccaggcaggcagcacactccctcactgcctctcttggctcggggagggaggtccctttgcccagtgcagctcctgggtgaaccgcccacccccacccctgccgcttttccttgcttttcttgggttacaccaatcacctagttagttctaatgaaagaacctgggtacttcagttggaagggcagaaatcactcgccttttgcgttcctctcggtgggagatgcagacaggcattgtttctactcagccatctttggcccttccttcttccctttattttgtaaaaaaattgattaatacttttcttagcgttcatgtcttagtctgtttgggctgctataaaaaaatatcataaactggctggcttataaacaacagaaatatatttctcacagttctagaggctgtgagatcaagatcaaggtgcagagatactcagcatgtgaaggcccgcttcctagatggccatctttttgttgtgatttcacacggtagaagggtagaacaagctcccttgggcctcttttgtaagggcactaatcccattcgtgagggccctcatgacctaatcacctcctaaaggccctgccttctaatactaccacctttagggttagaattttaacatgtgaattttggcagagggtgcagggggcactaagattcataccacagtggtttacatcattttatattttgtactgctcacacatgtgatagataatatggaaaatacctttacaagttttattgttttcttgattcaaaaacagcacaacatatttgtgtcttcaaaactcaacacttagctcccaagtttctaggctagtcaagggttttccctgaactcccacatataatttttggatgggaatttctagaaggaaaatattaagtttgtttttcctgcaccttacttacaaatagtaatactctgctacagtttgaatgtgtctcctgaagttcctgtgttagaagcttgatccccaatgcaaaagtgttgggaggtgtggctgataagaggtgattaggctctagtctcacaaaggaattcttgtgaaagtgcgttagttatctgagagtggctttgttataaaaagcatatttggccccctcttattttcttgcatgtgccctcttgacctcactttatgccacgggatgatgcagcaataatgccctcaccagaagttggcatcttgatactgaactacccagcctccagagttgtaagaaataaatttcttttctttataaagtatccattatgtggtattctgttatagcaacacaaaatgaactaagagagactcctttcatttctagtctgtgatggttgtgggtgatgaacaataaaacagatgactcagataactaaccaaaacatttatccaaccattattctatttaactatttaactcaaaactctccccatgctatcaactggccagttttaaagatcatctgccagtatcatccttcagtcaagatactaaactaatattaaataatactgtcaatagaatcatacttataagcaagagcttttactattgactaagacaattctgattttataaacgttaaatgtactatcacctgttaattacctatggatgttatgggcactatttctttttccatcagaaagcaagggaccatttcatgccatttgaatggatttaatgttttccattatattctactgacactggtaaaaatgttcatttgttcaggcaatattttacactattacagggcttgaattgtaaatgctcaagtactttctaaaaattacctcaaagaaaaggtattaaagctgtgtgttttggctttaaagcagtgattagcaaactttttctgtaaagagtcatatagtcaacattttaggttttgtgggccacaccatcaatgtcaccaatagacaagacaatgcaaattgaaaacaaatggaaactttttttttctttttgcccttcagattggcaaaaatgttaaagattgataatatcctgttgatgagtttgtggagaaataactactctctaaattatcccaaccatttggaaaattactttggtagcatttattaaaaatttaaatgtatatattccaaggatatacacatagtcaagtatactaagacacatcagagctgaggttttaggtgaggtgagtgccagtggggatgggactgcacagaccaagggtgactgtgtcatggactgaggagcatgaggagcctgcctctttgccactgaggttaaaaagaagtcacatagacccagacatggaacttttgagaatgcctctaatagaagtataccaataacataaatgtataaggatgtgcactctggagaatgaaaaactctgaacacttcaccaaaagaaaggttgaataaattatatctatctgttaataccaatgaaataatatgcatctattaaaaagatcttgatgttccgatctagaaggacccccaaactattataagtgaaataaattaaaatgttacatagtatgatctcatttttataaaaaagtaaaataaaataatgctctgtgtacatatacattcacttatttatttttatttttatttttatttttttgacagggtctctcactctgtcacccaggctggagcacagtggtacaaccatagctcatagctcattgcagcctcaaactccagggctcaagtcatcctccctcctcagccttccaggtagctggaactataggcatgctggaactagcctggaactacaccaggctaattttaaaatattttgtagaaatcaagttgcactaggttgcccaggctggtctcaaactcctggcctcaagcaagccttcctccatggcctgcaaaagtgctgggattacagtcatgagccactgcacccagcctatgttttctttaatgaaggaaaacctatagaagaattaatcctaaatgattagcactagttataattaggagttcagactaaaaggaaatsgatagggaagaggagatgattaatttyactttagaaactcctatagtgctaaaattaaacaaaatatattactttggtttctcaaactaccaaaattaaaacagtaaataacaatatattatagtattatgtggctaagaacagaatttctctatcaaaatcttttcgcttatgttttttttaaaaaaatgataaataagtgtgacatatttaatttgaatttaaactaatttcttaatttttatgccttctttaataaatatgctttgaatacacactgtatgcttcagcactaatgactctgagaaagctgctgtgtcaatatacaacagattataaatttggggagataaggtttacatgggaaaacaacagtgaatgaaacaagacagcatataaacagctaagagctaaatgacaggataagcaattgaaaaagctgatgggttttggagtatttggccataaaagattctgtccaggagacaagacttgaaatgatctatggaaatggaattttcataatgtaaggggamtgtttaggcaagggcactacataaagacagacatggagatagacaaagctgagtatgttcatggaaaaataagactcagttcagtcaaatgacaggttaatattaaatggtagaaagtacgggaccaattatttctttctgctatgtggggtgattacactggaaactgtcctctaaggcaaatagtggcttctgtagcaaaaaaaaaaaaaaaaatttaagccccattatagttcaatcatttctaaacagatcaggtagaagctaagtggttttatccatcaattcttgaagtggttatgcacatctgttccacagactaaaaggtgataatctaatcatatcatacatacatattcaaatatacataaccatattcaaaagaggtaaggctccagtggactacataaaataatgggtattagggagttgaagccacttggaattttgcgcattttggtatcttatcttgcatttgctatttaaagtaatttttttctctcctgtccacaggctgaggtttttttttttttccttctgctggtttaaaggttttaattctttgttcttacattgttcacccttaagttcctgaactcatgtttgctgcttactgctaatgatttctttctttctttcttttttttggtttttgagatggagtttcactcttgttgcccaggctgcagtgcaatggcatgatcttggctcactgcaacctctgcctcccaggttccagagattctcctgcctcagcctcccaagtagctgggattacaggtgtgcaccaccatgcccagctaattttatatttttagtagagacagggttttatcatgttagccaggctggtctcaaacccctgacctcaagtgatccagtcacctcgtcctcccaaagtgctgggattacaggtgtgagccactgtgcctgctctcttaactgctaatgatttcttaaacttactcctatcatctgcctaacaaggcatgtgtttgtttatatttctttaatctccacctctatccttatgccctggatactattcagagttttgattctgaattttcattattttcctctttttgcttatgttactacataaaatactttagtaagttgattactttcaactcctatatattttacagcaacattctagattcatttctcttcccgtaagaatgcttcctccaactaaggtgttttcaaatggtcaccgtgtagtaaaacagttgagacattttatgccaaagaacatggtttttgtaccttcatatttaaatgacaacatggctagataagatttctgggctcaatgagcttttctttcaatactttaaaaatatgtttccctttatcttactgtatccatgttgctattgatcaacctaaggtcaatctgaatcttgttccttttttttttttttttaaacggagtctcgctctgctgcccaggctggagtgcaatggtgcaatctcagctcactgcaagctccacctcccgggttcaagctattctcctgcctcagcctcccgagtagctgggactacagaatcttgttccttttaaggtcgtctgcgctgactctggaatctttaaaatattcttcatcttttttttggtatctataaattctattttaagagtccaggaataggttttctttctggcttctatttgtcactctgggtcttttcaaaatgaaatcttccctctttattttttgttattatttctttaactatttctcctccttcattttgctccctttcctttcaaaacacctattatctgaatgttaccaagtcttatttctacatttcgtatatcttagttttcttttatattttcttatctctattctttcctgctgccttatgggagagcatcttcttctagttcccattatataatttctagtttgctgttttaagtgaataatgtgaggcaactttataaattaattatttaactgagtctgccttcattaaacagcttattggtaaataaaaatgaaatgtgccaatataatattaaataaacattataaaaaggaaaatgaagcaggaaagtttcatgtaccattttgtgttgaggttaagtgttaacgcatgcaaaaaagaattcttttttgttgtttttaacttgcatttatgagaagtgtggtcccttttgcatgttctttaaattataattccctttaaatttttcaatcatttaaaaaaatgaaagataaaaattttacacataaccctaaaacaagttattacaataaattgcaatataccagagtatttactcacacttggaatagttgaagattttttcctctctggccctacaagagggcttgcagtcatctcgctttttgatccaactgttgtgctgccaagttttcgagccacatctttgtcccactcctctttctgttcactttccacactgttagcctgaggtcttttggtatatgatacagcaggaggaatggatggaccagctataatttttttaaaaatagcataatgagctgaaaaacaactgatctactttctgctcacaaacaaaaactctgtattaaaattatccatatttgcatgctttaaactctgaacgaagattaaattttgatttcaaaaatcaggtcagtccctgcaaaagggattatatttataattcagtaatataagtctgtgagaactagataacacaagcacatagagacgtgaatgtacaatgctttaaaaacacaartttgggaagaacccgtgtgttgcttcacttatgtgactttttcccctaccatgatcactgaaacgccgctgcttctgatttgctgagatacttctctggaccttcaggtgagcaggggactgaagagtgctgttgtttaagtcactactgggccgggacctctgacacaagtttccactggataacgattcaccaccttcaaactataagaagaaaaaccacagggattttaaagcaaaaaaaaaaaaaaaaaagtttgcacaaacactgcactcttgattttctaaatgacttaaagctatacaagaagtaatccaaactgaaaaaacagtgtagtattgggcctagaactttaagttggcaagcaggaaaaggggtgaactggatagaatacgctttagtgactactcataatcttgtattatcttgtacaaatccttagtttagtcaaaatacgaaataacagctaccaattactgaatgggttattatagactaggcactgtgctaaataagctctttctatatgtcactttatttaatcatcacaacaaacctatgatgtattaacctacactttatagatggaaaaactgaggttaaaaaagttaaggggcatcactgagattcaaacttacaataaaatctaaaattttaaatatacacacatgtatatacacatatgtatgcatataaacatacatatagatttgtttggttttctccacatttgcaaaaaaaaaatctggtttactgtttctgatcaggaaattatatttatttagaactcagcatggtaaactgcaggttgacacactatccctctctctgtaacatacaagttgtttgctgccagcaaacttttgttggaatcactggcatcccaataggaaatctaaattcatatatagataatactaatgataaatcacagagcaataccgatgataataaacagctaatgcagagcacataataatccactagaaactgtttcaagtttttaagcacataataattcactagaagctgttccgagtttataagtactcattcatttaacattttcaatgattctaaaagataagcacattattgccctcattttatagataagaaaactgaggcacagaaaattaattgccttagttgcatagttagtggttgtgctggggtagggcaggggtgggggtgcttagatccagtgaagctggctccgaagttcaggctcttactacttaccagtagcctcattcgtttatatttgatacaattcatacttcatttaaattcatgcgtggcatggttatatacttataaaattagtgcttcttttatatttaaattaacaggaaaattaaagacttcgggagtgtactttaaaatctaagtagaaacagttcagttcaaagcctttagaaataaccattcatactatttcccacttaaaattctcttgacttggcttctttgataccacatctctagctattaatgtctccactaaagattctcttccattataatagtacctacctggtaggttcactgggaggattggattaattagtatttgtaaagtccttagaacagttcctggcacactactgtgtgcaatgtgttcccctctaatgaagactccaaatctattaattattcaaatctctccctccaattcagatctttatatccaaatgcctaatagctccatccaacaggaatctcaaattcaaccagctcaaattgaacttcccctcttccccctgaaatctgtacctttcctatcttggcaaatgtgcttacacagtcttccatattggaaatctcatgggctcttatctcttatttccaactggtcgccaagtgctactgttaattctacttcttacatgtcacacagacctgccttggtgggtctgaccttagcctgttgtaggtacatgtccacctatatgctcccagagtatgctgtgcatcccccaaatcagaacacatactgtaccatactattaactgctcacctcgtctctagactaagggctccttgagagcagagactttctcgtccttctattcacagtacacagcatcgtttctggtacaataaaggttcaatatatgtcagctggaatgcactgctccattaacagttactacggaattataaataatttcagctttttctctctaaaatacctcccacagatgtctaacttccaataaattgttaatgctctgcgatctgttcttgactctcgatgtatagcctttatatttgttttcctaaagaatcattgcttttatgcttcatgatatggtttggatgctctgtcccctccaaatctcatgttgaagtgtgacctccaatgttggagtgggcctagagggaggtatttgagtcaggaaggtggacacttcatgaatggcctggtgctgccctcgtggtaacaagttctccctttacgggttcacgctagatctggttatttaaaagagcgtggcacctcccccacctctcacctgttccctcttgccatgtgacatgctggctccccctcaccttccatcatgtctgtaagcttcctgaggcccttaccagaagcagatgccaacactatgctttgtgtacagcctgcagtactgtgagtcaaataaacttctttactttataaattacccagtctcaggtacttctttatagcaatgcaaaactgactaacatagttcaccatttgtatgcagttatttcctgaatccatctccttattatagttctcctggccttgagaattcccaattgaaagcatcagtcacttgacactttataaggcaaaatatcatcaaataacctttcctggagttacctcttttaaaaatcctttaagacatacattttattttaaatgctatcacttcctcatgtttcactcactgtcttttctgcacacttggaataaccatattacctttggtgggactgttacatttggatgcacaagctgtgtgggaggccattctcaaaggccaggctgtgaatggtggctcttggagctaagaaagacagtagacctattctttcataaaatctctcttggtacccagaaatacaaccagttcataatttaacatcttgatttttgaattccaataaataagaatgttagggtaggatctttatattatttttgattccacaaagaatatattaactaatatattagctcaagaaataattcacagtaatctgaaaaggtgaaaaacttacttcaggtggttttctacctagaagaatataagtagccataacttcatcatacttctgatttattaaggcatcatttatttcatctcgtgcaaagcccatggtgaccataatgtctagaaatttaaaaaagagaaattttctgaaaatggttttattttcgtaaacaaatcaacaaaaatgggcaagtttgccatctttgaatatgaaaacttagtcatgaaaatttaaagtgtagttttaaaaacttctggactattaacctacggataccatatgttcacagatattgtacaatgataattttacatgcagaaattacctacatcatggttaatatattaatgggcccacttaatttctcattgcctaatacattcctgagctaactttctttgtccagtctaagaccatgtcagtctttgttacacacaaaattctctgtctttctctcaattcgtcctcagctactagtgaagtggtttctttcatctcttaaaattttctgctttctgatttgcagtaggttgactcttctttgggagatttgaatttccatggtttttctgatcaggttcctaacaccctaaaatgctctcccctgccactctgccctcaagccagataggaacacagttgagatgactcagctgagactaaatgatggctttgggaagggattgtgaaatgaagagaacaagttagaaggagagctctggttgggtatgggcagtagcaggacgagtgaggagggagaataaacattgctaagacagtggaaaaagaaagggagagccaaagtgttcaactcttaattcggtgcctctatgtctttggttaaaatacatgctatgttcgctgatgcttatcagtctgatcagtgctgatagttacatcagccattcctcctgctgggcatcactgaaaggaaagaattcgatttatttacattaggttttatatcactgttgtcaaacattgaattagaccataatatatatgggaacaaattagggaacttgaaatgtataattttcagcatattatcattaaaatgacaatgcaagtatttttcaaataaaaattgcttcctatttatactcttaaacactattttggcacactaaaggactcttacttgttgcctagggacagcacttcttaccaygtttaaatacttacctattctttttgtgtcattgaaatcyggatcaggctcagtatatggctttagttcttcctcttcatgaccaacattcatccatcgatctttcattatttgctaggaaataaactctacattatgtgtggtcaatcagaacattcagccacttattatagctctattttagcaaatgtaaaattactagttcactcaagaagtttcatgtgacatttctagtttgattagtgggccaaaaagaggtgtaagactttgggacacacacaacaactatgactatctccctacacactcaccaaatgcattgattcaaaatagcatgcctctcttattccttcaaagggaatattttcaaatttggatattttaacataagaatttacttcttataaaacagattttaacttctgtttcagatttttacatttaagattaatacagagattataattttttcctgttttatgccaaatatatgccttattttaaaatcatcatttactaaaatattagtaaagaagaggtcatggggaatgaaaatcagggttggcagtaaagctatcaataaagatagctaagataatgtgggaagggaaggcagtcaaaatttaagtctagagttaggaattaggtaagaatcaagctggggttgatgtgaattaccagagtcagattaagctaaggctgtgaaataacagacagtcctgggctgttaaaaggcaaccttgtgggggccaactagagaatgggaaaaatatttgcaaaacatatactggatgaggagtaaatattcagaatatgtaaagaatgcctgcaactcaataacatcaaaacaaataacctgaataaaaaatgggcaaagtaattaacagatatttctccaaaaaagatacataagtggccaacaagcatgcttgctgtgtgaaaagatgctcaacatcactagtcatcagggaactcaaaaccatagtgagctatcaccttatactcattaggatggccactatcaaaaaaacaagaaacaagtgttggtgagcatgtggagaaactgaaacccctgtgaactgctggcaggaatctaaaatggtgcagctgctatggaaaatagtacagaggttcctcaaaaaattaaaaatagaactaccatatgatccagtaatcccacttctgggtatttatccaaaaaaactgaaagcagaatatcaaagagatattcagaaacttatattcactgcagcattagtcacaaaagccaggatgtggaaggaacctaaatgtccattgacaaatgaattgataaagaaaatgtggtacataaatacaaataaatattattcagccttaaaaaaaatcctgttatatgttacaacatggatgaaccttgaggacattatgctaagtgaaataagccaatcacagaagacaaatactgcatgattctacttatacagattatctaaagtagttaaactcataggaacataaagtataatagaatggtgattgctggggctgatgagggggaaatggtgatttgttcaatgagtacagagttttagtcacacaagatgaatggtgattgctggggctgatgagggagaaatggggatttgttcaatgagtacagagttttagtcacacaagatgaaaaagttctggagatctgttgtacaacaatgtacacatagttaacgacactgtgatacacacttagaagttgttgagggtaaatatatgttacgtgttttttaccaccaccaccaccaaaaaaaaaaaaaaaaggcaatcttgtagagaatttactatactcatggtcaggcaatggaaaactggaagaaacttatttgaataattctgtattaatttagaaagattgttcactttttattactacagaattttaggttttcattttaggtgctgatatattaattgctttttccaggtcctgtaaagtacattctccatctttaaactttacttgccaatattccactaattagaaaaataacttcccatatatatatcttttgaaggctaatttcttgactgcccaggtaccttcccctcatttattaatatctacctaaagctaatcaccagaaaataagaaatccagggmagatctctaacaactggaatctcttaagaatactgctgtgctggattggaggcttttccagcagtcatcatcacatgatttttttttttttttttaaagacagggtctcactatgttgcccaggcttgaactcttgggttcaagttatctgcttgcctcggcttcccaaagtgctgggattataggcatgagccaccatgcccagccacatgatacatttttaaattaaactttctagagaattcatattttcttggaaggctagggattgagactcaggaatccttagcctacagaggatgctgtacaaaagttgtggggtgggtgcgattctccaggaagaatgaatagtgtaagaatgaatagaagagggctcagattacagcctcaaggaacactagtatttaaaggttagaaagaaaagaaatccaagaagaaaaacccgcacagcatgacatggaaggcgaggaaagagttcgaagaggagagtcctgtcaaatatagccaaatggtcaaataaggtgacgcctaaataagtagccccttgtgtttagcaacagagatgggggactttgctgggggaagtttcagtggagtggtggcactaggaaccagaaagtaaatggattggtgaggaatgggtgatggtttaagtgtagatactcttcaaaagggctcactacaaaggaggagcaagatggcagcactgaaaggggattgccaggttgaaggatgccttttttagtggaagagattcacgtatgtataaaagctgaggaaaaggagtcgatagagataaggttcagttggttacaggagagagcctttttgaaggggtgagatactgagaaggaaggtagtcaccagatacagcaaacagatgagtgagtgaagtcttcaacaaaagacatctttccactgtgacaagcagtggggagagatggggtctaaacagttatttttttttgtatagaaatgtaccattttattacaaaggtctcaaaaatgaaaacggtatctcaaaaaggaaactagaccaccaacctccacctgcagaattaggggaagacaaagggcaggcagtgtgagtttcttggctcacctgaggccactgggaaggtatgaggacagagccaatctaaaaatggctgatgttacattagcagcctgaaaagaacgggagacccttgaagacctggccaccccttctagaatgttcaataagggtacctttccaaagctactaagcaggcatttggcattttcaggattttgtcttatggttgcatgaaagtatccctttcacccaaacctggtactctttatggttcaaagttaagaactggggaaggatggaaggatgggtggcaaggcagctcctagaagagttcacccagcatagctgccctgggctcagggccttggtttctgtctagtccctggggatatttatatttaataaactttcctataaatacacagakaaatagaaagcataaaatctgaggtgttggtggagaaaggcaggggacttggcaagaagccagagctggagaggtctgctcaggccaacctgacctcctccttgacccctttggcttctggcttctcctccttggttttctcctcttctgtgactttgctcttctcatctaggtctttctcttttccatcctgttttgactctcttggcttttttgaagttggaagagttcttgtggccaccctctctcacctcatcagagtcagagaactcttcctcacaggcaattcgtttgtcagaggaacagatcgagatccatttgtcagggtcttcttcgctctcatcgccactctcctcagggacagatcctctggaatcacctgcatttggacccaggtttgtggggcagcattctcaggttctcaaacagtcgctgtttatcttctccaagtaccattcgtgttctkgttagtcatactggaaggactgatgtggagcctgaaatctggtccaaactattccaagtagtcgctgtatggaagctcattagggatctctgtatccagggccacacctgtctcatatgtccagcactaggcaacattacaaattggaaccacttcctcccagcatcagcataggcaggttaaagctcttgacaaattccatacacttggcatgcccccctcaaccctttttttttttttttgagatggagtctcactcagttctccaggctggagtgccctggtgcaatcagctcactgcaacctccgcctctagggtgcaagcgattctcatgactcagcctcccgaatagctgggattacagaagtgcaccaccatgtctgactaatttttgtatttttagtagatgcggggtttcaccatgttggccaggctggtgtcaaacttctgacctcaagtgattctcctgcctgggcctcccaaaatgctgagaacaggcatgagccaccacgacaggccagcatgtgctttgatgatcagattgaagcaacctaaccagtccccagataaggagtctgagccacactgtaagagcactgaacttgaaatggcctcataggacttgtcgtcaatcccatctcggagcaggtagttaacagcataatacttgcctttgccagccccaatatcctgtagatccctagttcctgaaaagttctctccctacttaggagaagacatagtcatgacccagtctgtggtatagaaggcctcttccatcccatcgccgtggtgawtatcaatgtcaatatacagcaccctctggtgataggttagcagttccaggatggccaagacaatgtcattgatgtaatagaagccagatgcctcaggcttcttggcatggttcaggcccccagcccaattcacagcgatgtctatctgctgcttattaagtttcacagcacttgccagagagccaccagtagacaactgtaagaattcaaacaggccattgaatactggacagtccttgctgacgttgaatctgcatctgcttgctgtgctcgaacatgtatctgaagagatggagcgcaagaatttaatgtagtcatccctgtggtacttggtcatctcctcagtactgggtttgtgagggtgacagatttctattgttcagtggagaccayagctgggcagcaaattgtgagtagtagatttggtgaggcttcattggatggtcttgtctataatattaatttccaacatccccgtcgtagtagtaacagactttcctcctggtgccctgtgtctgcgtcatcttgcttgccttccatccctcccatcagttggtctcaacagtaatgtttaaggtatgggaatggtaagtgaagagtactcatgacttttggtttctattttctcagcggaataaaagacaaggatatttgcctagaatgttttcccctatcttcccacctaagttcctttttatttcaaaatgaccacataaagcctgggacctttctgttactctctttcatggcaccctgatctttgcctacaattgaatgtagcttgttgttatgtaatattttggtttacctgttaatcatgtatctccaccactggaccataaacccaatcaaagaatgatccatgtctggtttgttcaatattgcatatccagcacctaaaagtacccagcactaaatggtcagtacatatttgtaaattgaatgaataaaacctcgtcttaatcactcatctgtccttctcctgtgctcccatggaactctgcttatatcctagtgttactgttattaaactctacctttgattacagttagttgtgtagaggtttatctccttcacattatttaaagtccttgaggacaaaggctgtgccttatatactgtttctctcactacagatgcctgtttttgaacaaggtagtgttttaaaataatgttgctacaagatccctgggtaagacagaatccagagattagcaacaagaagacaccttacgaagttgttataacgtccaggaaagagaacagaggactgaactagacatgaagaaatggaagaaagaaaccagaagtataatctattgcacttgatgacaagattcatttggttctgagggaatggatggaatacaagagagttctgagaattttaaatcaggtgcctggcagaatatggtttctataaattaagcaagaaatataggagcaatagcagatttgacagctgagagataagcaattagaaggaaaatgaaaataactttctgatgtttctcagttaagttgtatttatttggtgctcacttcatatccatatgttcctgtcagaaaaaatatatacatggatcaaacccttaagtgatttgtttgttatttggggaaatgagatttacttatgaaatctaaaactttttttttttttttttgagacggagttttgctctgtcacccaggctggagtgcagtggcacaatctcgcctcactgctacctctgccctcccaggttcaagcgattctcctgcctcagcctctggagtagctgggattacaggcatgggcaccatgcctggctgattttgtatctttaatagagacggggtttctccatgtcggtcaggctgctctcaaactcccaacctcaggtgatccgcccacctcggcctcccaaagtgctgggattacagctgtgaaccaccgtgcccaacctattttttttttttttttgagatggaatcgcattctgtttcccaggctggagtgcagtggcatgatctcagttcactgcaacctccacttcccaggttccagtgattctcctgcctcagcctcccgagtagctgggattacaggcgctcgccaccatgmccagctaatttttgtatttttagtagagacggggtttcatcatgttggccaggctggtcttaaactcctgaccttaggtgatccgcccccttgggcctcccaaagtgctaggattacaggtgtcagccaaaactatttgaatacacaacagaattaactatttaaagttgtgttattagcagtgagttttaataaagaccaaaagaacaacttgaagtgtgggctgggattttcagggaaggaactgtaagggggcaggatgtaaactgatttgaaatataagcagtatttggaatggtgcaaagtcatggcagaaggatgtgaggaacagtgaggaggcacccttcttttactaagcacacagattgtatacaatgaaagaatacattttatacaacattttataattagcacgggaaaaaatacaataggtggacacagaaggactgactgctaatcctcacataaaactagatttgaggctaggctgagtcagaaaaagtagaaaatgcagtgataaggaaagaaagagaattgggcagcaatgagagaatcaacagttttgtttccctttattattattattctagccactgggaatcaccaagagtctactaaggagtttgtctcacaacaacagttgtatttcaaagcagaataaaagtaatcttctcagaatggaagataaaggttggaaagaagatctccttaagaaagggaagatgtgggggtttaactctgttaataactctgttatttttttccaaaataaagcatagaaagcaacgaagtatggatacwtgaaagggaagagagatatggactacctgcccttagttgtgtgaacctcatgcatatgtaaaattctttcatggtaaccaaaagagttaacgttaaaagtcgagggaaaaactttcccagaaaatggaggtactgkgtgacaggagagagctcatgtaacccgagtctgggtggtctcaggcatggtataaagaactaggccaaccaactgcactagacatagaaactagctgaataaactcatccactccgatttcatttcaggtatctcatgagaaactagaggacaaaaacaattccaaaattaacaaaacaaagtttactctagccatcagtgccaatgaacataaatgactgcctgagagttatattaacaaaataattaattcagacgaattaargaattaaaccagctatgggaaatatacactctatacttagatgcacatttattttattttatcttatttggagacagggtcttgttctgtcatcccggctgcagtccagtggcgcaatcatggcttacagcatcctcaacctcctgggctcaagcaatcctcgtgcttcagcctcccgagtagctaggactacaggatgtgtgacaccacgcccagctaatgtagagacagggtttttccatgttgcccaggctggtctcgatctcctggacttaggtgatctgcccgccttggcctcccaaagtatttggattacagtcatgagccatcaagcctggcctgaggtgcacattttaaaaatatggaatttagaacggccagacaaataattttacttaaatgatttcaacctttgtaaaatatactatatgcttctgaatttgtacacagaaatctttcattaaaaaattatgaattaattgatttttttgctttactgtcatttggcagacataaacaagactgtaaagattattttagtaacacctgaaaaattaagtatcaaaagtcaaaataaacacttttatgggaggaccaatgacgacaaagagagggcaataagaggagctttgcttcaggctcaaattttgcattgttttgaaaggtaatatagtccatcttggttaaacactggaaaaatgaatgaacacatacaaaacagggaaagcagaaaagtttttcagtttctttctaataaaaaaatctagacatactaatattccaataaatgggttaaaaaaaaccctagtgtacaacataaagcacaaatccgtttaaaatcataatgccctcattatgagaggacagtataacacatggaagttccagactagtacaattagaaagagctgacagcattcacatatataacctgaaaaaattatataactgtttgcttatgtctagaaacaaactataggcctagtagaatgtgaaactaatttcaataatttttattttcacagatgataaataaggcatttaacttatgagtctttaagaaacactttaataaaatacacagttatgtctggtagcaacagaaaggtaagttaaataagtttgaaacaatatgcaaccatgtaaaattctctaaatcaaatttcaatattagcaaaatatatagtgaagaaagactagaggatactctaatcaataattcatgacactaaagtaacactgaaaaaacattcatgatgttccattttttttaaatgtggaaattaccagaaaaatattttatattaaaatatacaaagttggtacaaatctaygaggcttattaaccagactccttaagacaagtagttaaaagacactgagagcttatacatgaagaagcacaaactattcattaaaaatattccattttattgctaataaaagaaatacaaattaaagcgaggcatcaaatactagaatttgtatccattattgaatcagggtatggagaataggtacattcaaaagccttgggtcacacatatcttttggcaatgataaaagagctatccgatcacttacaccctttgacccagtaattccactctgaagaatttatctaaacatatatcccaaaggggaaaaaagtataccacattgttttttatcaaaaacaatggaaacaactcagatgtgcaataagcagggaatagttaaataaattacgttacgtaacccaaggagaataacatagctattaaaaaggaaggagtgcattcttatgacaaagcaagaagtgcatatcaaaagcttctaaggttaaaaaaaagaatggaacataatataaaacattactaacacataaaatgttatatttacataataaagatgagtattttgaaaatagctttaaaaaagtttacaggttttttactgtaaagctaataaaattggtatgaaaaataaaagtgaagactaacaatttttgaagtcaccaatatttctaggagagtttcttaaggtatggtataagaaatatttcttttttaaaaaatggtgtcaagtttccctggaaagtcatttctgggaactgtgaagcaaatcagcctttgtatagtaatatctataatataatatttccagtggggactcgtggtttcatagctgaaaaactttgttttggtaagctggaacagaaagttgcagactatactgaaatatattagaatgagcttctgatgatcaaatattttagtaataaaaatttggcttttaaattcaactcaaagcactctaatattttaatcctcaacatgttaataataatgataaaagactaaagtgtttggctactataaattaatcatctttaagacataagcacatcttacctactgtccatagagatctgtaatatctatccccccaaaataatttttgtatgttctttttgctctgctcattagctaagctgctgcttcaactttgagcattttattgtgtcactcaggtcaagtggggttcttatgataaaagttagtcacaaaacaggattacaaaacatgttctctaaagttcattattttagaactgatatgagagtcaaaaattttagctttttaaatatttcacctaatttttctatgaataatgatggaaagctttcaaaataagtgatataaaagtgggcattatatagtacatgttctctattaaagcattaactcattttttttaaccccataaggagggaaaagcccacaaaactcataagctataactaatcacatttaaacaaataattcggtaaaaaaatcatgataattgactaactgacacaaagcatttaaaataatttcccaatggaagtcgccatcccttaacttccatcaaaacatgctgtatcctctactgaaaaatatttgtggaaataaaattacaaagcccacactaacctgagagctctgtacacagggatggctcactataaggctgcctcctaagcagcatgaagtccatgccagaaagccccattgctacactaaaaaagtacagtttatatgaggttaattctctgaattctctaccctttctattaaggtaaataaaagaagacagaaagtactagtgaataatgcatgctgaatctctgaaattatcttagtaaaggctaaaatatcattcttaaaaacagatgggcaaaatacttaagaaataaattattctaattgcagtgccagaagaaaaaaaatagtagacattttggttatgtgaacttgcttggctgtaacatacttagtccatttataatagtgtctattattataaataacctcacatacagaacatatgtaggcaacacaacagtgtgctaagaaatgaaatgcctgtttccagtatgttgtacttaaatatttgtaaattttctttactaaagttgagaggtttctattacatttttattttattttatttttttatgatagagtctcgctctgtcgcccaggctggagtgcagtggcgtgatcttggctcactgcaagcgccgcctcccaagttcacgccattctcctgcctcagcctcccaagtagctgggactacaggtgtgtgccacctcgtccagctaattttttgtatttttagtacagacagggtttcaccatgttagcaaggatggtctcaatctcctgacctcgtgatctgcccgcctcggcctcccaaagtgctgggattacaggcgtgagccaccgtgcccagccctacatttttaaatgctagatatcaatgtcagatatagctgtgaaatattcattagattagaattttcactattttcttttatccttgaaatatttattgagtacttactaaaaacaaggtttctgttttcgacaaagcaatttctgacagcagctacgttttcctccttctctaactaaaagtcaacctctatttttgtgttgtttttatttaatacggcactgcagaacaaagaggaaataatagtttttagagacagctactgtggcaacttttgaaagtgaaaaaaagtcatgtaattttccctacctacaaacaaaaggcagattagataatttggcaattttcctaagaaaacataggagaaaaatgctcttcggttcctggaatattttaattgttaaaatttaaatttggagtacaaaaatttacttacttccaagctgcctctctttattggattcaggactaataatttcttcagaagattttcacagtctgtggacatatagaagggaatacggtacttccctcgtaaaactcgctctcgcagttccttaataaaagtgaaagaaagcacttataactggtttttgacataatcatacttggggataaaacattaataaagaatttagctgatacctttaaattctggccatcgaaaggcaaggagccactgactaatgtatagagaatgacgcccagactccacacatccacttcaggcccatcatacttctttccttggaaaagctcgggagcagcatagggtgggcttccacaaaatgtgtccaatttgttmccaactgtaaattcattactaaaaccaaagtcagcaattttaatattcatatcaccatcaaggagaaggttttcagcctaagaggaaaataatagaaagaacaatgtaaaaagcctacataaaataaaaatatttgtaaaagagttttagcttccaaacttacatatctcttgcccctcatttctaaatgtagtatcaaatttagaagcccagtatggtacttcaatgcataactgttctgaattacatctacataagactaaattttaacactacataaggaaagctctctttatatgcatatatgcaactacttaagaaaggttatttaaaacctattttctttcataggttattttaaactcatttttttcctcacagtcagaaacatcctggaagcgtaccttaatatgacctactctaaagaacataatacgaatccatctgggacttaaaccaacatgattacccaaaggagctctattttaatagggtattgttggttaaagcaaggctcaaaggtatatctacagtaactgcctgtcagaggttctgtgactactaattcattcctttgttctctcttgtagaatgttttctcaacaaagtactgtttcagtaaaacatgaccaaaaaatacagcctccattatatcttgtctgttttaagcttctttttgctgttctaaaactagattctcttcttgatgtatattttacatagaaaacaatgaattttccacgttttgagatggttttccaaaatcctaaagcagaatcactcaaagacaatattttacatgtcccttttgtaaacagaagcaactcaataaaggacttgcttttgtacatgttttattttaaactctattacaatggatggatagactaacaaagtaataggttactttgtagatgtgttttatcaggttccaaaaagaaataaaatttgactaaaacaaaaatcagatttctctatattactggaaggtccaacaattataagagtcaagcactctgcccatcatctatctcttccctccctacccaccacaacctttcttttcttcttttttatggtatactagcttgggatatttgttttcattttattttggaaaatgcagatacacctagaacccaaaatatacaataaaaatagggtataatttatcacataaatactataaaagcacatatatttggaaaaatttatattagattgtcacatttttgaactgtgacaaaaccaggttatttttatgttctgatgtaaggggctggtcattgtaaatttctgcagctgtttgtgagcaagctggacttttttcagtctctctmaaaatgtctggatggatatcaaagtatccaagctgcctcagaagagaagagctgcaaggggttctgaggtctccttccaggaatgtacaggaaaactctctctattggactggagggaaaacacaaggttttgaacatgattattttttgcagatttttttcatataagaaatgagatgataaactgggagttaaacacagaagcaggggaacagttcttttctttctcattcatcatagaagtgattccccttaaaatagccaaggaaggaaaccaagaaatagaaaaatttggagcaacagaaaattcataagctctgaaaaatgaagctaaaatacagaattagacttgacttttgacaactgtttaggataatatattcaaatataacccaaactggtgatagtagttgataaaggtgatgaggaaaaaagtaaaacagaaaaataagagtcctatgtaagggacaatgcaaattaaatttggaagattagagaaaaaaggaaaaacaggtataaacattttagtccagggtgtttccactttcaacaaaatctatgtggcacaaccatttattgactaactacacatttcttattccaaagtatgctcatttgtactattatacacatttaatgttcataaaaatgttttacaactttccttagttctttgagctttaaggtagagtgtgaatactgtctcttacgtaagggaaacatgggtctgtgctctgactttgcttctgcctgaggtcccacacttttggctgggaacgaagttccatatctatgcatttaaaacaaactaattaatagtgaatcaaatcgtctaacttctaaagctagaaaacttatcactcatattttcttcatttgctcagtgaaaatattacctttcataaagttgctgtgagaatcaaaaactaactacttgtatagtgtccagcagcacagttaggcaataaaatagacagctctaatattattattaaatatatgttaataataacgatttttttttttaaaaaattacactcagaagcttaccttaagatcacggtgaacaatgtacttttgatgacaatactgtacagcagatacaatctggaataaacatttggataaaagagtcaaattattaaaaaaacrcaattttccccaataatcacctccaatttagataaattactaattcggatttcaaggtaatatttaataaatatgcaatgcttttagttcagaaaactatacacattaaagtsatgaaactttcactgttaaatgcagaaaatatggtaaagtaatattctcttgcgaaaatacaataaaatatttctttgtcagaggctgtgaagatttcatatggatcatttatagttctctgtttatgtgactgaatgtgtacaatttatagttttggccaaatggtttattatagtgttgaaataaaagctttggcacacatgaattagtattttaagataattgtctcaagttaaaaaagcaaaactctattctaggaattacatcaaatgtgttcaaggcatgtttctttagtgaggccaaatcactaagaacttaacaatgaggtatttagcaatatctatatttatctgttcatatataaagagaaaggaaaatgtttgagccttaaaaagaaacctgatcagcaacagaaaagagggaaaaatgaaattcaatcttaaacctgtcactaattcagtcaggtgaagtattctatgcctgtaacttgattttgtatgcagccataatttttaactatcacacagggctctttggagaaaaggactaaacaaggaggaacccaacagtttaaaggccaaaactatgagagaaatagattataaacaattctatgatagttctttattacataaaatacagaaatagaaagcatctgatagcaatcaattaagaactattttgtacatataattacatctgatgaatagaaggacagtcattttaatgtacatcagaacattcagttctgtggattcagttaaatataaaaacagtttgaatgttaggcatttacaaatggagacaaaaatgagatttttttaaaagtctaaaggtgatgtgaagtatgaccatgctaataggaatatgggtggaaaaaaaacttcaaagtacaagtaaactgatatttcagtattataaaattattctaatgtatattaaaatggtttgaagacagagaaaacatgaattcaaaacaaaatcatcaacacacaatgagtaatacacaattccatttaattcattttgattcaacagtttattgagtacctgctatgtgcaaggaaatgtgatggttgctaggcaaatacaaaaatgaatactaagtggactctgtccttaaggcgcttacaatctgattaagaagagaaaataaggtatatattctctatataccttgtattatggaggtatatattattatatatagaggtatatattattacctttctatatattgtatatagagaggtatatattattcccctataatacaaggtagaatcacagaactctaccttttatgagagaatcataaaaaataaagaataatttcagttggaaatgcttcctgaaggaggtgatatttggtctaagccatccttgaaggacagaaatattttaaaatgtggagatctggggatggggaggtgacgaaatgcattaatgacaagggaactgtgtatttgaaaagcaggtaggactcatgcctataatctcggcactttgggaagctgaagtgggaggatgatcgcttgaggccagaagttcaagaccaggccttggcaacacagtgagaccccgtctctacaaaaaataaaaatattagctaggtgtggtggtgtgcacctgtggtcccagctacacgggaggctgaggcaggaggatttcttgagcctaggaggtcgaggttgcagtatgccatgttcacaccactgcacaccaacctggataacagagtgagactctgtctcaaaaacaacaaacaaacaaacaaacagaccaaccgaccaaacaaacaaaataaaccccacaaaacyaaaccaaaccaaaaatcatttaaagaaaaggaggtggaaaaatggtgacagtgggagtcaaatcttgacaaataggttggtcaaagtcatgaattcaaaactaggcaggtactgcagaaccactagatgttcttgggcagggtgactgggaatgattataatcaatttgaagtatgattccccaaaatacagaaggttctaatgatgaaaatttgtagtattagttttcttaagcaatatgcttcaaaattctaatacccaattttcactgaattatgttcattagccaaaagatacatacatttatatgtatattttattagacatactatataggttatagtatgttcatattataagattatttcgtatcatgagtgccagaaatttgctgataattacattatcttttgttagtcacatgtttgtatgagccactgaaggtatgcaacagataataatttggttaccaaacatgatcagaggccatgcaactcatgtcagacagaatggtctctatgaaaacagttctataagtacttctggaatcaaacatttcctgagcctcaaagcatcaagaatgcaaagataattacaaagaatcctctgcattaagcatgtgttctccccaaattctatgaactctgagctatcagtcaaatgtggtagtttattatagtattaccacatttgcttagcagggaacaatttctgccatgaaagaagttctgccttctgactcaatgcaagaatccccctccacaagcccaatttttactgcattattttacagctagaccttcccatctcaaaccattctgtacttccataaataggatatcggaacttccctatgagccttctattaatggatcctgaaaacatgatttactgtcagctgggtactgacggtaagaccacacacatcagtgttttccattgaggtggagttatcacggttactttgcaattgttaatacttataagtggtagacttgatattgcaagaattgaatcaatattacgacttttttttttctgtaggctcaagtcttaagggatgtaaaagcattgtatgggcaatggctgctcagtggtcttaaactgcccaagtgtctttggtatttctaagagtaaggtcaaggatgtatatacatttattattgttgacacagtattaatacatacattctttcactgttaaaataaaaaagcaaataaaagtaaatgtatattcattaagtccataagagtttaaatcaaatccataaataaaagtaagctcctcaaaaataaatttaagtataaatttatctgtagtcaggtaactacaaaataatgtatgtgtgtgcatgtgtgtatgtatgtttacatatctctggtttgtaaaaatgtgagttagtaacttttttagttttgggaaaacatatatagatactaaatacatttaaaatttatagtaaataaatacattataaagaaaatatttgccattgttttacaatttatatagcattcatttggcactcagtctctgcaatgtaaagaatatgaagatgatttcaaaatattacagactttatttaaaaaaccaagccaattttagtaattatttgtatctctattaaaatacctatgtcccaacctcttatcctgctctcgctcaccagcaaagatggaaagctctttaaaatagcaggcatttccaacttctctaattccatatagtacccagtacaattttctacatctatcaaaaaataagtaaaactagctgccttaaaaaataagtagcaataatctttaaaatatacattaggattctaatgggaatatttaacgcaaattggaactttcttgctggtctgctactaacaaaagctactgtgactgatattaaatgaataatacttaaaacgatgtgtgtggctgggcacagtggctcacgcctataatcccagcactttgggaggccgatgtgggcagatcacctgaggtcaggagttcaagaccagcttggccaacatgctgaaaccccatctctactaaaaatacaaaaattagctgggcgtggtggtgtgtgcctgtaatcccagctacttgggaggctgaggtaggagaatcgcttgaacccaggaggcggaggttgcagcgagacaagatagcgccactgcactctagcctgggtgacagagcaagactctgtctcaaaaaaataaaataaaaataaaaaataaataaataaaataaatacatgtcgagggacattccaagaaggccgaacaggaagacctctggtctgcagctcccagcrtgatcatcccagaagacaggtgatttctatatttccaactgaggtacctggttcatctcactgggactggctggacagtgggtgcagcccacggagggcgagctgaagcagggcagggaggcacgaggggttggggtatttccctttcctagccaaaggaagccgtgacagactacctggaaaaacgggacactccccacccaaatactacgcttttcccaaggtcttagcaaccagcagacaaggtgattctctcccgtgcctggcttggcgggtcctacgcccacggagccttgctcaccgctagcacaacagtctgagattgatctgcgaggcagcagcctggctgggggaggggaatttgccaatgctgaggcttgagtaggtaaacaaagcagccaggaagcttgaactgggtggagcccaccgcagcccaacwaggcctactgcctctagactccatctctgtgggcagggcatggttgaacaaaaggcagcaggcaacttctgcagacttaaatgtccstgtctgacagctccgaagagagcagtggttctcccagcatggtgtttgagctctgaaaatggacagactgcctcctcaagtgggtccgtgacccycatgtagcctaactgggagacacctcccagtaggggctgacagacacctcatataggtggctgcccctctgggacgaagcttccagaggaaagatcaggcagcaatattctctgttctgtaatatttgctgttctgcagcctccactggtgatacccaggcaaacagggtctggagtggaactccagcaaactccaacagacctgcagctgaggaacctgactgttagaaggaaaactaacaaacagaaaggaatagcatcaacatcaaccaaaaggtcatctacataaaaacccccatctgtaggtcaccaacatcaaagaccaaaggtagataaaaccacaaagatggggagaaaccagagcggaaaagctgaaaattctaaaaatcagaayacctcttctcctccaaaggatcgcagctccttgccagcaacagaacaaagctggacggagaacgactttgacaagttgacagaagtaggcttcagaaggtctgtaataacaaacttctccaaactaaaggaggatgtttgaacccatcacaaggaagctaaaaaccctgaaaaaagattagacgaatggctaagtagaataaacagtgtagagaagaccttaaatgacctgatggagctgaaaaccatggtgcgagaacttcgtgatgcaagcacaagcttcaatagccgattcgatcaagtggaagaaaggctatcagtgactgaagatcaaattagtgaaataaagcgagaagataaggttagagaaaaaagagtagaaagaaatgaacaaagcctccaagaaatacgggaktgtgtgaaaacaccaaatctacatttcactggtgtacctgaaagtgacagggagaatggaaccaagttggaaaacactctttaggatattatccaggagaacttccccaacctagcaaggcaggccaacattcaaattcaggaaatacagagaacatccaaagatactccttgagaagaacaaccccaagacacataattgtcagattcaccaaggttgaaatgaaggaaaaagtgttaaggggagccagagagaaaggttgagttacctacaaagggaagcccatcagactaacagaggatctcttggcacaaaccttacaagctagaagaaagtgggggccaatattcaacattcttaaagaattttcaacccagaatttcatattcagccaaactaagcttcataagtgaaggagaaataaaatcctttacagacaagcaaatgctgagagattttgtcaccaccaggcctgccttacaatagctcctgaaggaagcagtaaacatggaaagaaacaactggtaccagccactacaaaaacatgccacattgtaaagaccatcgatgctatgaagaaactgcatcaattattgggcaaaataaccagcaaacgttgtaatgacaggagcaaattcacacctaacaatattaacctgaaatgtaaatgggctaaatgccccaattaaaagacacagagtggcaaattggataaagagtcaagacccatcagtgtgctgtattcaggaracccatctcatgtgcagagacacacataggctcaaaataaagggatggaggaagatctaccaagcaaatggaaaacaaaaaaaagcaggggttgcaatcctagtctctgataaaacaaactttaaactgacaaagatcaaaagagacaaagaaggccattacataatggtaaagggatcaattcaacaagaagagctaactatcctaaatatatattcatccaatacaggagcacccagattcataaagcaagtccttacagacctacaaagagacttaagactcccacacaataataatgggagactttaacaccccactgtcaatattagacagatcaatgagacaggttaacaaggatatccaggacttgaactcagctctgcatcaagcagacctaacagacatctacagaactctccaccccaaatcaacagaatatacattcttctcagcatcactttgcacttattccaaaaccgtccacatacttggaagtaaagcactcctcagcaaatgtaaaagaacagaaatcacaacaaactgtctctcagaccacagtgcaatcaaattagaactcaggattaagaaactcactcaaaaccgcacaactacatgggaactgaacaacctgctcctgaatgactattgggtgaataacaaaatgaaggcagaaataaagatgttctttgaaaccaatgagaacaaagacacaacataccagaatctctgggacacatttaaagcagtgtgtagagggaatgtgtagcactaaatgcccacaagagaaagcatgaaagatctaaaatcgacaccctaacctcacaattaaaagaactagagaagcaagaggaaacactttcaaaagctagcagaaggcaagaaataactaagatcagagcaggattgaaggagattgagacataaaaaaacccttcaaaaaaatcaatgaatccaggagctggttttttgaaaagatcaacaaaattgatagaccagtagcaagactaataaagaagaaaagagagaagaatcaaatagatgccataaaaaatgataaaggggatatcaccattgatcccacagaaatgcaaactaccatcagagaatactataaacacctctatgcaaataaaccagaaaatctagaagaaatggataaattcctggacacatacactcttccaagactaaacgaggagtacgttgaatctctgaatagaccaataacaggctctgaaattgaggcaataattaatagcctagcaaccaaaaaaagtccgggaccagatggattaacagccaaattctaccagaggtacaaagaggagctggtaccattccttctgaaactattccaatcaatagaaaaagagggaatcctccctaactcattttatgaggccaacatcatcctgataccaaagcctggcagagacacaacaaacaaagagaattttagaccaatatccctgaagaacatcaatgcaaaaatcctcaataaaatactggcaaaccaaatccagcagcacatcaaaaggcttatccaccacaatgcagtcagcttcatccctgggatgcaaggccagttcaatatacgcaaatcaataaacgtaatccatcacataaacaacaaacaatgaaaaccacgattatctcaatagatgcagaaaaggcctttgacaaaattcaacagcccttcatgctaaaaactctcgataaaccaggtattgatggaacgtatctcaaaataataagagctatttatgacaaacccacagccaatatcatcatactgaatgggcaaaaactggaagcattccccatactcaatgggcaaaaactggaagcattccctttgaaaaccggcacacgacagggatgtcctctcaccactcctattcaacatagtgttggaagttctggccagggcaatcaggcaagaaaaaaaaataaagggtgttcaattaggaaatgaggaagtcaagaggtccctgtttgcagatgacatgattgtaaatttagaaaatcccatcatctcagcccaaaatctccttaagctgatragcaacttcagcaaagtatcaggatacaaaatgaatgtgcaaaaaatcacaagcattcctatacaccaataacagacaaacagagagccaaatcatgaatgaactctcattcacaattgctacaaagagaataaaatacctaggaatccaacttacaagggrcgtgaaggacctcttcaaggagaacaacaaaccactgctcaacgaaataaaagaggacacaaacaaatggaagaatattccatgctcacggataggaagaatcaatattgtgaaaatggctatgctacccaaggtaatttatagattcaatgccatccccatcaagctaccaataactttcttcacagaatttgaaaaaactactttaaaattcatatggaaccaaaaaagagcctgcattgtgaagacaatcctaagcaaaaagaacaaacctggaggcatcatgctacctgatttcagactatactacaaggctacartaactgaaagagcatggtactggtaccaaaacagaaatacagaccaatggaacagaacagaggcctcagaaataatgccgcacatctacaaccatctgatctttgacaaacctgacaaaaacaagaaatggggaaaggattccctatttaataaatggtgctgggaaaactggctagccatatgtagaaagctgaaactggatcccttccttacaccttacacaaaaattgaagatggattaaagacttaaatgctagacctaaaaccataaaagccctagaagaaaatctaggcaataccattaaggacataggcatgggcaaggacttcatgactaaaacaccaaaagcaatggcaacaaaagccaaaatagacaaattaggatctaattaaactaaaaagcttctgcacggcaaaagaaactaccatcagagtgaacaggcaacctacagaatgggagaaaagttttgcaatctacccatctgacaaagggctaatatccagaacctacaaagaactcacagaaatttacaagaaaaaaacaaacaaccccatcaaaaagtgggcaaaggatatgaacagacacttctcaaaacaagacatctatgcagccaacagacacatgaaaaaatgctcaacatcactggtaatcagagaaatgcaaatcaaaaccacaatgagataccatctcacgccagttagaatggttaaaatggcaatcattaaaaaggcaggaaacaacagatgctggagaggatgtggagaaataggaacgcttttacactgtgggtgggagtgtaaattagttcaatcattgtggaaaacagtgtggcaattcctcaaggatctagaactagaactaccatttgacccagcaatcccattactgggtatatacccaaaggattataaatcatgctactataaagacacatgcacacatatgtttattgtggcactattcacaacagcaaagacttggaaccaacccaaatgtccatcaatgatagactggattaagaaaatgtggcacatatacaccatggaatactacgcagccataaaaaaggataagtttctgtcctttgcagggacgtggataaagctggaaaccgtcattctcagcaaactatcacaaggacagaaaaccaaacaccacatgttctcactcataggtgggaattgaacaatgagatcacttggacacagggcagggaacatcacacactggggcctgtcgtggggtggggggctgggggagggatagcattagagaaatacctaatgtaaatgatgagttgatgggtgcagcaaaccaatatggcacatgtatacctatgtatcaaacctgcatgttgtgcacatgtaccctgaaacttaaagtataatttaaaaaaggaagaaaaataaaataaaataaaataaaataaaataaataaaaatttaaaaaaatgatgtgtgtaatactttatttaagggtaagcttgaacttccatcccaggatagaaaataatattacagtacgtggttgaatgccattcagtttcttaaagttgttttccttattactagttgtctttacattcagctattttaacacgaatatttctaggaatctatcacaaataaaagtgctatgcatacctttggtataaagcatttcacaaattgtgttccaaaaagcaataattctgtgaaacattaataacagaggtttcacaaaacaaacacactcatttcatggtcaatttggagaatgccatgttacaacaagttaaacaggctttttcctcccctccctttcaggacttctctatttgtttaacatgttaacacacacatatgtatcttagagaaagatcttatatcagtatttggtcttttccgaacatactgattacagaacctctttaattgtagaattaaagtgttcatgcaggcagaagaggtagcgagccatttttaaaattctaaatttaataaaagtttaggatatagtaaattatccacttaaactttagtaaattttatgaacaatttacaatttacaattcactaatttgctatttctatggtaacttatatgtatgcttacaatttacaattcactaatttgctatttatatggtaacttatatgtatgcttatttcaatcacttcagttctaaaaattaaaaataaaattctagataaatttattttttcttattttatcatttctgtaataagtcatattcaagttgaactggaaatatgagtatcttaccatattcctctgccacaatttggagtttcttgcctacttggttaaaataaaattgaccatattctttaaatctacaaaaatgagtttaaacaccaaaacatctttaattaaaaaaatataatacaataaactctttaaacagtacacatatatgctgtatatataaagccagtaataatttataataattattggataaagacttcaaagggttaactaatttttttctatctcagtctagtctacgtttccaggactctcagagagtcttaataaggtgagtctcatctataaatatttattctttatgacaatctgaaaataaccatctgcaactatttaaatttaaattcagaaaggtttattttttaggagttttccatccttaaaaatataagaaagcaggaattcttctttttaaaataccatgtgctgtgaagtccagtttgtaatactgtccattgtacatcgctacaattatcagcaaaacaaagttgaaaactactttccatacctgcctaaattttgcacgggcctctttctctttcattcttccatgggcaactaagtaatcaaatacttcacctgaatcagaaaggtaaagcaggtagtaaaatatacatagatttttggttaacaatatatgcaatgtcaagttttttccttgtttataaagaaacttttggcccacaattttctgctagtttatgtaagttacaaactaacacatgaatagaaaaaaggaaaaaattacatataaaattgagtatctgtagcagtttgtgatttagcaaaactctttaaaaaataagtcataaaaacacaaccaagaaaacttgctttctgctttcaagtattatgtaaaaatacagtcaactctttattatacattctagtaaagggaagccacagcctggtcaatcaaaaattacatttggctttgtatttggggcctacgtttcaaacaaaatgatgaagtgtgttttgttggaytgctcttttaaattctccctgtcatgtagtctggataaaattccatctcactacttccatccacattgatttatttctttcctttcctatactctgtgtttattctcactctactcatttcatacattctagtagtcagccacaaattatacagaattaaatcatttgtgtgtgtatctctaataccccagctgaactgtaaattacttgaaaatcatcataatatctgtacttaatttgcatcttcatcttcatggcagaacacgaagtggatagataaatgtttggtgaaataatttaaaaagaactagaagctgtataaattttctactggatccattactttacatgtctgtaagtttttctcctttttctctagttagtaatagcttaaaactaaattaaacttgagttacaattttaaaaataaaatattatcttagtataaggattaaatttatttttgtgtccttataatttgtaccagatagatatacatgtatattaaaaactcacaaaatggcttaaagtgttcttgtaaagtatagcaaagtggtaaaaacaaaaaaactcagactttagaatcagaccaattttggtatgaattttgttttagccctaagtactactgaaagacattattaggaagatttcttaacttcattaagactcagtttctacctactgtctactcacatggttgttgtaaggattaaatgaaataatgcatgtgcttagcacagcgactggcatatagtaagcactcaataaattgcatttttgtacctaggtatacagatatattacatatatatgcaatatcaatcctaggatataaataaaatattaaaaatcaaatacgtaatgaatgtatgtcacatgaaactaatacatctacaatgttagacagcatattatataatattaagcatacttaagtgattaaatgggatgatgagaacagagaaatgaatggatgctctagttgactcatcatagtagttaattctagmtatgtggtaatagttgttaattctagttaacccatcatagcagttaattctagatatstgagtttaggctaggaaagatatatacaagagttcaaaaaatttggatctactcttaagtgctgcctagaatacacttaccccaggtatttacatgacatagtcctgtacttatcatatattgtttgtgtatgatttacttccccaactagaatgtaagtgtcttgagggtagggactttgtctttgctcacttatgtattcccagcacctagaacattacctgacacatggtaagcattttataaatgttgtttgaaagaacaaaaggaagaataaacacatcattccacagtagtcctgaaacctacttttaataggctcctttggattaaacatggttcaaaataaaaaaaagatttctttgattttctaatcactgaaaattttcattccattagtgaaccagaatcaactcttggcaaagaggcagttgtctgacttaattcttattcacattacctttctagtgtacatgtcagatttgatcctaaactaagtagaaatttcagaggaaaaatatttagtgttttattttccagagtcaccttgccatttatggattaaaaaggcaagaaaatcattctagatttactgccacagaaccatgatggtttttgttacagaatcactaacttgcaaactcaaagaaaacctatcgcaggaatcaggatttaatgagactggctggtgtggtctgaattcctgtacccatttctctacactactccccactgtgcctcccaaatatgctactgaaggagagtggtgaaggccttacatactcttactctagccattactccccttcattagcaccaatagagagttgactgtacttaccattaaccattaagtcagtacacatattaatattaacaaagccttgcagtgggcctttataaaaagagaagggtgtctacagaattttagcagtctatgatttcccatatcaaagtgggtatagcccctttctctaaattttatatcactaaaaggaagaaaagagtctaactaaactaaaaataataattggggttcccatgagacagattattatagcaatctaactgaaggacataaaaatagagaaatagttcattatgtggtatctgtagattcattagttttattatagatccacattttatggaaatttacatggctgttttaatacaatttttaaaatcctatcataataaacattaatgatagattttcaagttaagtcaaagaacctacactgaaatatttttttcaggtgacaaaagttttgcaaaaaaaaaaaaaagactaaaatattcaatctgtataaacaactgcaaaagcaattaaatatattaacatctatagtagttttttagaaatatgaggccaggcgcggtggctaatgcctgtaatcccagcactttgggaggccaaggcaggcagatcacgaggtcaggagatcgagaccatcctggctaacacggtgaaaacccatctctactaaaaatacaaaaaaattagccgggcacggtggcaggcacctgtagtcccagctactcgggaggctggggcagcagaatggagtgaacctgggaggcgaagcttggagtgaacttgggaggcggagcttgcagtgaaccgagatcgtgccactgcactccagcctgggctacagggcaagactccgtctcaaaataaaaaaaaaaaaagaaaaagaaaagaaatacgagacagtataaatatagtttagttgctacagactagataaatcctttttattctagttcacataaaatctgaatcaccataaaaattataaatttcattaactaaaagagctcaatagtaagttcaacactaagtttttctattgattagcaaaaaatcaaycagccaaataatttcagctgccttctttcttcttcagttgcttaaatcctgagcccttaaaacctccctttaagtattctttatttttacttattaaatgattaattccataaattttcaacccatttctgagaaagtgaagtcctaagtctaaaagaaaagtgattctgagctgacacatttctcgtttaagggaaagtgcaggagatgaagatgattttctatcacatatcagtgtttcaaaatcattcctatttttgacaccatgatagttaaaacatatgtgatattctactacaaatgcatcttgctatctccctgtcaactcagtcctctaacatataaaatgtacagatcaatacttgtttaaattgaaatatttaattcactttatgaattatcttggaaatgtatgtataytgagaatctgycatatgtgaacaatcagtgaaataaacactgacctagaacaagcttttattatagattttattaaatacattctgtacttgagattccctgctgatagccaagagtttctaatcatgatatgatatagtaaaatttagataagagaatcaatacatttataagatgaaaatacaaatttaacgtttcaaaaaatgtccctaagtaaaatgtaaataagccaaaaattccatttataatgtaagatcgaaaggtcttaaaagtaaacactgaattttccttaagatgtaatttaaaggcatttagataaaacaatagattcattaacactgaagacataaatgtcataatgaactcttaggtgttaacatttctgtatgtctcagcaaagagaacttttcaatcaccctcattcttacccccactcgcgtattccatgactaaatagagagtcttctctgtttcaataacttcaaacaattttactgaaaaaaaattagagatataactctataactgttagcacagattgaatatgctttaagaaaatctaaggtaacactaaactagtagaaaatttgactacttgctaaacattattaatcacaattttaagttcaaaaagtctctcaaagattattactcctatgacagaaaactacttaccacaaagtgatttagaaccaacttcttgagttgaaaaagttaagtttctaggattaaaaggycattactttttcaaattagaataaggtaataaaaggaactcttaaaatcagaaaaacagaatttaaactgaagtttaaaaagagactatgttacattacagtgagacatcaaaaaatgctaaataatctttggtacagaaacaaaagaatttctgtatttctgtgatattatgaaagtttctggttagaaaaattaccaaattatcaaatttatgtagttcaaatattcaccacaaataaatactttaacaactatatacagataagatttttaaatgtgcaaaaaaaagtgttttaaaaaacagattttaaaaagaattttacttgtcacaatcaaatgatttcatataataatatatctaatcaatacgtttatttgcaaagggggagaaatcagaacttactgaaaaattttactaaaattgaaatcaactttttattttctttaaaacgcaaagttattttgcctgtaaacctatgatcaaacccaagtgcatagtatcaaaatatctgaaagccattttttttttatagatacctaaatgacctgcaatatctatttagagacttttttttgagacagggtctcactctgttgtctaggctggagtgcagtggtgcgatcttggctcgctgcaacctccacctcccaggctcaagcaatcctcccacctcatcctcctgagtagctgggcctacaggtgcgcaccatcactcctggctaatttttgtatttttttgccgtgttgcccagggtggtctcaaactcctgaactcgggcaatccacctgcctcagcctcccaaagtgctgggattacaggcataagccaccacgcccggccagaaagacatttttttttaaatttagaaacatttaattaggaaattaaaaaaaattgtatgcattaattctgaatgatatcaattattttagtggagagcagaagatagcaaggtagcagaaaacagcaatctgtagcctccagttagcttctttgtaatckatttttacccaaagtatcacttcctggggttatcactcaggttatcacttttcttctgcytaaataaactatccttaaacattgtgtcttttcaaataccctcaaattaaggaaaacacttcatcgctaattawatatatatatatatatataatatatatatmtttcatacctatattaggatgattcagtatcttcattattcgtacttctcgaaataactgttaaagaaaacaggtagatatatttctgttaaaaaaaaacaagcaagcagagagccaattaaaatatttatttgaagaaattaatctgcttacaaaatgctacaggattctggcaatgcattgaaacaagatattttctcagtcccaactctgtacaaacaagctatgttaacttagactgtgacattaacttcgctgtgacttggtttctaaaagaattttaagtagatgaactcaaatgatctgtgtgtgtctgtggtgtgaatacactatacacagtaaaacttacaattatttaaccattccttatgaaaagctacagaagaaaaacactgaaaatgaaactaaatgctccttcatatgatttttacccagaaaccaccttccttaggggtttgactctttaaagtcatctcttctgactgatcagacattttaatgaaagattcagtaaggtttttaggtagatttgtagaataacattaaagaacaataaaaacacatttactaatttatataaaaacaaaatgacaagaagcgacttgaaacacaaatgttaaaattttcctccttttcattttactttttaaacaatayagggcacatttttcaaaagcataatttggtattattttctctatgtctttgagtatatgttagcttccaaataaagcaatttgttcaagaaaataggagaaccaaaaattggtgatattctgaaagtatattaagacatatgcattttatcagaataaaatctaaagttactactttcagaggtgacatttctgcagcaaagatacacaatagtcaaaagaacacaaaaagatgttgaacattattaatcattatggaaatataaatcaaagccacaaagaggtaccacctcacacctattaggatgactgctatcaaaaaacaacccccaactctgcccagaaaatagcaaatgttggcggggatgtggagagactggaacagttctgcagtattgatgggaatgacaaacgataaagcctccatgaaaaaaaatacatagcagttcctaaagaaattaaaaacagaattaccatatgatttagtaattctacttctgggtatatgtcatatacccaaagaattgaaagcagagactcaagcagatactagtacacccatgttcatagtagcattattcacaatagccccgcaaccagagtctatcaacagatgaagagataaacaaaatgtggtctatacaaacaatggaatattattcagccttaaaaaggaaggaaattctgacacatgatagatacaacatggataaaccttaagaacattaggctaactgaaataagccagtcacaaaagggcaaacactgtatgattatgcttatataaggtacctagagtggagtcgtcaaattcatagagatgtaaagtagaatgatggttgccaggggctggaaggatggggcactgggcgggttactgtttaatgagtacagagtttctgttttggaagacgaaaaacattctggagattgatggtgatgtttgaacaacaatgtaaatgcaccttaatgccactgaattgtatacttaaaatggttaaaatggtaagttttgttaggtatattttaccacaatttaaggaaagaaataaaatgtgcaaaaatgaatcaataaatgttcaccccaattaaaacaaaatgacttaaggcttacctcctacaaaaaagcttgctttccctagctattctcaataattcctacataaacccagggagtctgtatgtgtgcatatgtatattcatataaataaatttttataaagtccatgatacttacaactttaataattaaaaattacctatcagtaaataaaatataaaggtggattcattcatgttcaagacaagtactttctgtaactttgaaacacattttcatttcaaatttgggacaaagagcatacgggttaacctctcagtacacagggtcttcagtacacttgagatcatctcttgctctggctctgacagtacatcttcctgaccatcctcctgcctaaatgacccctctcagtcttccactaaacctctccccttctactcaacctttaaacatggaggtcctcagggttcagcccttagccccctttatcttctcactctacatgtttctcctaatgatttatcatggcttcaaatatcatcgatttgttgctgactactaaatttaactttatcatcccaacatttatatccaatccatatatacctactcaatattttcacttggctgtctcacagaaattcaaacccaatacttgatttctcacatcaaatttgatactggttttccccagctccatatgtctgtcaagcaccctaataactgaaactttaggatcatccttaacaacaccatctcttgaaatttctacatcgatgcatcattaagacatttttactcacctccacagtttatctcaaatccatcaacgtctacccatccatattgacactactgtcacactgaatctcactggtcttggtacaaccattctgactctcttttctaccttcccatcctccaacctgttatccacacatcttttctatcctcccatcctccaatccgttatctactacttaacatccactggtggtttctcaatgctattagaactaaacccctaatcttgaacactggctaccagactctagaaaaaaatcaagatcctatttacctctctagccttatctcatgactctcaagtgcctactctgagcctcgtctgctctacctttgtgctccacagtcctaatggcccctttgagctccaagtcactgtaactgatgattttgctattgcagccttggacaatgggagtcagccttcactcagaagcgttcctcagagttttgaactcttcacctcccaaacagggctaacaggttttaaaaagctattagctattagcrtgctactgattgcttgtcaaaactgagcatctgacccacagagggacagctgcattcactgaccaaattgccttactcaggtatgtgaaccaggaaaagtcaaagtagcaccagaagtcattttatatacatatacatacatacatatacatatctatgatacacataaacataatagactttatttttatagcagttttaggttcacagcaaaattgagcaggaagtacaaacagtttccatatactccctgtccccacatatgcagagcctcccccaccatcaacatcccaaaccagagaggtacatttgttataatcgatggagctacacatcattatcactggaagttcacatttacattactgttcactcttgctactactatacattctatgggtttagacatgtacccatcattttagtattacatagactaatactaacactgctctgaaaaatgtgttccacctgttcatccctcccttttccctaacctctggcaaccattgatctttttattgtcaccagttttgccttttccagaatgtcacatacttgaaatcatacagcatgtagccttttcagattggcttttacatagtaatacacatttaaggttcctccaagttttttcgtagcttgatagctcatttccctttagtgctaaattatattctgctgtctggatgtaccattggttattcatccattcacctactgaaggacgtcttggttgcttccaagttatgaccattatgactaaagctgctatataaacatccatgtgcaagtttctgtgtggacgtaagttttcagcttccttgggtaaataccaaggaatgcaactgctggatcatatggtaagatatgtgtagttttgtaagaaactgccaaactctcttctaaagtggctgtaccatttgcatttccgccagcaacaaatgagagttcctgttgctccacaaacttgccagcatttggtgctgtgttttggacttctgctattctaataggtatgtagcagtatctcactattgttttaattatcatttctctgatgacatatgatgtggagtatcttttcatatgcttatttgccatctatataatttctttgatgaggtgtctgttcagatccttcacctatgtgttaatcaagttgttcattttcaagccttttcaagccaatttttgagaagcctgctccaatcctcaacaataccagatgcctgtggacagtaggaaatgtagaatgttcattaaatatcttgttgattctaatttgtcacatcagagaaagggtccttaccgtgggcagtcctggaggtcctgggcagagggagccagaagtcatattccctcaattcctcctcaggggtctcagggaggtgtgggccttggtctgagtggcgtgccctcaggtcagcagaggagaatgtgcctggaatctgggtgattatccagagtgagkgctgagggggcctctcactctgacacagaaaggatgccacccctgcctgggcctacccaggactgacaacagaaatggagctccatggggtcccttggtctgagcaggtagtcccctcagaacacattcagggtttttaccttggcttctgactccacctgagcctcctctctgcctacctaacccgccccagactcacctccctgagaaccccaaagagaaacaagggggcacctcatcaggtgaccactgcccagagactcccaggctgacagtaggggtggggctctgtgggttagatttgcagaggatctaggcttcttatttcaacctattttttttcttactgtggcacatgagcagataaaattcacaagtaatatgagcagacaagattcacatatagctataaaaccaaaattcacaaatctgatgattctaggttttaatgtaaccaagtaattttttccagaaagtcaagtcaaatacggtagcttattatttgatgactttcataaaatcattttatgagcactgagtagtaaaatcagccatttaaacatttagaagtcattttataagaaaaaatgcttaagtgtaactgaggtaattttaaaaattgaacataattttttaaaaatagtgttccccaagcctccgagaacatattataaagaataaatacaaacagtacttattttggttttgctataagatatagattttaaagtttatgaacttgttattaatataagtagcattattatgtttcatttgtaatttatttgtattattgctattatatatctctaacagaaaagtccctggcatcagtcttgctctcctacactcatatagaatatctaaatgaattactgcttctactttcttcatctattcttgctttcttgttaaaattttatttatttgttaagctgtaggaaatgacttaaaaaatcacaactcagcatttcagtatatcagacatctttgtaactggcctctactaactaacctgccaacctttgctctgcattccctctgcaacacacagtgagtgacatctgtgcacccataatgctcttggctagtggtgctccctgcagccttacactccaagcagttgagaatcatgcttaccagaggttatctaggtcccaaacatgtttgccagttgcagttaccactggaaatagtttatatattaatttcctattgatgagtaacaaagtaccataccctagcaatttacaacatacatttgtcgctttgcagtttctgcggctcagtattccaagcctgacttaactgggtcttctgctcaggtctcgtaaggctgcaatcaacgtgttgtccaggatggttctcatctggatacttgactagggaggaatctacttctgagctaacccaggttactggcagaattcatttctttttagctgttagtactgaggaccctggcttcttggtggctgtcagctaggggccacccttacctcttagagactgtacataggtccttgccaagtggacttctccaacatggctatttactttcttaagccagcaagtatagtctctagagcaagtctgctagcaagatagwataatataatataatataatataatataatataatataatataatatgatataatcatgacagtgaaattccatcaccttttccctattgcattggttagaagcaagtcataggtcctgttcacaatcaaggggaagggattatgcaaaagtgtgaacatcagaaggcaagaatcatgggggttgcytcaaagtctgtccaatacaaattttacataaaccaatgaagtacatgtttgttgtttgacaaaacaaaccaaattgaatactttggaaatactagataaaagytgctagactgctgtccagctaggtgtgggcaagataaatgcaaaagactggaataaaatctaggcttctgctctgattgctgcccgagtgtcattcaattctctcattaattaaaacaaaacaaaactggaaatagtaggaagggtattatgagcttatgagtgtgatctgtacaaggtaaataaagcagaatgacaattggcagaaccaaactcaaaaaataaataaataaataaaaagctttggccctacatgaaaagattcatcaatgcatatacatttgtgtgtacaatagaagtgttaaatgtttatataacttttaataattcctcactttaacctgcttttttcaattaacagctccttactgcactatgaaagagggcttttacttgtactctctaattggcacaggcatttcctgtgtactaggaagtgtggcccattaagctacaacatgaataagccatgctggtttctgggttctaactcctcttctttctcttgtcttgacaaagtacatcaaattacagwatactgaagacaacactgtcatatgaataatcttgaatttactccagttactttttatgaaattactggcaaatttggtagttttctcttagaatcggctgggacatatctcaaaactaacagaaacatactgatgtttcctggcagctccatgtttcagaacaactaatctaaagaaatagactggcagcaaattcttcaggaattcctccaaaagtattggggtgtttttttatttaattatttcttaagttgggtttttgactgcaattagttcataaattcaatccctgactggtacctggaatgcagttattccgttctacaaagaacagacatgagctgagggacaggattaaaatcattttgtgaaaactggggcatccataacaaaaacaacacctaaacagaaggtcactccacttccatctgaagaagcaagaaaaagacgtgtaggcagggccaaagttctaatcagaactttaactggaatttttaattccaataaaacaacaatacacagccattgggttcctatatctcaaagatgtcttgagtatattgtttaatccttagtttcctctccttcagcagytttggacaaggagagagaaaaaaacataagcgataacaagaagatgtgcgtgggtttgggtgtgtgttgactaaaaatgataggcasttgtcgaagaatggttgctgtaagaaggaacattaggatgttttacatggtatattgagtaaggataatggaataccagattcctattccatcaagcatctctcctcacaaagaaacacttgaattgtcagctggatttggatccctgttatgaaatgaactgtgcccccctaaattcatatgttgaatccctaatgcccartgtgactatacttggagacagggaattcaaggagctaatgaaggttaaataaggtcagaagagtggggttccaatccaatatgactggtgtcctaaaaagagggagaaatgtcagggatgaactagtcatgtgcaggccaaggagagagaactcaggagaaaccaaacctgcctacacaccttcatcttgaatttccagactctagaaaggtgagaaaatttctgttaagtcacccagtctgtggtattttgtgatggcccgactagcagactaatatgataaccctccaaatctagagaattttggccaattgaaaagtaccacatcttaagcaaatgtctaagatatctcttcctctccaagactcccctmaacccctgcctaactctttattttccagctggctgcatgaaagaaagagaccgaagctaatggcagagttttctgcatgagctgcatgaggcaaaaggaagcagggagagggagaggaagagccacatatacatatgtgatcttttaacccagagcagatcctcatcagcaaggtgccaatcttcacacttctttgggtcagtggagagagctgagtaggcatttagactatgaaaagaagtttactttgaaacagagttattctttaaaaagttaattattgcatgtgtcatacactccaggtacaagtataaaaaatagaggtaattttaagaacagcagtgccatgctactatttgagtttctgatgttaattttcagttctttttctttctcattttcaaactgtgatgtcacacaatgttgctagcaaatgtaaatttagtaaaagagctctgaatttactattccccttcaaatttactgtttcaggtttgctgtaggctggaaattaaggccagagtttgctagacttgtgtgttaaattaggaaaataagccaggagtgaaggcctgagatatgtcttctatatcacagctattctagttgttcagaggyctttgtttccttcttggttcttggctttgttccagataactaaagtagtaaacaatcttcaattctttggagatatttacttttcaattgggtctttcctggctagagcttaggtcagggttagccaaactccattagtgtcaatcaatatttccctcaattatgtgcattttccttttctcttctcaactgctctttgttccttcctatctcttccattcctctgctagcactctttttgtgatgatgaaaaagtctgtcatttttagaactagccaactggacatggcttagacaatcgtcattctagttacacccaaagtgtcatagtcaggggccaaatgcacatggttttctctccatcagacctgctcaccagtctgacraagttgcccttggtctcatcaatgtcacaggacttcgccatcgcttgcttgatcttgaggcagaaggagcacattgtggtcattgggagcttgacaaaggcagtggttcagcttgttcctcctgagagagttctttcaggctgtcttcagagtcacagtaaactgggctagtagaaggctggcatacagttcttgtgccttacaacatagccttcttcacctttcaaggattttgctctgatttgggtttcaggagggataggaacccttctttgtcttcactgcaatctttataaaacttctgtctgtatatttgacagtttactggcctattaatatgaagtgtgggtgtggttttaccctgaaggtgacatgcagttccaagagactgctaggtccttgtctagactatctcataagtgccatttattgagggattatgtatatatatattttatctatgttaacagaatcctacagattaaactttcagctttttaaattctaggatcatcatgtcatttcctttttagcttttagacatctcattgggatgtcaagtattttgtaaaattattgctagcagcactrtaacaatttaagctaacttcttaaggtcttcctatgaaatcgtagcacagaaagagatctgaatataattaaatgaatatatattagatgatttataactacaacagtaaaataattattcagtatttctttataaacttgataacttgcagccaattattcattgcaaagtaatagaaggaaatattctataaatgatagcctgtgtcagtttcccaaagttttgtcttcacataggtagattataagattcttataagaagattataagtcttataatttcttatgaactagtaccaatttcacattacttgaatctctcctaagatcctgcacagctttgggtataagttggtgctcagtaaaagtaattgttggagatatgaagttaaataatttcagaaagaagatattaaacttaaaagcagcctaaatttgaaaagatggccaatctcattagaaatcatggaaattaaaactaaaactagatacaacttcacacccataaggttggcaaaaattttaaaacatggtaatataaagtgttggcaagaatgtggagcaacagtaaatctcatacagtgttggcttaagtaaaaatcggtacaactacactggagagcaatttgacattatctagtaaagttgaggctatgcatgcccttcaacccagcaattctacttgaagagagacatccctctatacatcttctcaaaaagatatacacaataatggtcattcattatctgtatagtaaaaacaaatagttaactagaaaaacaaaataaaatacatagaacaataaaatccactaacaggaaaataaatagatatagtatattaaggagaaaatggataaactatgcatggcatattcatacaatgggatctaacaatagcaataaaaaataaatgaacaaggccgggcacggtggctcatgcctgtaatcccagcactttgggaggctgaggcaggtggatcacctgaggtcaggagttcaagaccagcctggccaacatggtgaaaccctgtctctactaaaaatacaaaaaattagctgggcttggtggcgggcacctgtaatcccagctacttgggaggctaaggcaggagaatcacctgaacccaggaagtggaggttgcagtgagcagagatcacgccattgcactccagtctgggcaacaagagtgaaactccgtccaaaaaaagaaagaaagaaagacagagagagagacagagagagagagagagagaaagaaagagagagagagggagggagggagggaggaaggaaggaaggaaggaaggaaagaaggaaggaaggaaggaaaggagagactatatagttagcatgaataaactataagacaatgttaaatgaaaaaatctgattacagaaagataggaaattttaaaataactaatatactgtattttaagtacaatcatatgtaaaaaaaagtttttaaaaatttaagtgggaataagaaagatcaaattcagaatagtggttatttctaggtaggaaagacaagactggaaccaagaaatgacacatgggtcttcaattatagctgtgatgttttatttctttaaaaacaagattagaacaaaacattttagtgcaataaataaatatcatgagaaagcaacttttttaaaatgggaaagacattttgaagtccccatccaaaaattaaaaatagactagtttattatatcaacaaactgccaagcttagaaaaacatgaaaatacgatgcttaaaataactaaataagaaaataagactgtgacttttaaaacagccagatagttagtctaaacttcataggtgacttaaagactctaagcctccttcatttccctcaagagaaaattcttccacattgatttcagtatatcttaagtagcttcttgagaacatagaaatggatgctttgcagctattaaaaaccaagcaattaggacagaggtttttggagttagaggtagaatacaggcattaaaacaaaaacatcagaaacaaaaagtgtcaacaaacaaatcaacaaacgactaccaaaaccaaaacaaataaaaataaagtggttatttataaataatccttggttatgagtgcttgattttatggagggtaagtggatttaacactgttaggggaataggaaaggtttccctgaagaagtgactctaggctgaaatgggaggaatgagtaaggactaattaagggaagaggggagataagccttacccagaaggtgggagaaagttgcaaaggcctggtaactggaatagagtatgaataggagcagatgaaaatcactaaagctgtaggagtcggggaagaggagagtgaagagaagctacggcgagttcatggtccatgaggtggaaaaggaagkkaggacctttataccatgttaatgaatttgatttttggactacaaacaataaaacgccatctgaaagcttaaacaaagggatagcatattcacagacgtattttgcatccttgacaacttttaaactctatgtattacattttaaactctctctctctsgcgcgcgcgcgcgcgtgcktsygtgtgtgtgtgtgtgtgtgtgtgtatacgtatgtaaagtggatgcagttggaaggctacaagaagataacagtgactttgtctaaactggtcatgatagagaaagataaaagcagacattttcaaaagagatacaagaaataaaatcagcaagaaaattcccaagtcacaatcatagattgactgggaaaatgaataagcattaggtaatgtttcaggtaattctcaagacattcagagtgattactgaatctaaccttaaagagatatttctccccgaagattatgtatggctgtgaaattctaggttgttgagcttactaaactcaaaacgtgaaagactggaagttttaatttgagggatattagcaaatagatttttgacatactctttggatatgcttgctctggaagatatttttcatatttggatgcacatctgtatgttaaaaatgcccaattatatgtcattgagccctttccccagtaattaaagagggctaacaaggtttagaaaagtcagatttttggtcactaaactgcacagtttgtttttctcagcaaatctgatgatcacatcctcaacatttaaactgttgatattttagccagatattaatattattggtatcacctttaaaacacttgtttaaacacctttccctcaaaatcctcatatttcagtgtgaaaagtatacttcccaccaattcttcctatgattttatgttatactctgttttcagtactttgtccaaaaccaaatcaaaattaaaagcattttgctgaccactaatttcatggagagtgaaacagtgggtaactggctattaggcataatcttatttattcacatggcagaattattccttgcagaatatccccacctttaaccctcaaaaaagctctaggggtatttcatcattattggttaaaagataacttatgcagtctacatatcatttcacaaaataataattctcttatcacttatgtttttgttggcccacgtaagaactggccaaattgttccttcaaatgatccacacatgtgacaagaactgtatgaaagaagtactcagcacataagtggttttgttcagctatagagtgaaatatgctatatagcatgtatatgtgagagtagctgatatttcaatatatgtccaatagtgacatttgttaaggaatatttccaaagagcttcttgtgctctctccttgataaaaatatttgtcaataattttgtgattggttttgcaagtttggtttctgataatttgctaaaatatattgaattctgaatattgctcccatggttctgttctcctctctacctttagttaccaaattcttcaacatgacaaagattattttgcagataatctggaaaacttaattagcttaccagagaggtctctgggctttatttaaaaactcacaaaagtttaatggcttaggccaccatttgacaacattttatataacaggtaacacaccagacacgagcggtaacttgattattcatttaataaagtytaattttcagaattcaataatttaaatgttttacccttttcctgtttgtgtaaaatcactgtcctagcaaagcgattcacattctataaaactttagcgcagcagtcatctattatataatgacataattctgagttgtactaagtcttgtttttattttcattacagattttactacttaggaaatcacttctgaaccacttagccacttttgtgaatacgcaacataatataacacagtaaaacaatagaaaatgtaaattaataagtaatacacagaagatacaaaaatgttagcagagataaactacactctggtgactgtaagctgagacagactgacacaaactttgtcatctttgcatcaattgatgtgtccaagtttcaaaactagtgatatctctgagaaaatgatcttacatttcaaatttatgaactatgaaaaatattattttattgtcttgcttttccttcaacattagtaggctgcttaaaagaaccccaggaggcagggtgcagtggctcacacctgtaatcccaacactttgggaggccgaggtgggtatatcacgaggtcaggagatcgagaccatcctggccaacatggtgaatcctcgtctctactaaaaatmcaaaaaaaaaaaaaaaaaaaaaaaattagccaggcatggtgcatgcacctgtagtcccatctactcaggaggctgagtcaggagaatcgcttgagcctgggaggtggaggttgcagtgagctcagatcgcgccactgcactccagcctgggcaacagagcaagactctgtctcaaaaaaaaaaaaagaacccaggaatcactagtatggttcatggaccctcttctaaaatacattattctatgaggtagaactaatgctttgaagaggaagaactaaaaatagcatctacctaaaatactttttaactatgaaaactcattgaattggattccattaattcaaaatatgtaatacaaataatatgagcatattatgggaacaatattgaagccaaagatacttaacaattccaaaaaccaaacacgtttaagaactttgtattttggcagtattaagcagttggtgtatcaactttagattcttttatctatcattgatgtttgcaaaggaaggcagtaattcctataaatatctgatacacagaagaggataaaggagagggatcagcttaaattcagatcaaaccagaacaaatttacccaaacacttctagaagtgagattacaatgaatccttatttcatataaatgtgcgataattacctgccttttatgagtatacctaagacatggaagcaaattttactgtctttttcaatgctagggaaaaatggattgtttcacattccattactttttaagtatgactgactgggagatgctactgcctaaatgggaaaggtcaaatgctgaatgttctaaacacatgagaattaatgaagacttgatctgcttttycttcagaacttctaaaagaaagcaaatctatcaacatacatgtaaatcactcaaaaaacaatcacacacacastgtactggctacatttagtgagtcttcatctttattttcacgggttaaagaaaacaaaattgtatcatttttatatgcctatttggaaaagcaatactttatcaacaagattagtagattttatgacagaaattacttatcatcatcaagtacacgttttagttattcagataaagaaagcaacattcagtttcatgttcacatgtttcaataagtacaactttgtttatacaaccttgggaaagacagagtaggagtcgcattgctgtgtattccagctagcacaacaggcctgagtagttctagatgccacttaaaaatcactcaatttgccagagtaacccacaactaaatccaggaaaagtagaaaagctatgtgggccatggacagggacactgtgtacaattacccagtttgtgcattttaagtgggttcccagcacaggggtaggcaaagatatgtcctactgtggttccagcccagtaaaaaacagcatctttgcatagttaattggtccaggtaggatgtctttttctcacttacacaaaggcatcatggttagcaaaaagactggtgctaaaagaagagactttctccaagaagagacccataatacattatctcacattcacagaaaaagaagaacccagcaaagttttcatgttcttactgggcagaaatatcagtgttatgaaaagttatactggttgtcaaattttcaaaagaatctccgataagtacaaaggcagagctctaagaagaaatctgggactgagccaaatgagaagaaagtttgaatatcacaaatctaaatttttaatctaatgctataatcatagcagatgtaagcacacatactaacaatttcttataagattctttctgttttaggaattcaaagtcatttgtattaaaattacatatgtgacaatggtcccattatattctaataaaagtcacaatgtatattctctcactctatacaaacctatcacatacagcataaatgttaaaacatttgcttcatttttaaagtactaaaatgtgcatctgagaaaattttcccatttaagtaattaatgaagtaacgtgaaacagctttggtttgctaaggcaatccccttcctaactgctttcttttctctctatgttgtttcatattttcaatcctttaaagaaacattcttattttgtactgtgagttatctgaaagactagtagttcttgtggaagaaggaagaagagcaaatgaagcaataaaaggaaactcacctatgaacaatattaacttctaactagatttttaattaagaagcttatcagcaaggtctctggactttatctgaaaactcacaaaagtttaaatggcttaggtcaccaccatttgtcattttatataacagctaaggcaccagatattatcagtaaatggattattcatttaatataagtctaattttcagaggtcaattctgaatacttgaaaatacttcaaaatatttgaatatttcaaatcctgaatacttcaaaatgtatgacacaaggttttattctattgaatagaagagatacatttctttcatatactacatgtatttaagtagtagatagttttcaagcaactacttggtaagtcataaacattacattttatattatgtcttttcttcttatattgatgaaatgtagaattgtacctaatagaaaatttagaatgactgattttacagaacatcacatattaatgataaactcacattttaattacttattaaattaattaaataccttttgtagactggtaggatttagctgagttttgtctattattttcacagcaacctaaaaaagaagaatcattaaactctatttgaaaaatgcatattttaatgaataaaactttcaaaaaatccaatttctgtttcattcctaactagatataatttagctctttttaggtgttcacataatcagatagtaacattttgataatttggcagtcttagaatatactccattgacccaagtctttaatcttttgatcctgagccaatgaaatgaaagctttgttatttcttctaagtttccttctttaaagtaaaaatcatcctgtatcttaaccttttactcacgatcttgataagcaacaattatagggggaagtggcttgtgaacttgcagtaagttaaatattatgtgaataaaacaattatgttggtagagagattggatatccaagcttacttagagcaaactgacaaaatggacttgaatatctaaggctctgcccagtattccctgcctctgaatggctcctggggtcagaatagacagaaggaaccaaattcaatgggaaacgacaataatattatacatagagcaaagtgaaaatttattaaaaatattttctttgagtttttgttttttttttgagacaggatctcactctgttgctgaggctggagtgcagtggtgctaccacagttcactgcagccttgacctcccgggctcaagtaatcctcacctcaagctcccaagtagctacagttgcacaccaccaagcccagctaatttctgtattttttgtagagctggggttttgccatgttgcccaggctggtcttgaactcctggcctcaagcaattatgcccacttcagcctcccaaggtgctgagattgcaggcatgagccactgcattgggcctgattgagatttttttttataatgtcctaatcagatctagtaaacgttatataatacaaaatgttacacatttattcaaataaagtctgtaaccctagcatacaggtatatatacacaacgtacatatgtgcaaatatataaattcttactatataaatacatataacttaaaacacacgagattttagaaatccaattatcttattacctgagaaaaccacccatatagaagtacttgttcaatgtagtctctaaacagatacaaattagcaggtgactttctacatatttatacctaacttatatcaagcagcaagaacttttgttcctgagggctgggcagcaatggcaatcagaaatgttcacagaaatcatataacgaaagtcagaatctgaggaaagctcatctgcagcacacctgatttatgagatgctaatatataggaatgattcttttctaaatattaaaaggtcaacttttatgccgtgataaacctctgcctactaatgttccattcacacacaccccagtgttaatcatattgaaactgtcattttactcccaaacatgggctataaggaagctttaacaagactccagagaggtccaggcagatattaaaaggcattgtgcaaacttacctctctaccagttagaacgtgtcttgccaatttgactttggcaaaatttcccttccctattgttttttgtaaacggtaatttccaatgtgaggctgttcatctgttgctgacgtaatggagtttctacaccgggggatgttctgtctgctactcgacttggtaggctggatgtgtggttcagtatatccatccacagatgtatgctaagaaaaagtttacaagatttcattgttaattaaattatattataaaaggacaagtaaaaagagtacaaataattattattaccaattcttcaataaaaacatattgcactacatccttttaaagtttgagcattctatttataatttcttctggacttcagctccctttaccaggtagagtataattgtttaaaatgaaatattcaggccaagcatggtggtggctcatgcctgtaatcccagcacttaaggaggccaaggcaggcggttcacttgaggtcaggagttcatgaccagcctcgccaaaacagtgaaaccccatctctacaaaaacacaaaaattagccggttgtggtggcacgtgcctgtaatcccagctactcaggaggctgagggaggagaatcgcttgaacctgggaggcrgaagttgcagtgagccaagatcatgtcagtgcactccagcctgggtgacagagcgggactccatctcaaaaaaataaaataaagtgaaatattctacatggctttagggatatgctttcaatttaaaattgtaaatatacagccagaagcctcacaaaccattattccyataaaggtgttatcgctttaggttgtgatgacagtatagctcagggctgcttcattaaaaaggcagaatgtctttattgccaagacaacctcatgggtataaatctttttctcaaaactagcccagccatttgtcatgttcttgcttccattttctgggcatataactcaaagaactgaccaatcagcagcctgcctcaagtatacctctaattcatttctgcccaaccccctcacccagtttatcatgtccaagtgaaagctatctatagtcctgcccaggtccataatctatccattgcatcagtgctgttctggaggcaaagatgtcactttgtctcatggtctcacgctaacctacaattgcaatggagagctgatcctgttcacctatggactcaacacctaaattcccaggtcaagctgcctaaccagctctgtttcactagctgtgattgttcctgctcttgtctagctttgtctgcattttgacatacataaaatttctagcagtttttgtgaaaatgttgaatcacacrtaataaacacaacatctttctctggcttcttaaaaaattgctgaagaagagtaaaacaaaataacaaaggaaaggatatattttgtttgcaaaatgactaatgcagagttatattgccccacctgtaaaagcaacagcttcctaaagaattttgatcttaaaggcaacattaaagaggaatccatttaccaatctcacgcaaagcatgattcaaagtcatttttctatttgttactactttttgttttattttatgataattttttaaaactcagctcaggattaagggtttttgctgggtcttatacacatctgcaacctctggcctcattctgtgttggatgcgctttggggtattctcgccacaacctgtacttccacgtatcacagcatgctttccattgtgctatcattatacatttactcgtctgtctcccaccaccctattataaacaattttagggcacagatgttttcttttcatctttatgtactcagcacattacaggctgccagatacacaggaaggattcaataaagcaatagttttcacagtgttatccctggtccagcaccatcagaatcatctgagaacttgttcaaaatgcaaattctctggtcttattccagacctactgaatatgaaactctgggggtagggtccagcactctgtatttcaacaagttttccaggtgattctgatgcatgccaacatttgagaactgcaatgaaaataatgtaagaaggagtaaaatacaaagttattcactggctcttggagactcttctattacctgggtagaaacaagagattttaattatagtacttaatttctaagagttaacagactgccatgatatttcctacaactagtacttctctacctgaacttgttctgcagggaatgctgacttctccagccttcaagatgtatctttttttttttcttcctgagacagggtcttgatctgtcacccaggctggagtgcagtggcacgatcactgctcactgcagcctcaagtgatcttcccacttcagcctcttgagtagctgggactacaagtgtgcactgctgcccctggctacttttttaactgtttttttgttttgttttgttttgtttgtagagatggagtctcatcatgttggccaggctgttctcaaactcctgggctcaagcaatcctcccacctcagcctcccaaagtgctgagatataggcataagccaccgcatctggccattcatctttcaagatttaatatgagtatctcctccacacagctttctatgtcttttcacagagatgattattcctcttttctgttgctacctatatacccaatatatacttcaactattagaactctcacaccatcttctaagtacttgtccatggtctgtgtttaccgttgacttaaagctcctaaagccccataacttaatatagtgttaggcacaaataaggcatttgatacatactaactaaattgaagggatttaggatcctcatactcctggtacccttatagaatgacttctgaggagtaagtccatgctgtccagatctttgctgcatataaaagcaatacgcattaaaatacttgagatgtagctcagctcctaatgctggttgtaggctatatattaatactataccacattttgatggactgtattattaatcccaaattttcacaccctttgccatgtaacttttccaggaccctcccactgagggtgggggcatactttcccactctttgggtttagtcaagtgattttttttttttttttggccaataaaatgagttagacatgatggtatgcgagtcccaagctagacttcaagaggccttgttgtgtctcaacttgctgtctgccatcaccatgagaaggacttatccagactgacagcaggaygatgagaaatacatggagcagagtcactgccagttaagccaagatttaatcaactgatccccagctgactctgactcatgagaaatcataaatggttcttggtttaagccacttaggttgggatgatttgttacacggcaatgtcagtagatacacaatgctatcgttattttaaaattaaaaagtaaacacaagagaaaagggaaaaacttatgaacaattggaagattcttatcagacatgtttacattttagcagtctgaaaagaaaggatgagggagggagggaggaaggaaggaaggaaagaagaaaggaaggagggagggaaggaaggaaggaaagaaggaaggaagagggaaggagggaaggaaggagagaaggaggagggaaggaaggagagaagtaggagggaaggaggaaaggagagaaagaggagggaaggagggaaggagggagggagggagggaggaaggaaggacaggaaggggagaaggaggagggaaggagggaaggaggaaaggaggtgggaaggagggaaggagggaagggggaaaggggggaggggggaaggagggagggagggagggggagggagggagagaagaaaaaaaaaggagctatatacggtcaattccctaaggagaaacccttcattgtaagctgtatgggagcagaatccttgattattttgcatccccatcaccaagtatggtgtaacacagagatcgacaaacgattctggagaaataatacccatgggcctataggctgcagttggccaacccttggtgtaacatgtcacattttgggatacaggtttaaattgttctcaatgattttttwaaaagatctcctagccctcaacattaaacatgatcatttatacacaatacatttatatgtcttaaataaaaaatcagaatayacagcatatattttatattacatatattatacattctgaatatattatatattctgattataagatatccaccaaaacaaatattttcaaaaattacatctttccttaggattgctacagcatcacttaggagacaacctttccttggaaggactctttgaagtacagtttgggatagctgatctcacyttcctgatcaatagcttaattctcaaatagaaaatgtggcaagaatatcaattcagctcatgctagattaaacagtgaatttaatttggaactacctcaatcctaaggctgttaaatagaagaaattatgttagctcaattacagcatgtctatgaattttaaatttctacctttatctgaaaacacaagttccaatcctgtcattctttcttcaagttttccacttaatccagtagactgtgaattcctttattctttctgcagcagtggtaatgtgaccctaaagcttgccctgagtgtgcagtgtagtcaaagtaagcagagataatgatttcattagctcttcagtgctgcatcccatggagcaccagactcaaattcctgagtaataagagaattttccccgcctttaatactgactgaaatgaagttcttctactcactggctatacatccttagaaatattttttaaaaattgcaatgttttatgacagtcactaaatctgcttggtgaccgaatattcaaatactcctaaaaagtcagataacatattagacctgaaggtagggctgtcacagctctgctctcaggactttggaatatgctatttttgcataccacaaccaccctttggccaagtgatattagcaccaatacaggtcattgcaatttagaaacaataaccaaactttcatttctcaaagtcattttattaaaggagtagggaagttctgcttccaacaaagaatagtttgtaactaactaaacctatcagcagacaaaaatataatctgtagacaaaatattaaaaacaactgtttgaaggctctgaagagccataaaaaagcaggcaaagtcttaagggaagttgatcattgaatgaagaaaaatttcacaacatagaatctggcttgttacagtttcgagctgggggcaaactctggcccacctcactccatgtgacttaaactcaagcagacagcaacagttttctcggctaaaaaggagtctgaggataggtttgggagctcacaaaatggctggaaagtgagagagaaaaccttgggaaaaatgaagtcatggagaagaaaaatgaaatttgtatattaattgcaggtgctttgctaagtcccaaacgatgtataagcaagacaacctctaaggaacacattagaacaaggcagttagaagtgtaagataataaagyaggtatttggcctgttggccaccacaacgcaggctgaatttgaagtttgagtcaagccaaattaactgtctgctaaagcaaaaaccaacagttcagaagataattaaattcagagtctccatagagtatcaataaaaatgtccagtatgtaaataaaacttactagacacatgaaggaacagacagatatgattcactgtcaagagaaataatagtcaacagaaacagaccccaagatgacccagaagttggaatcagcaggcaagaactttaaagcagatattataaatacattttttaaagtaaaggaaaatatggccagaaagaacaagtatatgggaaatgttagcagaaaaatgaaaactataataaagagacaaatggcaattctacaatatactacatatactacaatatatactacatatatactacaatatatactacatatatactacatatatactacatatatactacatatactacaatatacaatatactacaatactgcaacatttaaaaagaaaaattcattggayaggattacagtagactgcaaagaagaaagggtcaatgaacttgaagacagattaataaaatatagccaatcttaacaactgggacacaggaagactgaataaaaataaagcctcggccgggcacagtggctcatgcctgtaatcccagcacttcgggaggctgaggtgggtggatcacgaggtcaggagatcgagaccatcctggctaacacagtgaaaccccatctctactaaaaatacaaaaaattagccaggcrtggtggcgggtgcctgtagtccccgctactcaggaggctaaggcaggagaacagtgtgaacccaggatgcggagcttgcagtgagccaagatcatgccactgcactccagcctgggcgacaaagcgagactccatctcaaaaaaataaataaataaataaacaaagcctctatgatctgtggtgggtcaatatcacataaactgtcacatgtataaatggggcccagagaaggaataaaagaaaatagggtagaaaaaagtacttgaagtaataatggccatacaattcctccaaactgtaaattctaagaaggataaataccaaaacaaacaaacaaacaaacaaacaaataaaaaaacccagtgtagaagatcactgtcaaattgctgaaaccatgcatagaggaaaacaaaaaccttaaaaggagtcagggaaaaatgacacattcacacataggaataacaatacaaatggcaactcacttctcattaatcaacaatggaagtcagatgacaacatttttaaagtgctatagaaaaatcaaatgcaagtcaaaattcattatccagtgaaaacattcctcaaaaaaggcaaaaaagacatttttagattaacaaaaactgaaagaatttgttgccaacagacatacactataaaaaatgctaaagaaatgaaagtaacaatagagggtaaaatgaatctatataaatgaataaagagctctggaactagaaaatatgtgggtaaatacaaaacagtacacatttttccatctcttcatttatttaaaagacatatgactgttcaaagcaaagcataatactgtacgtggaacttataagcagaagtaagtatatgtgaaaacaaaaccacaatcagagatttcaacattactctctcaatagctgaaagaacaactatacatgaaaaaacaaccaccaggcgcggtggctcactcctgtaatcccagcacttcaggaggctgaggagggcagatcacctgaggtcgggagttcaagaccagcctgaccaacatggagaaaccccgtctctactaaaaatacaaaaaattagccgggtgtggtggcrcatgcctgtaatcccagctaattgggaggctraggcaggagaattgcttgaacccgggaagcagaggttgtggtgagcagagatcgcaccattgtactccagcctgggcaaaaagactgaaactctgtctccaaaaagaaaaaaaaggaaaagaaaaaacagtaaggatacacaaaatctgaacaacactatcaagttatggaagcttacagatttcttaaagcacatagttcttaaactctaagtcaagaacacttctctagctcccttaagctctttccatagatattttagttctctttagagtgataacttgtctttttatcaaaggataacttaaagaacagctactttgctggctgcagtggtgtttccctgtggtctcagctactcaagaggctggtgggaggatcacttgagcccaagagttctgggctgtagtacactatgttgacctggtgtttgcactaagttcagcatcaatatggtgacctcctgggagtgggggaccatcaggttgcctaaggaggggtgaaccagccctggtcagaaacagagcaggtaaaaacacccgtgctgatcaacagtgggactgcacctgtgaagagccactgcattccagcctgggcaacatagtgagaccctgtctctaaagaaataaaaataaataaataaaaaagaacagttacatctgtataggaacatggctgaagatactttaataataattaatacctacttcataaggatccaagcaatgaatctgcctgagtttagttgtcagaaatatttctctgagctggtacgcttcctttattatgttactatacaataataatctctccctctttcccctgttttggcatttgaaggtgaattttcatattaaatagtacgatggtggatgttgtcagtgacagtacttttatgagtgacaaaaatgttttaacagctggaaaagaatgcttatgaagcacaaaagacctgtgattctcctcctctatgttcctactgcacttgaaacattcttttacataatacttacaaccttacaatgaaactaccttatttttttaaaccatgttctatgaaactgtgagcttttaagttgtcacgcactacgtcttttacatgcattatcattcaatatagtgactagtacatgaatggacccactaaatatgttatcttctattgttaaatactcaacttaaatccttctgcaaactggccaataattattttatctggttctttaaaatcaacaaaactaaaagtcctccacaaaatgtaacttaattacaaacaaaaaaatcaattttatttgatatatcggagcttatttcaatgagatgtcaataaatttgataagacagtcacatacctatttacaaaaacataaaacacaaaaatatgagttctaacaatggaaaaagaaaaagctaytgaaataaattgccactaaaaccttctgaaagctactatgctatgcacagcataaatccaaagggagaaattgtaccatatgttcctgcctgcccttattgagcaagtgcatacttctccaaatgttcatattacaagtagtcttttacctgacttgtttttaggtactagaaatgggttcagttttaaaacctaaacagtaagataataatgaagaaaagtagccaatacagtgtattaatagagatccaaggaacctaaatgaaatattagctgatatcaccaataacatattaaacaattatcacttcaatcaattaggtgtatgatcagaaggcaaagttaactctatacaagaaaaatattacaatttactgcttcaactttaaaaacatagagtagtactaagtgagataaaccataaaaacagaaacaagaatatcccatcaaacaccctcattcaacaaagcagtagtattagatatatcagcaatacttcttaagaagatatatacatggaaaagatttatttgtattctctttctgcagctggtataaatataaacctagaaaatccaagtaaatcaataaagtatctttcggaggttcaaaaagttgtaagagacaggaaacatccttaataatcattacattctgagaaaaatcactgggttaactcttcactcatcctttcgcattcagcttagatatcacttcccaggaaacaccacacatcatattggagtttccactccttcttcaactaagccaggttcagtgtcatatttggtctttctattattatttctagcactgcactgttccaaatttttaaattaatttttatgaaatgatatattattcaccattgtttcttacatccttgcacttctcttcgatttttctagtttgtaaaatttttttcagataggtgtgtaggtgctacactttctgaatctttacagctactaatttttcttatttcaacttcacatgtaaacaataattccattagatacagaacaggtacaaaggaacatttttccacttacttctggacttattccagaaggttgaacctttcagaaacatggcttactgacatctataaacacatcacaaactgtgacctctgaatgacaaaacaataaaagacagaagaaatcctacagaagttccaggtgaaaaaaactttttaaaaacctttgtctaaggaatagatctaaatgcaaacatatgtgataygttagtgtgaaatttagcacttcatatcaatgaagaagtaataaattattcaacaaatggtattggaacagctagaaaaaataaagctgaatctctaggagtgaggtatcactctttactccaaaataaattcacaattgattaaggatataaatgtaaaaagaaacagaaaaaaacacaaagacaaagaaaccaccaaagtactagaagaaagaatcgacagttcagcaagtgttttttagtctcagcatgggaaatggctctctaggtataacataaaatagaagtcactaaaaaaaagtttaataaatgtgacatcgcaaatttaaaagacagtagttgattttttaaaaaactctccttatatcaaagtaaagaggcagaaaataaattgagaaaaaatatttgtaacatatggcaggaaaatggttaattttaaaatactaaacttccacaagtcaatttttaaaatgggcaaatatgaatgtgcacaggatgtatacagatatttcacagaaaaggacatatatgtgacttttaaacatatgaagtaaatcataagtgaaatataaattaaagctacaataaaatctatttttcatctatcagattacaacgattagagtttgatagcatttgatggtgatggtatagaactaggcatacttatatatcattggtcacagtgaaaattgacacaaattctatgtataggaggagttgggagacaactatcaagtaaattcccacaatccttgggctagaaattttacttctagtaattagttttacagacatagtcacaaatgagtgtaaagatgaacacatacaatatttattgtagcactgtttgtaacagcaaaaaacagaagcaagcacaaagtccatcaataggcagagctggttatgtatgtatggtatgttctttgtaaatgtgtatatgtgtacatgtgcctccatgcacatgcttcaataagcacagactatctccagaaggttacacaagacacagaagagaaagtagttacctctagaaaagggagctaggggactgggaaacrggagtatagggaacattttctttttcatatcatatcatcacactctttgttaaatatcctgcaacagatccccattttattcacagtaaaatcaaagcccttatatgaccaataaggtaagactaacaaagtcggaccccctattacctttctgccctcatttactactatgccccttctcactcaccttgctccagccaaattggtttcatagccattcttcaggaatgtctggcacactcatacaacaggtcgtttgctctagatgtaccctctgcctagaacattcttctctcagatatcagtttgtccaattccttcaggtccctcaagtctttgcttaaatctcatctttgcagtgaggtttactttgacctgtttcataccacacatctcctttgccttactgattgattgtttattagtgttttctcaccctcataagaacaaagatatttattgcatttacttttatatcccaagtgtctgagaaagtacaaatatcaagaagtaccaaaaaggttcaaatacaataatttaacaatattttaacaaacatatctattatattactgagcataagtgggttgcattaacctattcaaaagaaaaagactttttataccatgagaggggtgtacctaaattcaactatatgctgcccataagagacacatataaaacaactgaagtaaaaaaagttaaaagtaaaatatactaggcaaatacaaatggatagaaagcaggggccatgtggtaattaagaggataagctttaaagctagacagacttagtatcaaatagtgcctatgccactaagtaatgtgaccttcaggaagttacctctctgagcctcagtttactattctataaaatgttgttattacctataagtcaaggatttttaaattagaactatacaaaagagagcatttaacacagtgcttggcacattctcaataccagaacctactgtgattactgtccttgtcacaattcaaagtggaacaaatgcctttcaatatttctgatatcagaaaaacaggcctaatccgagttgttttaaaataaagggaaagtccagagtagcaattctagctttcgggtatctcttcaggaatcggaagaggcctgaatagcctttaatgtgaaaaggcttaccacataactggtagctctcctgtgtttttccatccctcwtaggtaaaacacaagtactaattttgtcctatcagaagcttctttagtatttactccatgagccagcaactccacttctaagattttagcctacaaataaattcccacacatatgaatgtgaaattacacaagtacaggtcagacattcactgcaataaaatatttgtaataacaaaaggtcggaaacaacctaaatagccatcagtagcaaacttggttaaatatgtccataggtagagtattaagcaatttttagaaataaaatcttcatatagtgatatgcaatcatttctaagacatactattacacttacagtgtcatatgctgccatttgtgtaagggagaaatctgtatttgcttatatatacataaaatatgtatgaaaacaaactcaagatactaaggactaggtggggaagaaaacttcactggcatacccttttgaacttttaaaattttcatgtatttgaatatattacctatcaacaaaaatatttaaacaaaagactattaagtagttagtttctaagtagttacttagcagatgttaccagtttctcaagcttacaatgaggattaaataaaataatgtctaaaaaagcattcaacacagawgttgtygtcagtgttgagtaaatgatggctgctattaagtagttactaagtagatagaaactacttacctactttctaagcaaattagtagattatgcctgaatttgttcaccaaaggctaactaaatatctactatgtatggacattttttcttcaatttcataatttgtttagttaatactgctgtcattagggaactacatacatgcccacacaaattacatttactgatcctggcaagcacagtgtatttacatccactcacatcacctccttttagaaatgaacaaataaacaaaacaaaaaaccccagcaacrgtttgctctcagtaaactgcttgaccaataatagtttcaagtacaaatgttttctggtctgcagatggagatccaaactagaaaattctagcagatagatgtatggtgaaatggtgtgactcagtattattctttattaatagatcattcaagactaaatagcataggtttatgccttaaatggtggttctttcatctggtcacttctcttccattttgtcctagcttctactacgagcagaacacattggcaactacttgtaatccctgaaaacaggaataatgttactaccagtccaataatagtaatagcagtcatcatttactcaacactgacaatgtcttctgtgttgaatgcttttttagacattatattatttaatcctaactgtaagcttgagaaactgataacattacccaatttaaagatgagacatcagaagcttggaaagcaaaacaaatgtcacacagctagtaaatgtcagttccagaggcaaaacctaaatccatcttactataagacctatgcttttcactagagctacctccccaaaccttcctcctatcccaacattaacagtctctgaagataccaaaggattcctcttggggctgagtgtttacagagtgttatcagctttcatctacatggtaagctttgcaaggcaggctctgccccttgtgccagaggcttgtgactgtccagccttaccaataactaaaaacaataagtgagagaaaaacatcaaaaatctgatgggaattcttacaggcatggacaaggaaaaatctcatcaatatctctcactggctactacaacaaggccagtttcctcctacagagtctttagcctgagcttttgggctagggaagcctttgtttcctccccactcccagttatattttgttgctccaacctccctccccccgacccccgctctycataggcaatccaagaccaggggcttgccatgtagccagccctcacagaacagtgcatatacaagtacacactcacatttcagcatttccttctgttcctccaaaacaatgacggcaacttcaacaaatcaagattatgggccactttacaaaaccaagagtcaaggtagtattctctggatattaccatagggatactggtggctcccagaaggacctcaatattgtggcaccatctgaaataggttgttagctgatgaaagacacccacaggctctaaatgatggtcacagctgagaaaactgatcattcatgttatagcttaaatgctcagtgagaaacaaatgggaatatatttgatggatataattaaaatatacttattttcccctaaagctctgctcatttttcacatctactgttctattcttaatgaaaaatttactgcaaacaataccttactgaaatataaaggcagaattatacacatttgggattttacatgcttttgcataaaataggtagttctgtagtgttttaaattacaatataagcaagtttcttctctgaaaaaatagaaggggaaggaggggaaaaagtaatctaaagaagaaaatgagaataatgataataaagaggaaattatattggatacttcttctttggtatttgaataaacagccttaaagaagaaaaaagacagtattacttcaggaataagatgaagtccctacacttcaacattacattgtctagttgaattgttgaatttaaccaatactaattgacaacctatagttgctgaagaaataaacattattacaagaaatggcccaaaatattaaaggttagtaggaaaaactaacagtttccatatgatatggtactttataagaaaggtacacacaggatgctatgtttctgtcagctagaattgtttcccaacattaaacagcaattctcaggccacctgagttgtaattcagtagatctcttatctaccttgtaccatccgagacctaattggataatatatagagaaaacaatttgcatatacatctggtttttaccttcttaacaattatcgctataattaaataattaattgtatgtctccaaagggcagaaaaagtgctgactcatttgtctcataccaaacaaaacactttgtaccagatactcagctcacaacagattttcatgtatgaaacaaaggattaaacatccaaatacatacagccctacgactgggcttccccagtgcagtacctcatactcattagatgtcacaaagcctttagttaatgaatactgtttcaatccaagacacaaaaagaagttacagactaaaaacacataaaacaaaaaaccctcaattatttgtattaaattaagatcacagagaactcagagaaattaaatccacaggctatttaaaggccatttaatgcaatgatttctactttgtctctcactaaactaatgtttttaataaataagcatgtaatccattttaacctggcaactcttctcttttccactgctatcctctaacggaagtactgatttacaatgaaataaccaaaaggaagacagcacaataaagaaggaaggctctctctatataaactggattatcagttttttaaagcaaaaaaagatgggggttcaaattaaaaatatttccattaaaaatatgttttgattattcattcattcctacagactttagcacagtgattaaaagaaatgaacaggtctggaatcaggccacctggtttgaatccaggcactgcaacttgtaagctgtgtgaccttgggcacgttttttaacttgggtattcctaggttaccacaagtaggaaaatgaatgataatatcttcttcaaagggctatggtcaattttcacccaactacacagaggggtcttctctgatcactgtttttaaaaatgcctcctgccagtttctctccatcttttaactttcctttattttcttcacataacttactactatctaaaatgatagacagttatcatttacttgttttcatctgatttgtaagaataagaatcttgtctgtcttatttacttctatagtcctgattcctaggaacagtccccagtactcacaagtaggaactcagtaacgctgagtaaatggaatgagtaacatacaatacagtaagaggtatactaagcattcaataaatgttagccattatttttcaggtaattggtaatttttttttggcttttcttttaccttcttttaaggaaaattatttataaatttcctcattgtctttgcaggttgtatttacgatttgccaaaatcaagaattacattaatttactgcttgaaaggattttcccttccagtgttaggagctgcctttgggatacattatttcatttaccttgatctcagacatttattgagcaccatactaagaaccacattttgtagacaaagcaataaagacagccctggcctgccaagagactgtgtcttagttcagcacctgctactggccaagctacctacttaaatgcaggaagaggacygatatcaatatgtacagttggccctctacatctgtagtgtcccacatccatggattcaaccaactatggattgaaaatattcagaaaaaaaaattccacaaagttccaaaaagcaaaacctgaatttgctctgccaaatactacattgaatccacatgaatgaactggtgtgaaggcactgtattcggtattataagtaatctaaagatgctttaaagtatataggaggatatacacaagatatatgcaaatattatactatgccatattatataaagggacttaagcatctgtcaatttttttttgagggaggtcctggaaccaatccccacagacatggagtgacaactatacaaaatgttactgggttgagggaggtgggagtttgtaaatggtactgagcatttaatggaaatcctcatcaattacacagttctttggggaccttcaaattcctttactcattatggctgaagttttatcttagctactgtttttgtttttgtttccttttgagacagacttctcgctctgtcacctaggctggagtgcagtggcgctatcttggctcactgcaacctgcacctcccaggctcaagtgattctcgtgactcaaccttccaagtagctgggattacaggtgtgtgccaccacactaaggcaaatttttttttgtatttttagtatagatggggtttcgccacgttggccaggctggtgtcaaactcctggcctcaagtgatccacctgcctcagcctcccaaagygctgggattactggcgtgaatcaccatgaccggcctgtttttgttaatagtaatagtatcatcaaaaggccaactggctataccaagattctcaaataagcaagttaaggtttccaaaatatttccaaccagataaaagtttacacaggtcttcagcaaataaaaaatatatatttgtatgcatatgcaaatgcatacacatatattagtgtaagattgccaaatgttctctcttaaaaggatcatccctctgaaatcatggccttcttctcatggtaagttttcccccacatacttgacaaacaaaaagctsgcaatgtcatccattgccaatagatttttatttttattaattttctaagtccatgaaactctgaaatctagaatatctagaagtaaacagaacacaacagctccctggccaaattccaaatacaaaatggttgatcttttattcattaacatactgtctcttcattcacccaagtccaattttcattacccattgtctatactattctagtagatcttaataataactcagacaatattaacaatatttatctgatcatgtgtctcaaaatggcatggatcttcccaggaagtgcttaaatcctgtcacattgcttagaaacactattatcaaactctgtttgaccttgttctttgtaactttttaacttttcatgtatccctctaagtaaatcttgtcacagagaagctaagaacatttagagcagaggtgtccaatcttttggcttccttgggtcacactggaagaagaagaactgtcttgggccatacataaaataacactaatgacagctgatgaacttaaaaaaaaaatcacagaaattctcgtaatgttttaagaaagtttacaaatttgtgttgggctgtattcaaagctgccctggactgcatgcagcccaggggctgcaggttggacaagcttgatacagagcatttatctcatgtgtttaactctggtctcaaatacctttcctggaatattcaaagctttctttaacctcaaagcctctaattcactggcccttcccattctcactaccattcatccctgtaatgtcctacctacacctccttactcaggttatatgtcagggtccttcggtataaccactcctttgcaaacatccctaacttccctgctttccacactctcttccatatttgcttggcaaacccacaccattccaaaacccaaccactccctactctacatctgcacctgaaagctcaacattgttacacacatatacaaatgagctccctgatttcacttaaatttttggtcacagatcccaatgaggactcaacatcacctgacagtcctctgtactttgagtacagtattcccagcttatctgtgatttcactttctctggttttagttacctaaggtcaaccatgacctgaaaatattaaattgaaaattccagaaataggcaattcatacattttaaattgtgcatcattctgaatagtatgatgaggtcttactttgtccattctgtcctgcttaggacctgaatcatgcctttgtgcagcatacacatgctgtataggctttccacccattagtcacttagtagccatctcacttatyagataggctgtctcggcatcacagtgcttttatgtttgagtaactctattttacttcgtaatggtccaagtgcaagggcagtgatgctggcaattaaggtatgccaaagagaagccatgatgtacttaatttaagtgagaaggtgcaagttctcaacattaaggaaaaaataataatcccatgctgaggcaattaagatccatgggaagaacaaatctaaccatgaagttgcaaaggaggaaaaagaaattcatgcacagtatatgtatatctgcagtttcagccatccactggggggatctttcatatggtttagctgtggccccacccaaatctcatcctgaattggagctcccataactcttatgtgttgtgggaaggacctggtgggagataaacgaatcatgggggggcagtttcccccatactgttctcatggtagtgaataagtctcatgagatctgatggctttataaggggtttcccctttcgcttggctctttctctattgcctgccgccatgtaagaggtaccttttgccttctgccatgattgtgaggcctccccagccatatggaactgtgagtccattaaacctctttctccttataaatcacccaatcttgggtatgtctttatcagcagtgtgaaaacagactaacacagtcttagaacatacaccccaagtataaggggggactactgtacactcactttactcttctctaaaacttccacttcattcttcctcctctgtcttcttacatccccatttgccagtgatgtctttgctttatggttcattaatccagaaacaattagagatccactcagtcatcaatctgtatcaaaactgcagcctacccactgcctccatattctctgcctatgtgaaatctccctgccaaaaccacttcccatgctatggattctgttcagttccatcttttcaagagcttttgctcccgcacttagtctcacttacctgaatcatcaattactccctctcaaatagactttgttcaatagcatataaacatgctcctgtatctcatggtaaagagaaaattctcccatgaccacatgtccctttccaactatgggcctatttctctgctttcctatatataaaaagttcttaaaagaagtttttgtagttgttgtatcacttctctgtgtttacttcaacccactccaaccaggtttgcctccatcattccactgrgactagccttgtcaagatcatcagttacctgctgattgacaacagctgcatttaacacagatgacctatccctctttattctcttggcttccacaacaccacaatctccagattttccttctaacctactaacagatacttcactgccctttgctgctcttctctagcaccaaatgttgacatgcacaagagctctgtcccaaagccccttctgttttattcatcttttcaaagaaccagctttttaggtttctgatttctgtaatttttctttattttgctatttcattaatggctgctctaattttcattacttcctccttctacttaccttatctgtttaacctattttaggttgcaaaactgacctcttgaacctatttagttctctaacactagctgattaattttcaattccttattttctaatatgtgtatgtagggtaataaattttcatcctagttgcattttagctgaaatgttctataaatgtttcaagagaagagtatattctgttttgagagtatacgactctrtacatttccattgagtaatacttattttgcttgttcaagttttgcttattcttatttctatagttttatcattagagatgcttcttaaaaatcatctatttgcccatttcttttataaatatatcaattttttgttttatatattttggaccatgttgttatatatgtataagttacagtaatatatctccttgttaataatatctttgattatttagggtaatggcctttatctttaataatgctctttatcttattagtctgatattaatattgatatgtcagattcttaatcatctttttttcaacctttcattgtcagcaagctttagtcactttaaaatagctagagttatgttttactagtttttacacaagctgagaaactatttttttaaataagagagtttaatccttttatatttattttctgattatcttacctggttttttctttttcttctatccactggatttacttttcttcaatcttcctccctactgcaagctgctatgaagttatacattcagtttttattcttttaaatttttaaatgcataatgcataataaaatagtccatttccatcctcctccccaataactgaagacctcagaatttttagctccaatgtttcccctgccatttcccatattattattattattattattattattattattattattattatttgagacagggtctcactctgttgcccaggctggagtgtgttgatgtgatcatgactcactgctgcaaccttgacctcccaggctcaggtgatcctaccacctcagccccctgagcagctgggagtacaggtgcatgccagcatgcccagctatttttttgtaatttttgtagagatgggtttcaccatgttgcccaggcaggtcttgaactcctgggctcaagtgatccacctgcctcagcttcccaaagttctgggattataggtgtgagccacagtgcccaggcattttccatattattcttatctagcatctttgtctcacttgatttttccaacaccctaaaaataagcaattgctcttttttggcagttttacagtcagttcttgttcatagttatcaacctgcaacttcttttgcatattatcacttcttgtatccaacttctttcctctaaattctgtttccttctccctgaactatattttttttgtaattcaaacataagagtacataggtagaaaaatcttagttttcatttgtctgaaaaaacttttatttgtcctttttttttgagacagagtctctctctgtcacccaggttggagtgcggtggtgtaatcttggctcactgcaacctccacctcctgggctcaagcaattctcatgcctcagcctcccgagtagctaggactacaggcacataccactaggtccagctctactttaacagagacagggtttcaccatgtttggtctcaaactcctgactttaagtgatccgcccgccttggcctcccaaagtgctaggattacaggcgtgagccaccgcacccagcttaatttgtccttattcttgaaggatcatttagttaagaagataacatgagactgatattttctctcatattctttaaaaacattatttcattttaaaaatatttgttattgctgatgagaactctaacttttgttactttggaaatcatgttttctctgttattaaaattttctttctattstgagtttgccattccataggtatgaatctccttttatttattctgctggtacttgctgtgcatcaatctgaagacatgtatctctctccacttctggataacccctagccacaatctttcaaatactgcctctcaaaaatttactctattatctcctcctggatgtctactagatgaatgctgcactttcttatctgtattccatatttattaaccagtctttaatatcctcagtccctatttctctatgattcattccaagtcatttcctcagatctataccagtccatcaagtctatctttggctgggaataatctgctgcttaatcattctactgagattttaatttcagtgacaacatacttcatttctataatttctatttagttctttttctaatcagcttaattctcttcatttcttattcttttattatggtatttattactgcctttaaaactttttaaacaaatttatattctgctttatttcagattgttcagatagtcgcattatttccagttcttagggtggtattactactttttgtatttgttaactctctccacaagtggttagtttcctcatgaaatctgtaatttgtttgttttttttttttttttttgtgacagtcccatgggtcctagattttgaaagtaatcctaccaagcactttttcacttgtttctagcaaaaacaagtcatgaaatttttttcaagttaatttcatagtttggggtttctactcgacatatagcatggagctgatgttttcatttatttagaataatcatttaagtttaagtgtctccccgttaaacttaaggcctccggtactgatgacaagcttccttgtcaactccctcaactaaggggcagagttttttctaactttctttgcagggagacagagctatcaaggctttgagcttcatacaggaggttcatttccagttcttccagcacagatggtgctgataccgtatttcctgtccctaagacagtgttagagctacatgtcccaactcttatgctggatcaaaaagccctgaggaatgccattatgtcagcttgtgcttaccattctggctttgatttctcttcattcctttgtcctttaaagctcagttatgtagttaataaactttcagaaattatattttaagtctatctacatattagcagcaagaagaaagggaaccatgtcaattcagtccactatgtttttggtactctcccctttttcctggctatayattctccctaggtgaatttactcagtcatgtgactttcaatattatctgtaccatatgacacccaaactttctctctacctatgaccttccttgaattttagacttgtgtgtcaactgtatgacatctccatatggatatcgaataggcacttcagatttctcatagccaaacataacttaatttccaaatatcaaatttgctcctctcacagaatagctcatctcattaaatggttctacatctaaaaatcaattagttatttttggttttcttcttcctcaccctaactcctcaaatcaagtcccataagcaaaggcaatcaaccttagctccaaaacacgtcacgaatccattcacttctctacacctttacctttaccacttagaccaagttgtcatcatctcttacttcaatacatcaacaacctcccaacaattttctctgcttctcattattttgcatcctccttacccctaagaattctgcccacagcagccagaataaactgagacataaattaagtcatatgtgattattttcattacaattaaatatatctaatacagataggatgattatgtaatagatttccatgccctcaaccccctgccacatctccaaactatctccaaagtagtaattcctagagaccccaaattccactgtgatccaccaatcaaagcaggagtttatggaaatcagatgatcaatgacgttttggactgggtccagttcacaatggaatcagtgggtccccaaacccattctgtggttacttccccagttctggaatacagttggaagacatgtactcagcatctgctacagcctacacattcatcccttggcctgcgaattaaggactattacactgggaaaggacaagtggaagccattagaactgcttgggcttaccaaaatagtaaaccaaaagcaatattgcttcctgggggaactgtaggtttagtgccaccataaaaagtttaaaattttcagggatggcaattcccactacatctccactcagctcacctatttggcctatgcagaagacagatgaatcttgtaaaatgacagttaagttatcaaagttttataagttggttatgccaattacagcactattctagatgtggtttccttgctgaatcaaatcaacacactccagtacctggtgtgtgactgatgaactgcaaatgcttttttatttataaytgttagtaaagaaacatctgaaccagcttgctgcttcatttactatcctacctgggggctatttcaaacctctacccttatgtcataatttagttcagggtctctcaaactcagtactacagacatttggggccacataattctttgttatagaagactatcctacacattataagaagtgtaacagcatccctagcctctactcagcagatgccagtagtactccaacctctacttgtgataaccaaaaatgtctccaaacattggcacatgtgccctgggaggtaaaactgcccccagctagaagcgctgatctagtgcacagggaccttaatcacctttccttctataggaaatcacactggtccattatattgatgacattacactgactagatctggtgagcaggaagtaatgactactttagacaccgtgataagacacaagcatgccagagggtgagatatacatcccacataaattcagggacctgcctcctcagtgaaattcccaggagtctagtggtctgggacatgctgagatagttctcttaggacaaaaagaaattgctgcatctgggcccttctacccttaagaaagggtaccatgtatgtcagtagtgaaagtaatatatactgcattaccattacagctaatctgaaagcctgccagttttgaatggacgccagaacatcagaggtctgcaacaggcctaggctgtcatgcaagctgcttagccacttgaaccccgaagactcactggtgcttgaagtaactgtctgtggcagatagaaatccagtatggagcctctggtgggccccttatgaaccacagtgtagatcttcaggattttggagcaaaggtatgccattctctgcagacaactattctcttttgaggaagcagctagtagcttactaccgaactctagtaaacactgagcaattgaccataggccaccaagttaccattcaacataagcttcccattatgagctgggtgttgtccgattcatcaagccaaaaagttgggcatgcactgcaacattccactataaatgcaaatggtatgtattagataaagcttgagcaggtcttgaaggaacaaattacattgcatgagatgctcctgacccatactcctgctcccctgctacaytgatgtctaaatcaacaartatggcctcatggggagttccctaggacctggtgatgaagaaagaaacaatacaagtcttatttacagttgtttctgcacaatatgctggtaccacccataagtagatggagcactagagtcccactctggggtggtaccaaaggaagagtacaggcggaactttgagcagtgtacctggttgtttattttgcctagaaagagagagagtatgtagtataaatctatagagattcacagactggtgctaatggcttggctgaatgatcaaggacttagaaagagtatgacttgaaaattagtaacaaggaggaaatctgtgaatagatctccctgaatgagcacagcatatggagatcactgtttcccatgtacatactcagaaaagatgactcatgctgtatacatcagttactctctttctccagccacccattcttgcccaatggcctcatgaacaaagtagccatgatggcagggatgaaggttatgcatgggcccagcaacatagaygaacattcactaaggctaatctgtcagcttcatagaacaacactgagctcccaaaatagcaccactcctgggggtggcaggcggcagggggtggagtgggcaggtgggtaagagaaggttacccagtcacccagtgacaggttgattattttakactactttcataatagaagggaaggtgttttgtctattctcattggaacagatacttgctacagacatgtatttgtcttctctgtccacaatgctatgacaaaaccttcactggtggacttacagaatacattttcaccattatagtatttctttagcatcatggtattccacatagcattgcttctaggcaacgaactcattttatagcaaataaagaatgaaagcaggctcatgctttgagaaatcaccagtctcactatattcccccaatactctgaagcagctgtcttgataaaacaatcttttgaagattgttttgatgccagctgggtaacgacaccttgcagagctggggtaatatattccaggatgcaatatgtactccaaatttgtgactaagatatggtgctatttctcctgtaaccagatttcacaggttcaggaatcaataaatagaaatgggaatagctgttctcactattatccttagtgatccattagtaaaaaaatttttttctagtccctacaactttgggttctgctggtctagaagtcttagtgcctagggagaaaatgcttccaccagatgtcatagtaatggtccattaaatggcaagttgagactgcttcatggcagtgaatcaataggcaaaaaaagaggttaccatactggctggggtgactgatcctgactatcaagggaaaattaggttgctattacataatgtctgtaagacggactatatctgaaatgcaggggatcctctggggcacctcttcttactcccatgtcctatgggataaggcaatggaaaactgcaataacccagtgcaggcaagacttctgatggcccagactcctcaggaatgaaggcttgggttacttcaccaggcaaagaacaaaactcagctgaagtgtttgccgagagcaaaggaaatatggaatcagtagttgaaggaggtaattataaataccacctacaaccacatgaccagttayagaaacaagccctgtaatacttataaatattttttccttattttgctgtaaatacacttgcatatatattaaccaattcttttttttctttttgattccccttcccatttctccatcattcaacatcaaagtgttaacattagctaactctttatgttaatactgaagttgcagggaataaggagagactgagaagagaaatgagcatcacctaaagatagataaagagacttttgtatcatgttaggctaaagattaattctgctattatctttatcttaagtatggttaagagaagtgtggctaaatctcatacttaaaatgatggccaagctgacaagsagtgggttttaatgacttccaatgtgttaacttagctaaactggaactccgtttcccagaattcccttctctctatggtcctaggctaacatcagccacaagagaaatttgcacaagattaagaaggcagaaatgaaaacagtaaccatttatatgctctgaaggtcagtgcagggccagacacagcagcactcacgcttgacatagctgatgttgctggcatgtctcatggagctccttcagctcccgctggaccacttgcttcagctgctctgaattctggtccagatgcctgggcaactctccaatgaagggcaccagcttatcctccaggtcacccatcttagaagacagaaggcagtgagagacacgagttccagtttgtcctcgcaggttctaatttgttttactcccccatgtcacattcatctttccctcctgactgctggccctgaggatttcagcctcttaataccagactctgaagcagcaactatacacagaatgcttaaccagcttccacaattgtgtaagtataatcccttagtaaaagctttattctgtatcacttaacagaattctgcttccctgactgaactccratgtgataaattaaatggcaacgttcttacttctaaaaggtaattgaacatgagattgtatttctaatttaagtcactattatgtaaacctgaccaaggtgaagttaattcctttgaataaaaaaataccaagcattactttaagaaagatgaaaatatctttccttaaagggacacaggacaaacagaattagaagaactcctcagctctcatctgtaatcctgacactttgggaggccaaggcatgcagattgcttgagccccaggagtttgataccagcctggggaacatggcaaaactctgtctctacaaaaaatacaaaaattagcggggtgtggtggcgcacgcctgtagtcccagctacttgagggactgaggtgggaggagcacttgaacatgggaggtttagactgcagtgagccatgttcccatcactgcactcgagcttaggcaacggagcaagaccttgtctcaagaaaaaaaaagagcttctcctaactctgcttctagctcatcaaactattatctatcatttctaaggggcaaaaatataagcattatgattcagaaaagacaacagaagaatactatattccagcatacacaatgacattatgaaaattatcttcaagctgtaaatccctgacttaagacttgcctttatatttgggttcagtaaaatcaatgcagtctcaagagagagattccattagcatgtttaaagctgtaatcatttcaagtatatttgtactcagtctcaagaatgaatgcattaaaatgaagaaactggtaagcatggagaaaaggcaagcccaaagaacatgaatttagttgtatcacgactgtggggtaagagaaatacatcctgatcaacaactgtgaactttctcatcattttggtttgattccttgcttctttgataccattactgaacatctattattacaaaagtatattatataagcctaccaatgaaaacccaacaaccatccaaccaggtgtgtattatctttgttttacagataaggagacatgcccaatgtaatacaccttgtaaaaggctgagctcgggataaaccccaggaatgtcctgtctacaaagtttgtgctcttaaacattatgtaacaccacaaatacgtccattcccactgaggacatctatgtcactaaacaactctcctcttctgtactctgctctaattccctgcttaccaagccgcctgcagataattcagcttcacagtggccctcttacacttactacaaaaattctagtaaaacagaaagacctcatgttgtaaatgtaatactttttcttggtataaaaaggaataaatccatgatgtaaaatacagaaatttaaaaaatgaaaaccatgtaattcaggaaccctgagatgcacttaaaactggcaaatttacttctttcaagctttaattaaatggaataataacagcagcatcagcagctagcacttctgctaggtgtcaggtactgttctaagggcgctatatgtgttcagttagttaaacaaaacaacaactgaataaggtagacacttttgttccattttacatgtaaagaaactgaggtataaggaagttaagtggcttcccaaggtcacatctaataaatgctagagctaggatttgaacccaaggacttgagcttcaaagcttgtgctcttaaccaagaaattacactgcctctacatctgaattgtggtatacaaagggcaattacccctattccccacacaagcacagcctgagggctgagacagaggaggcgaacagggagtggctgagcctgtatttttagaggcacttctccctaagatactcccctacaccccaagaagctactttgggagggctttcactaccacttgccaggatttattacaagctggtaataaaagaaaacacttacctaaattatctaaaaataccgtgttaaattcttttccaaacttcctagttctttcactctcacaagaacaaaaacgttacagcaaactcatgccagaaattacaataggtgtttgttctttatttattaattattattattatattttttttctgagatgggagtcttactgtccacccaggctggagtgcagtggcacartctcggctcaccgcagcctccggctcaccacagtctctgcctcccaggttcaagcaattctcctgcctcagcctcccaagtagctgggactacaggtgcccaccaccacgcctgctaatttttgtattttcagtagagatggagtttcgccatgttggccggattggtctcaaacccctgacctcatgtgatccgccagtctcagcctcccgaagtgctgggattacaggtgtgagccaccgtgcccaacccgatgtttgttctctaaatcattacatttgatttaatttaatactatagtagtcagagcttattctacaaccttcatttcagttatatttagtaaatctaacaaaatccagtaattatttcctaatataagctaataatcatatcaacttaaattaattttttgaagtacattgaaattttatgataactttaacttttgatcatgaacatagaggaacctctctccgatatacttcagatgttcaccaaaaaatgaccagaatttaaccagcaaatactgtatctacatagcatcacctcatattcttaaagtactccactatttccagggaatgaatgaatcttaactgtatacatttactaaacatccaatgagtkgctgctatgtgcacagcactgtgctaaagtattgtaggaagaggaatgtattttgttgacatactcttgctgtttttaatccagcaaggtaagcaattctgcaaagtgcaggtatcactgtttgcttgatacaggagtcagtaatagtgttcttggtctcaaggagtttgcagcattatgtgtgtgacaggcttaagaaaatcacagtacagaggttgtgcgcggtggctcgcgcctgtaatcccagcactttgggaggctgaggcaggcagatcacgaggtcaggagatccagaccatcctggccaacacggtgaaacactgtctctactaaaaatacaaaaaaatgtagccgggtgtggtggcgggcacctgtagtcccagctacttggggggctgaggcaggagaatggtgtgaacccaggaggtggagcttgcagtgagctgagatcgcaccactgcactccagcctgggtggcagagtgagactccacctcaaaaaaaaaagaaaatcacagtacagtttgacactactgtcacaaagtacatacaaagcagaattagcaactgataaatactcaattctggcaaaaaggggagtagagtctcctcagtgaccatactcttacctctccttgtttttctcccctcctggagaggaaggtagaagggaaaggtggaagtgatcaaccaacctggttccaaccttttctattcaagactttcttccgtaggatgttatttgggcactggtagttaacaattcactagtaagccaattccactggtttaaacagtggctactagtaaatactttatttccttttagttcttggtatttaggcaatacagaaagaatctagagtggccagaaggatcaatggcatgatttagtagtgctattcagttaataaataatttctgcagaaaaaagtacccaagacagtttacaggtaagtaggtaccaaaatgagatgtaccagtaagagccataagaaagaaaggttagtgattkgatccaagataaactagcttatccatagctttttgctttctattcctatagttgcttttcttttcttttmttttttctttttttttttttggagacggagtctcactctgttgcccaggctggagtgcactggtgcgatcttggctcactgcagcctccacctccagggttcaagcgattctcctgcctcagcctcccgagtagctgggactacaggcgcacgccgccatgcccagctaattttttgtattggtagagacagggtttcaccgttgttgcccaggctggtctggaactcctgaactcaggcgatccacctgcctcagcctcccaaagtgccaggattacaggcgtgagccactgcacccagccaattagttgcttttcatttctaaaagcaggctggacactatctttacaaagcaayaatatccctccttaagaaactgaagaggtggtaatagaaagataaatctaacccagaacagagcagtagctaaataatctttccctttagttcaactatattcatcactgattaaaatcacaaagaccaatcaccattaaaggacaacgatataccaatcctagtatttgctaaatccttctccttgcccctttttatcatcctattcttctgccctaaatctagagaaactctactttctagtatactaagtgattgttttatggttaccatggacatctgtaaccatactcgcaatacataccaccacagtgaaaaatgtgtggggtttcattatgaaatgtgaatcttttcttaactggtgttaaataaaaaattattctgatgtttgttaaaactataaggaaaactttactcaagactattgtaataggggtattaccatagggaagagagacaggctcaactctgaatattgcaaagatggctagggatttacaggcaaggagcagagtgagagggtcaatagatggaaaagtactaaagaagacatcaagggtaaggtggttcttgcaaatgacaggccaaggactcagacatcaaagatggggggtgaagaactcaatcagctctcaggggtggtcagatatcaagggtgatatctcaccaaactgacttagcaagattctttgctaattcggagttgtgcargcccagtaagggaaggaaggaaatagagggccaaggtcaaggcctagtagagaacaggactctgagcagcctaattaaagtttgtcaagagtctttgtcactagcactggcgtctcccctttaccaaacctttctctcatatgccagataaagtgtatataaatactgtattaaaagcgctttcaggctgggtgtggtggctcatgcctgtaatttcagcaatttgggagacagagatagggtggctcgcttgagcccaagagttcgaaaccagcctgggcaacatgtcgaaactcccatttctacgaaaaaatacaaaaattagccaggcatggcagtgagcacctatagtcccagctactcaggaggctgaggcggatggattgattgaacccggaaggccaagactgcagtgagctgtgatcacgctactgcactctagcctgagcaagaacctatctcaaaaaaaaaaaaaaaaaaaaaaaccatgagaaagcagcccactgaatttaaaaactagagtgtttctaaagcatgcaggcacacagaaaatatttaatacagatctcatcaagttgaccctccatctaaatcctccaagagcttctgcggcctccaggactggttcttgctatggcatgtaaggccctgcctaatctcaagccaggccctctcactaaatgctgccctcttcagggtgatgttctcctcttctccacttcacactcagggactttgtgcaaatgcaccttccaccccgaatgccctcgtcttcccaccaactcaactttccacagagccacttggtgaaggagtacttatctttcaagcctcatttcaaaggctttcttgagcacctggcccgcctctccttccttctttactctgtgttctmatcagctggatgacaaggaactgcaactttctactatacttgtttgtctctatgtctgtctcccacttcaggctctgagtcactccagagcagggaacaggtttcatttgtctttgtatccttatcatcttcaattgtgatgaagcgaatagaaaaggaaataaaagcaaaccctcttttcaaattgtgaaagcagcattgctgatcccaaaaggaaaggtagtcttgttaaacctgtcaccatatactttacaggtagttmactataatttggtactgtggctcagcttctaatttgtttaccacctggactaacctgatacagtggtcaaaacagtattaaataacactttctcaggagaaagattcagyctaaaactaaaggcactgtcttaatctcttttccgttgctataacagaatacggcagactgagtaatttataatgaacaaaaatttatttagctcatgattctgtaggctgggaagtccaatatcaaggggctggcatctcgtgacggccttcagcctgcgtcatcccatggtggaaaggcagaagggcagaagggtaagcaagtgtgcaaaagagaaaagcactatgggcagggcttgctttataacaacccactatcgagataactaacctgctactgagaaaacattaagccattcgtgagggctctgaccttatgacccaatcatctcttattaggccccatctcccaccactgttgcattgggtattaagtttccaayacacaaacttttgggaggcacattcacaccacagcaggcaccatatggtaaactcctttttcggttgccatctcccttcccactttattgttaaccacataaatttgaggaaagggaagggaagaacatgaaattcctctttaaaccctttcttmtatctcacacctataacaaccacatgcatgtaccttactacttacagaaaattccctgatattttctactgttgtcatcacctacaaaaggattgacttatcattttttccatcctactttctaaaatatagccatcaactataattgtcttttcattttcatcataatatgaggttaattacaatgtaatcatcatcatcacataaatcagtgttttccaaaacctatctgtgtaagaattccctaagggtttggagaaattcctagaccccaccctagaaaaactgagcaagaacaaagattgggagggagcaggagttaagaaatgcaaatttgaaacaatctcctcaggtagttcataaactcactgtatttgagaataaataaataaaatagaccttggtttattaaattgttgagtaccaaaaaatatgccaaacactatgctaggtaataaaggatatacagaaataatgttgaaagtggtccatggcctcaaaatattttcaatttagctagaaagcagaagtttatacgcagaagaattagagaacaacgctaaactctgtggcatagaatggcctctaaactacagtccaaggtatttttagcttcaaaatgtgtaagtatgcattcccatagaaatgctaataaattacatatgaattactttataaatagattatgcatattaaaaagtatagtataaaaatttttggaaatatattgaattctaatggtacaaacttttcagtgattagcaaaatattattaatgttatacaatacaaatgaatgtttcttgagttttgtaaatgttggcttaacaatttgtgataaagaactgaaagactgattataagtccagtttatgttgctacttaatttcaatgactgtcatggctaatgagagcatctcacataaatggaagcagtggacaactgcttgcatttatttaattatgatgctcatagttcgatctattcatcaattatgcaaaagttctgttagatttccactttgcctgagccattcttgaaaattaatcattctaacaattgtaacaaatgatttcaaaaatctagtaaattttcaaatgaaagatttataaacagaaaattatgcacattttaaagtatacagatacgagaatttcagaaatgatacatggtttaggaacataagtatggaaatttacataagtatggaacataagtatggaaatcccataagtatgtaaatttctgaagacccatttacaaaaaacttattccagaatttctacagtgcagtaggcatgatatcataaggggtactccaaaatagtatctattttttaaatgaattactgaactataagagagtaagagagacctccaagggcaaaacaaaaacaagtaaacaaacataaaaaaacaaatcaacaaacaacagctaaaagttaaccacaaaagccttagttaccctggagtcaaatactaagtcttggactcactacagggtgagagagctgaacctacaactcccaggaatccctacaggagactaaagtgccccacgtcagtaggggttcccagcagaagcaacccaatccctttctgaaggaagcatcctcaatttaggcccccaagtttcacacaaataacaatcaggcaaagaggagttcaccatcaaataccagcacattcaataagaaacaaccatagtgaatgacaccatcaaataccagcaattcaataagaaacaaccatagtgaatgagaattagcagatatcaacaataaatctaacctcctagggacttcagataatggaattaccagaaacaaattactatatattaaattgcaaggatgcaaattactatatattaaatgttcaaggaaatgaagatgaaatcataaaataagcaaagtccaagaatctacttaaaaaggcagacaagcttaagagaaaaatcttaaaacttagaaattaaaaatatgataaatgaaattaaaaattcaacagatggggaaaaagagtggagcacggatccaatgctctgatttttaggggactgccagagggactggttttagatgctgatagaacccagcttacactagaggtcactacaaaaaaatcaatgaaacacataggaatacagcaagagaggataagagggacaaaaacctacaagayggaaaatagttaacaaaatggcaatagtaagtccttccctatcactaattgcaccaaatgaagatggattaaacactgtaatcaaaagacagaattgttgaatggattaaaaatataacatccaactatatgttgtgtacaagagattcactttagatttaaggacacccacaggctaaaaattaaaggatgaaataaccaaaagagagcagaggtagccaaacttacatcagataaaacagaccttatgtcaaaaactgtcacaacagacaaagaagaatattacgtagtgataaaagcatcaattcatgaggaagctataacaattataaatacatatgtacccaacatcagaacagaagcaaacatgacagaactgaaggcaggaatagacggcgacacaacaataaaagatttcaataccctacattcgataatgatagaataactagacagaagatcaacaaggaaacagaggacctgaagaacactatagaacaaattgacctaacggacacgtagacatacagagcattccacccaatagcagcacaatataaattcttctcaagcacacacagaacattctccaggacagataacaaaaatacaacagcaaaacttatgggatgcagcaaaagcagtactaagagggaagtttatcgtgatttcattaaaaaaacacctacgttaaagaataagaggctgggtgtggtggctcttgcctgtcatcccagcactttgggaggccaaggtgggcagatcacttgaggttgggagttttagaccagcctggccaacatggtgaaaccccgtctcttctaaaaatacaaaaattagccaggtatggtggcaggcacctgtaattccagctactcaggaggctgaggcagagaatcacttgaaccgaggaagcagaggctgcagtgagctgagattgcaccacagctctccagcctggatgacagagcaagactctatctcaaacaaaaaaaaaaagagagagacttcaaataaataatctaactcaacaccccaaggactagagaaagaagagcaaactaagtcaaaatttagcagaagaaaggaaataaaaaagattagagcagaaataacaaattagtgaatacaaaaacaacagaaaaaaatcaacaaaagacttggttttttgaaaagatcaacaaatttgacaaacctttgactaagaaaaaaaagataggactcaaataaaatcagaaatgaaagaggaaataatacaactgatgccacagaaataaaaacgatataagatactaccatgaataatcatattccaacaaatcagataacatagaagaaatgtataaattcctagaaacatataacttaccgtgatagttaattttatatgtcaatttgactgggctgaggaatgctcagatagctggcaaaatattattttggggtatatccaagagagtttttccagaagaggttagcattttgatcagcaactgaacaaagcatataccttcatcaatgtgggcaagcatcattcaatccattgagagagcccgattggaatataaagaaaaaaaacggaaaatttatttctctcttcttcagctgggatatccatcttatcctgcttgcaggcattagagctactggttcttgggctttcagacacagactaaattatatcactggttttcctggttctcccactttcagatgaaatactgtgacacttcatggcctccataatcacatggaccagttcccataataaatcttctcatatatctatatacagcctattggatttgtttctctggagaaccctaataaacctacaaaaactaagttatgaaaaaatagaacatctaaacaaagctataactagtaaggagattgaatcaggaatcaaaaaccttccaacaacgataagcccaagaccagatggcttcactagtgaattatactaaacatttaaagaagaattaaaaccaacccttttcaaactctcccccaaaaagaagagaagagaatacttcttaactcattttataaagccagcattaccatgataaaaaaccagaaaaagtcactacaggaaaaaaaaactacaagtcaatatccctaatgcatatcaatataaaaattctcaggaaaaaaaaaaacctagcaattcaatttcaayggcacattagaaggatcacgtaccacgcccaagaggcaattatccctaggatacgaggatggcacaacatacaaaaatcaatgtgatatataccacattcatagaaggaaaattaaaattgcctgatcatctcaatagatgcagaaaaagcactgacacaattcagtaccctttcatgattaaaaacaccactcaacaaaataagaatggaaaaaaattacatcaacataaaaaagaccgtatataaaaagaacattgatgcaaaaatcctcaatagaatactggcaaaccraatccagcagcacatcaaaaagcttatccaccatgatcaagtgggcttcatccctgggatgcaaggctggttcaatatatgcaaatcaatcaatgtaatccagcatataaacagaaccaaagacaaaaaccacatgattatctcaatagatgcagaaaaggcctttgacaaaattcaacaacacttcatactaaaaactctcaataaattaggtattgatgggacatatctcaaaataataagagctatctatgacaaacccacagccaatatcatactgaatgggcaaaaactggaagcattccctttgaaaactggcacaagacagggatgccctctctcaccactcctattcaacatagtgttggaagttctggccaaggcaattaggcaggagaaggaaataaagggtattcaattaggaaaagaggaagtcaaattgtccgtgtttgcagatgacatgattgtatatctagaaaaccccattgtctcagcccaaaatctccttaagctgataagcaacttcagcaaagtctcaggatacaaaatcaatgtacaaaaatcacaagcattcttatacaccaataacagacaaacagagagccaaatcatgagtgaactcccattcacaattgcttcaaagagaataaaatacctaggaatccaacttacaagggacgtgaaggacctcttcaagaactacaaaccactgctcaaggaaataaaagaagatacaaacaaatggaagaacattccatgctcatgggtaggaagaatcaatatcgtgaaaatggccatactgcccaaggtaatttatagagtcaatgccatccccatcaagctaccaatgactttcttcacagaattggaaaaaactactttaaagttcatatggaaccaaaaaagagcccacatcgccaagtcaatcctaagccaaaagaacaaagctggaggctacctgacttcaaactatactacaaggctacagtaaccaaaacagcatggtactggtaccaaaatagagatatagatcaatggaacagaacagagccctcagaaataatgctgcatatctacaactatctgatctttgacaaacctgagaaaaacaagcaatggggaaaggattccctatttaataaatggtgctgggaaaactggctagccatatgtagaaagctgaaactggatcccttccttacaccttatactaaaatgaattcaagatggattaaagacttaaacgttacacctaaaaccataaaaaccctagaagaaaacctaggcattaccattcaggacataggcatgggcaaggayttcatgtctaaaacaccaaaagcaatggcaacaaaagccaaaattgacaaacgggatctaattaaactaaagagcttctgcacagcaaaagaaactaccatcagagtaaacaggtaacctacaaaattttcacaacctactcatctgacaaaaggctaatatccagaatcttcaatgaactcaaacaaatttacaagaaaaaaacaaacaaccccatcaaaaagtgggcaaaggacatgaacagacacttctcaaaagaagacatttatgcagccaaaagacacatgaaaaaatgctcatcatcactgaccatcagagaaatgcaaatcaaaaccacagtgagataccatctcacaccagttagaatggcaatcattaaaaagtcaggaaacaacaggtgctggagaggatgtggagaaataggaacacttttacactgttggtgggactgtaaactagttcaaccattgtggaagtcagtgtggcgattcctcagggatctagaactagaaataccatttgacccagccatcccattactgggtrtatacccaaaggactataaatatgctgctataaagacacatgcacacgtatgtttattgcggcactattcacaacagcaaagacttggaaccaacccaaatgtccaacaatgatagactggagtaagaaaatgtggcacatatacaccatggaatactatgcagccataaaaaatgatgagttcatgtcctttgtagggacatggatgaactggaaatcatcattctcagtaaactattgcaagaacaaaaaaccaaacaccgcatgttctcactcataggtgggaattgaacaatgagaacacatggacacaggaaggggaacatcacactctggggactgttgtggggtggggggaggggggagggatagcattaggagatatacctaatgctaaatgaagagttaatgggtgcagcacaccagcatggcacatgtatacatatgtaaccaacctgcacgttgtgcacatgtaccctaaaacttaaattaaaaaaaaaaaaaactaggtgataggatgatctgtgcaacaaactatgccacatgtttacctatgtaacaaatgtgcaaatcctgtacatgtacccctgaacttaaaaactgaaaaaaaaaaataacaatagatacacttagagacttatctatggagatactcatcaaggttatttacagtaaagaaatggaaaaaccttcaatatctaacaagagaggactggggccgggcacagtggctcacgcctgtaatcccagcactttggcaggctgaggcaggtagatcacccaaggtcaggagcttgagaccaacctggccaacatggcgaaacctgtttctactaaaagtacaaaaattagccggccatggtggtgtgcacctgtaatcccagctactggcgtgtgcctataatctcagctacttgggaggctgaggcaggagaatcgcttgaacccaggaggtggaggttgcagtgagctgagattgcgccactgcactccagcttgggtgaaagaataagactccatctcaaaaaaaaaaaagagagagaggactggttaaataaatgctagttcacccactctaatgtagccattgcaaatgataaggttagaaacttaaggcatggaaaatagtcataattgtataaaatgtacacagtagtttataaaataaaatgtattgtgtgggaaaaaaaaaaaagcccacaactaatataaataacactcagtggtagaaaacaaaggtttccctttaagaccaagaacaagacaaggatgcccattcttgccacttctatttaacatagtattagaagtcctaggcagagcagttagacaagaaaaaaataaataaataaaaggtatccaaatcagaaagaagcaaaattatcactgtttgtagacgagattatcttatatgccgaaaaccctaaggattccaaataccaaaaaaagaactgctagaaataataaacaaattcaacagtttcaggctacaaaatcaacatacaaaagtcagttacatttctatgcactaacaaagaactaacctaatggcattttttacagaaacaaaaaaaaagtataaaattcatatggaaccacaaaggaccctgaatggcctaaacaatcttcagaaagaacaaagttagaagcctcacacttactggcttcaaaacatattacaaagctatggtaatcaaaatagtatagtaatagcttaaagacagagatatacactaagaacagaatagagagctcagaaatgaacccatgcatacacagtcaaatgattttcaacatggatgccaaaaattcacaatgggtaaaggacagtcttttcaacaaatggtgctgggaaaatggatatatatatgcaaaagaatgacactggaccctcattttatatcatacacaaaaactatctcaaaagggattaaagatttaaatttaagacttgaattataaaatccctagaagaaaacataggagaagrgcttcatgatattggtcttgacaaagatttcttgtatatgatatcaaaagcacagccaacaaaagcaaaaatagacaatcaggactaaatcaaactaaaaagcttctgcacatcaaagaaaacaacagagtgaaaaagcacactacagtatgagcaaaactatatgcaaacttgatttaaaaaaacttgatttttaaatgtgcaaaggagttgaatagacatttctctaaagaagacatacaaatggccagcaggtacataaaaagacggtgaacatcacaaatcatctgggaaatgcaaatcaaaaccacagtaagatatttactttacaactgttaggatagctataattttaaaaaccataaaacaaaataaaaacagaaaataaacattggtgaggatgtagagaaattgcaacccttgtgcactgttggtggaaatgtaaaatgctgyagctgctatgaaaaacaatatgaagtctcctcaaaaaattaaaaatagacttaccatttgacccagtagaactaccatatgacccaacaatagaactaacatacgaccatttctgggtatttatccaaaaaactaaaatcaggatcttgaagagatctttgcactcccatatttactgaggtattatttataagagccaagaagtagaagcaacccaaatgtccacccgcagataaacagataaacaaaacaaggtacataatacaatggaatattattcagctataaaaaagacagaaatcctgtcatatgctataacatggatgaaccttaagagcattgtgctaaaatgaaataagccagttacagaggataaatgttacatgatcccatttttgtgaggtatctaaagtagtcaaactcatcaaagcagaaaataagaatggtggttgccagggtctggaaagaaagggaaatagggagttgctgttcaatatgtacactgtttcagycacacaagatgaaaaatttctagagatgtgctgtacaatattgtgcctatggatgaaattggaggtcattatgttaagtgaaataagccaagtacagagagacaaatatgttctcactcatatgtgggagttaaaaaagcgatctcatgaagatagagagtagattggtggttaacaaaggctagaaagggttagtaggaaggggaggatgaagagagattgattaatgagtataaacatayacttagaaggaaaaagacctcgtgttcaatagatcactgaggtgactatagttaactaatcaattgtacatttcaaaatagctagaataattttaatgttgctagtataatgaaaagatcaatatgtaaagtgatagatatcccaattgccttaatttgattatatgaatgtatcaaattaacacatatacccccaaaatatgcactaatagatctaatacatatcataaaattaaataaaaaataagacgtgaaaaaataaaaaaataaaattgccaccttaccaccactaaaatctactccctccccaccaaaaatactgtactgcacacttaaaaatttgttaaaagggtgtatctgatgtgtgctttttaccacaatgaaaaaaaattcaacagataggttaacagggttatatacagctgaagaaagatctaaacatatatggtaactatagtataggttatactacagattggagtacagataaacagtgaaataggaggaaaaaaataaatgacaggttaaacatgaaggatagaatgataaattttcgcacatctaaccagagtgccagaaatactatgcagaacagaggtaaggtaacattcaaagacataatggttggtacattcccataactgatgagacatatgaatccacacaagatagagacagacagaaaggatcacacaccaaatagcagatgactcctgaacagaaacaatgtatatcaatagacaatggaatactaccttctgagtggtgaaagaaatcaaactatcaacctagagttacagactaagcaaagctatcgtttaagaattagggcaaaatatgtcttcagatctaaaaaagttcatcactaacaatcctgcaccaaaagaacttccacagatattcatcaggaaaagagaaaatgacacccaaaggaaacaatgagatggaagaggaaaaataataacaataataataactttaaaatcatgtgtctaattctatatgaactggatttttataaaaaaaaaagacgtaataatagcatgtaggtcagaagtgaagtgacaaacattaaatacatttcttcttccaatgtattgccctgcacacccactttagagaccactgatgtgtactatatacatccaccactgttcagctacaacaaacaacaatattagctgcaatcatttcagaagtcttgttaaaacaatgagacaagccataaaggatttgtaaatttgatatgaagggacaagtgcaaggcactccacacagaaaacagtaaaggttcagaagtagggatagggacggcataccctgttcttcctctaataaagtatcttataccatttcatatgctcttctaaaatctatttttttttttwwaaaaaaagggttcacactctgtcacccgggctggagtgcagcggtgtgatcttggctcactgtagcctttatctcctcggctcaagcaaccctcccacctcagcctctctagtagctgtgaatgactacaggcacacaccaccatgcccagcttatttttgtatttttagtggagacagggtttctccatgttgcccatgctggtctcgaattcctggattcaagcaatcctcccaccccggccccacaaagtgctgggattagaggcatgagccactcttctaaactctttaagacacaaacaaaacaaaagaaaacaaaaaaacactttctcgaagtaacagcatgagtacagtaatagtggaaggtgtcagattttcattattcaccttgaaggatagaattattaaccttgggtaggtcactaaattttctctctgaaggcttcattcagcctctcaggttgtaatacgtaatgtctaccctcaccaatgtcaccaatatattttgatgataaatgaaaaaattcaaagggggtgttacagcactgatttcttatatactgtactagtcactgtgctgggcactggcaacacagactaagggagacaaagtcaggcaattagatgmtatgtgataggtactgtgacatgtgaaggatgcacagaaaatccaaggatagtgacaaaggtatgctttcctctcgcttcttcatgccattaacaatgattctcaaaagacaaactactgatggcaaccttagttacaataggtaatcattataatcaccgccatgaatttcagtatgtcacaagactcaacatcgagtctttttttattaaaggctttttagtctaactgaattcaattttaaaacattccaagaagtagtcaaaagagttttcttcatactgatcaaaatttcatcacagaaagctaggctgagcatttttgacccattaataattagcataatcggagtttttcccaaatactaaattttttttcttgtttcattaaaaaacatgtaagagtaatgataatatattatctatatccatggtggaattatccaaataaaatctaacaaaagaaaaaaagagaaatcttttttactctttttctggacttactgtttataatctaaaatcaaacacattttgcatagattctattatctgcaacacattttttttactttactacaaagtgtttattgccttaaaagttaatcattggttgtcctgttgtatttagcccgttgaggcctattaacaaggcacacacaaatctttcatcaaagaaaatactcctgaaaaagtacacatagactgttcttagagaaaagcaattctttctcattctactatatatagcagtagtatataagagatcagtgctataatattcctcttttgggatttttatttatcctgaatatatattagtgacactgagaagggtagatattatatattcccaaggacacaaaatccaaatacgttatatggatgaccaaagaaatgtttatattaactgcaaacgacaacgaaatatcaagatggtgttttaaattactgtatttgttgattttaatttctaaggaaaataaaatgtttttagttagtgtccttgatataccaaaggacttagaaccctttaatagtcatatgaatataaaagttttgtaactatttttaaaaatatgtcatgtaattgaaaatgactataaacaaaaatacattttggctgccatactggcattaatatattagctaacaagcaggcttgttactttatttcatcgatgagaagtaaaaatggatgatgccatttactaccaactagagaataaagagagtcaccaatggtgatttcgtagccatcagtggtggcctctttgataaacacctataacacctataaaccaatttagccctatttacacaatgtcttctaccatacattacttgtttgggattattatctcttctgtaagctccttgcagggagagactttatcttaaacactacttctatatccccttcccaaccctttacctaaaaaatgaacatgctgagtgcatacttattaattgacaggtgtcatataatagatattttccacagcaattaggagaaaataaggtgtgggtaaagtaagctaaatggagatatcattatgtacaacacaataaggcacaagaccataaaagtgactttgaaataacatgttcagaaacagcaaatcagtttatacagcataatcattttcagaaggtactcacaacaaaatttatcatactattattgcttagctttaaaatccttttttgtgtgttcttacatgagaagctgcattttgtgctattccttaatgcatatttctataattatatctcatgtctttatgaagtaccttattcatacaagtatgagaaaagctatactattcaaaatctaaaagaaaataaaaacaatgtatttttccactcctcctgggttaacacatacagtaatttgctaataaaaacaaaggttatcatctgtcatacttttcattcacactcttgaatgacaggcatttttttaatgttcctgttagaaaaattctgtgccaactcggctttaaaaccaactcaaaccaaaatatccatctttttctctgaacttgttcaatctctcaatcaaaattatgtatcaattatattttctaaaatagttatgatgcaaatgaagttctaatttatgatagcagcagccttacactatctttcccattttaaatgcacggcgctagggaagacaaaagcatactctgaaacatcttcacaggtcctctaacaatggtctcttagtagaatttcttctctctttgtatagttatattaaatttctgtgcttccctcctaagatgaaatcatctgtttatacccctccaacaactcagaagtgagcttgtatcctttctctcatgccttttgtctaagaacaccaaagcgcttcgttattttattttaccaaccccatgaagtcagtggtatatcaaaagctggacggctgatgagataactagacagagagctctggacagctgaccaaaacttagtacccctctaggtccttaaaatcagtcggaaaatcagccaagccctatttacaggtcttgagtgttttaaacaaaaacaaaaacaagaaaaccttcccacaaaggaacttgcacacacacacacaactgtacttttcagaaggtggaaatacaagggatcttgttcttttcgtttttcaagagtttaaaagcccggcacatctgcatcttgataacagctccagagggcaatctgatcaaagacacagaaaatccctcctttaaagatgtgcaccttgtgacactccaaggaggagagatatttaaagtaaaacctgccctgcatcattatcactgacttaaggaagagattaaaaagcccttggcttcatgtggcttttcaacattttgctgtaaccccagggccatagatgctgttcgtgaaattcttctactcatccctactaagagtgtcacagcagtataaactcatacacaaacacgcacacatctccacttccattcccatccttctcgctttggtgcccatgacccaaaatgtggacacaatgttacaaaaagcaaagtcatggggcaatgcggggggaggaggggagagtgcaaaggattgaaagatccagaaaagcaagagtgtgagaggtagccggctcgtctgctattgtaaagcaagcattcattcgggtgggggcacagaatgcagaggtagaaataaagcaatcctgactgcccactctgccatcccattctgcttctctgccctccatcaccccatccgcccctggaggaccacctccgagcgagagggcgccacttacggttccctaccctcacccttgaggggaaacaagcgaaatggggttggaatgaagaatagggctgagcagtgggtgagggtcacgccgggctccaggtggagaccctgccgcgggtggccgcgccgaggcacgggggacggcccaagcgcgggtgaagtggggatcagaggagggtctcgcccccactgctcccgagggaggctccggttactcacattttccgtgtcccgctcgttcaccgtcggcaatggcgtccgggccgacattttgtgcgggcagcggggtctggccggggtctcgccggccgggctgtggtgcgggccccggggggcgacaggaaaggggtgcggacgcgagcacaaggccggggcgagcggctcccgcaggccgcggggcggtgcaacaagcggccccggcgggggaaagagggaagaggacgcggaggaagaggagggggagccgcttcccgcggcggcgccgccggggtatgcggacagtaacgagggagggcttcgggcgaggcggttgcccggcgctggcggggcggcgaggctggcaggatgaggcgtggaaggggagccgggaggcggtggcgagccccgctaggctctccggaccatgggtgaaggtgaagccggtgcctcaaatcactgcctggctcgtcctggcgagcgcctgggcgtcaggaaccgcggccctgacagcgtcacccgcgccgcgccccgttctccgcctcaggtgtacggcgccgcccgacccagccgcatccacgcgcccggggcccagcggcggcggcgcccgatcccccggcgcgaatgtctcggctcggtccgcgcggtcacagccaccgccgccgccgcgcctcagtcaggaggagcggcccgagccggctgcgcgcggagcagcgggcgcggcacgcagcgcccagaggcacttggcggccgccgccgggtgggcgggcgccagccgagggggcctctccattcattccctcattagggatgcggggccgcctcctcctcctcctcctcctcctttttctcctcctcctcctcccgcgctctcttgcccgcctgtccctgtgtttatttttgtttcgtgccccacccgcagagtttacggtcgtctaagagcctctggtggttttatttttattcgtgtttggtttttgccgggttgagggtgagagagagctgatgtgaatcagtggctttttttttctttttctttctttctgttttttttgtttgtttgtttgtttgtttgtccgtttcattggagaagaattggattcaatcctaccctggatcctacccctccttttctcctacctcgggacttttaccattcttaaattctactcctcctcccccgtttccacgctttctcaatccctatcctcgcctgagccctctgtcagtctccttctctagggagccgttaggttcagggtcaccctcagagtttggcaaaaagcacagaagcccctagaagcgccagcagcctagggaggcggctggagactcagtacaagtgggtctcagcccccgacggcgcggcctcttcgggaatggggccggcggaagacgtctcgctctgggcgccctgcagcaccctcggagtgggtgagacccgcgagtcacaacatctacactggctgatcgtcacttcctgggacacaaggaagtgtcacttaggcgagcctgtttagggaggatggagagctgtgtctgatttgggccctgtcctccctcttccaggtggcttcctcacacttccacccacctgcctcaagacatcctgtaggcacccgcgtctgtagtgcattgtccaggacccattcgccttttataagcaaggctgcatttttttttaatctcatttgagagcttacattttgcacattcagcctgtagaacgaaaaccttatcgtctctctattcttctttgcaacatttctttttcacttcctttcatggatgggcaggaagacaaaaggaatgaaagataggagcggatacattgattttctgagctgcttcagtatgcctccagtggaattcttataatggtgggaaatttctcgtctcttctgaatttcctccatttgaaagaagaatccctgaaccagatggtttttatcctgactcattaaaggttgtttctgaaaagttaacacttgacccttgaagcatgggtccaaaagacctgaaaatagcaaacacaaaaatcctttgaggaaagaagcaattctcacccagtctatattcacttctagaacaccatctgtgtacttatttctttagcattttctcttgtaaccacttaccaatttcacaaagcaaatgaaaaaaaaaaaaaaaacaagatccctttggtggtcatcaccacttctcaaacagaatttaggcagcggaactgcaatgctgcctcctgaactatgatgtgttactgagaatgtcaagcatttacgtgccctctgcagaaaatcctgaatcaccaagatacattgaagttgcaagggcataatcctgtatttttctggttattttctggttaactattgcgacggctgcctgtaggggctgccatcacagtgtcagcggcatcactgactgctgcagccacacaagggtacctagtgttgcaatagtacctgagttaacctagcaataaacaagtagctgtgaaaaggcgttcagccccattggaatatgaatcattccttcagctggtagtatgtattttgctctttaaagtatactcacatatttttctatctttataatcgtggtgaccctgacaggcatatttatttccattttacaaaattccactaagttaacttgttcaagatcacagatgcaccaggttaataagatacagaagaagataactgaaatatgtggtgctgttcaatcttgcaccagtcacaaaaaccataggttcaccccataagatataatggctaattcgagacagagcttaaaggagagccccagattctggcacagtggcttccacagattttaaagtgtctgttaaaagccatggacaaatcccttagctatatttgctacacaatgctcactatttcacatattgaaatttacggaatatcacataataataggaagggatatttattgtttaagtcaatccccaagaacacttctaacagtgaaactacattcaaagagagtcattactaggtagctcgaatccataattctagctagccaaattgtttttttggatagaacaattctatccaaaagaaaatgccattcaaataatccttattaatacctaacaattttaagcttggtatgtagtgaaaactaagtgaaaatgcactttgcccaggttaaaaaaaaagtcactatgtttttcaaaaggaaatactgtctgtccctatatgagctcttctccccttaaaatggcattagtagatccttaaacatgggagaggaaaaaaaaatgacatgaggcattattgtgatggagtcaatactgtttaaccctagtccttagaaatgaaaatgctcatgagcaaaatttttttgtgttactatatatagcttctgtgtctgtgactatggagaaatgacaaagggaatattttaaggctttgagtaatttttttttgggttattaaccaaatgtggcatgttcaattcacaggttcctaacttaatgtgttagggtaatgaaagttttggaagaaaattgaagtactgacaaaacaaaagggaaataaagatctaaaaggtgctaaacctacagtgaaaagtgggaaaagagcattgcctaccgtcagccctatggagtagaattttttagaactaccgggtccagtaccagttacatgtgactactgagctcttgacatgttgcttgaatttttaatttgactcaatttcaaataatttacacttaaaaaccgatttgattcagtgactgaaaaattgtgttatgtttgaaagtatgttaagtatatgaatctactttttcaactgtaaattttctgaaatctatataccgattaagtatttctcatggaaatgtattacctgaattgggatgtgctataaatataaaatgcacaccacattttcaaatagtaggaaaaaaaagagagtaagatgtctctttataaatattataaccatttcatattgaaatgccaatattttaatatattaggttaaataaaatatattattaaatcattttcaactgtttcttttttactttttcaaatgcagatcctaaaaaatataaacttacatatgtggtttacattacattatctctctgttggacagtacttctccatatggtcaaagctgagaataaaaaggcttagttgcttaagaatcaaaggccttgattataagctattaataattcattctgtggtagagtggcacccaataaatgcttgttgggcaccattctaccacatgccatgctgtgctgttctaggggaatattcttcacctaatagttagcggcagtcagtcttacgcattctttttaaagagcaaagtggaaaacatgttgaattcatacaaatgagcattaacagattgcagtcatttgtaaacaaagaatttatcaaatgtgacagattcagcagattaatagtaaactcttaaaactgcacatgtctttatatcatgtgctttagatgtatccaatgtctgatagacttggccagtcaataattatttgcatactttgttttaggtactacaaggctatttacaatctttcatttagccacacaggaaaactacaggatagacagttcggtaaggtaacaaagagcagtctcagctaaagagaaacaaggttaatgtccatcaggaaagaataatcagtccttgtcacaaataaactgggtcctgattgcctgcctgtctggcaaggtgaatttttattgtgtcaacattcactacttaaaatatagaatcactgaaatggacaagatcctcaaaagaaacgatatatcgtatttttaaaactgcttaaagctgttgccttttacattgtatatattgtcatagaaggactgaaaagtccttgtgataatttaacttatacttgtcttcatagccatcagcatatacataaactgtcagacccagcaagggtcagctcaatgctttttttggttatgccactccacacctcacaaacataacctccaagagttgtttactcttctgtttcccacaagcactgtaggttcagcgatgttcgttttcttggaattccccgaacacaccatattgcttgactcctccgtgcatttgtgtcatctgttctgtcttcctggaatgtcctctcctcttttctgcctgatggcctcagagttgatctttaaaaaccttcctttagaaacctatcctgacaccactgtttctccccacacccacagttaattaatcactccctgtgcactacctctgtaccttggacatacctctactgttgctctccttgcactgtgtacctggctggtcccctatccacctgtgcactaggaaaaggaagggaatatgtcttatttatttttgcctagaacctagcacagtgcttagcaattagtagatgcccaatttcctaaatgacttttattgacttgtatgttctcctgaactttcacattcttttaaatttctaagaagcatcattgaaaatataggagaattgaaaatataggaggataattaaagtctacaactgggggatataagagtttacatagtatgcaaagtatcttcccagtaaatgttattgactgggtagcaaagtgactctattctgtctcctacagattaccatagtgccactaattttactgctctgtgattttactgtaattattcatttttatccatacataggaattgctgatcattgatatttcaataagtcttttaaatgagtatctgcataaaccaaggtgtactgtacttggtcaggaggaaacacttcaaaagtaggttgaaaaattaaaaatggaatgacacgacaatgaagtgctagaggcaatagagctggcggtcaaccccagggaacagtcatcagaaattgggtgactcttcctaagtgaaagcctttcagcagactgagcgtcacagtgtcacttggcagtgcaaattggcacagcaaaacaaagaacaagacacatggaagttactattgcagtgagttatgcactggtctttagcaatgctggaaaagtgcaggtgaaaatcaacattcatagcgtgatctcaaaggaacaatggttgcatatgagttcataaatgtatcagtatagatatacccacattattgtaccttccatactgtagttttgtaaagtcacatagaaagcaaaacaatctcttaaaagtcttatggtagcctccctaaagtaggagcttggttgtcttttacttggcatttgtgactacaaattacacataatgtagttcaatgcccttttaaacaggcttgcaatttgagtatttgatttcctagatgacacactaagtgaattgttccctcatgtctttatacttaccttattaatataaaaatgttatttttgtaggttctttttataaactcaatttattcaatgccttcaaattattttttctatgttaaatgtgacatcacttaacattttgttgatttcttccttttctacataaatacaccatttttcactttgcttttcattcattcattaatttaaaaatatatagctctgttaatgtaagggactattctaagctcttcagaaacagcagtagacgaaatagacaaaaatccccacccacatgaagttcacatttttataggtactttcagtgtctagacagttcaaaaccagagactcccattatacaa

SEQ ID NO: 97823 - DNA, 19085 bp, Homo sapiens
tggtagctatagggactccgcaaggcagagccgaagcctccccttcgggccgggagtttgttacagggagggaaacctcccctcagatttaggcccccaaggtcagcacaggtgccctttccatcagaccaggggtttgtctcacatcaagagcggcacctcctccgctgggctggcaggagagtacggcccccattagactgggggatgccttacccatcagattccttcggggcaggggtggggcctctgctatcagactaggggctgccagggccaggtcttagtttcccctctgtcctcccttccctgtggcagatcaacaccaacctgggtgacctgcagttcctggccatcgacctggtcatcaccaccacagtggcagtgctcatgagccgcacggggccagcgctggtcctgggacgggtacggccaccgggggcgctgctcagcgtgcccgtgctcagcagcctgctgctgcagatggtcctggtgaccggcgtgcagctagggggctacttcctgaccctggcccagccatggtgagtagggagctgactgaccacccccatcccgccccttccctgtccaccccacgttcgttccctgacccccatccctgtacccccaggttcgtgcctctgaacaggacagtggccgcaccagacaacctgcccaactacgagaacaccgtggtcttctctctgtccagcttccagtacctcatcctggctgcagccgtgtccaagggggcgcccttccgccggccgctctacaccaatggtgccactgcgggcgcgggcgggagatgctggcggagggagggaggagccctggggtgctggggaggcagatgggagagaggtgccggccgagtggaagactggcgtgcacacgtgtgtctgtgggtgccgggggggcgtggctcctgcctgagagactctcctgctcccagtgcccttcctggtggccctggcgctcctgagctccgtcctggtgggccttgtcctggtccccggcctcctgcaggggccgctggcgctgaggaacatcactgacaccggcttcaagctgctgctgctgggtctggtcaccctcaacttcgtgggggccttcatgctggaggtggggcccgccctgggtctcagcagcgggagagaagggaggtgggggtgcattgaccccagctcagccccggctgcccctgacaccctccctgccctttgcagagcgtgctagaccagtgcctccccgcctgcctgcgccgcctccggcccaagcgggcctccaagaagcgcttcaagcagctggaacgagagctggccgagcagccctggccgccgctgcccgccggccccctgaggtagtgcaggcccacgggcaccccagacactggaactccctgcctctgagccaccaactggacccctctccagcaacaccaccgccaccacctcccacatccctgaggttggcgactgtctacactcctcccccgagaccacccccaccctggggaagcgttgactactgtcccctaccttggaccatcccgcgtaggggtggcagcccccagctcccctcagtgctgctgtcagtgtagcaaataaagtcatgatattttcctggctctgctgtgcctgtcttgtacctggcaccatagaccctcccacctgcccaggaggaaatgcacatacccccgggtgcccagctggcagcccctgcacgtgtctgcccctggaaccccctggggggctggtttttcaggctggtttttcagcctgacaaccccctggaaccccctggtttttcagactccattggccaactcccctctctgggcctgtgttccctcatctcacagtaataatgtttcctctgtgtccagcatgtgcctggatattccgtttagcttttttttttttttttttttttcttgagatggagtcttgctctgtcacccaggctggagtacagtggggtgatctctgctcactgcaacctccgcttcccaggttcaagcgattctcctgcctcagcctcccgagtagctgggattacaggcatgtgccaccacgcccagctaaattttgtatttttagtagagacagggtttcgtcatgttggccaggctggtctcgaactcctgacctcaggtgatccgcccaccttggcctcccaaagtgctgggattacaggcgtgagccactgcgcttggccccatttagcattttacacacattgtcatgtcatccttccaacaactgtggtactattcccattttacagatgaagaaaccaaggcttagaggttacacaagtagtcagagtggggccggatagctttgactccagcttcgatgttcctaaccctcctaccctcctttggaggacaaggagatgtaggcttgcctgggaggcatttgctagggggcagctccctctctcccaccttaccccctccccgtcccaccccagcatcctgggacatgtttgtgggcagttccttcctcagatgaaatccaggctcggagcccacatctcccagccagaaccacgcgcatcatccctcagggaagggtgggtgcctctgagctcatctcaccagcgggcccctggccaagcccctctgctctagagaggcagcttggccgtctggctcatctgggcaggggagaacaggaaagaccggctgtttcctgccttccaaaagccctggccaacctcattcctggaacccctggtgctatccccaggcctgccagagtaggggctgagaaaacgttgaatcatgctggggagaagggatgtgggtgtgaagatgaaagtcctgccaggaggcacatcacagtggacctctgctcctggcactgtgttgccagccagcgacggttcagggtggtagatgctgtttaagaggaagccacagagaggcctgggttcaaatccctcctctacccttagctgattattcatgaatctgttggacaggtgtgtgccaggcaccaggactaactcaacaaactgaataaaacgggacaaaaacatggtctaaccctgcgagcagttcaccatccagcgtgaaagcctggcagggaaggagcacatctccaaagacgtagtgggagcacagcaaccacagccccatcccctcccctgcccaaagaaacagccaggggaatgggtagaagcagcagagaggacatgggagccaggacacgaattgtcagctttagcccctcagtttcccagtttttcttttcttttctttttttttttttagacagggtcttgctctgttgcccaggctggagtgcagtggtgcaatcgtggctcactgcagcctctacctccccaggctcaggtgatcctcctacctcaacctcctgagtagctgggactataggccagcaccaccacacccagctaatttttgtattttttgtagagatggggttttgccatgctgtccaggctggtctcaaacccctgggctcaagcggtccacccgccttggtctcctaaactgctgagattacaggtgtgagccactgcacccaacctccctccttttttcaagggtaggggacagcatttctgctgggtgagttcctctcttttgccagtgggattgctcctggcagcagtggggtctaagggcaggcagagagggctgggctggcctggcctgagggcccacctctctccaggtgacaaaagtctctgctgccctgcaatagacactggggggcggggcatgggaatgaaggaggcacagggcatatttactccctccctaagactcagagtctaagggaggtgggggaatgactggcgatgaagagatcagatggcaagggtctaaatcaggggccatcctcatctcctcccagcccgcagcccctacaactctcactcccgcctcaggcctaggctcctgggcagggctgaaggctgcccctcacgcagaggatctgcacccccagccagcttctccgggaagagtttagtgtacagttcactcattcattccaccaatgtttgctgaactgctgctctgagccgggctctgaacttaatgagcaaaactgaagatgagcaaaaacagccttggtcctggccttcacggggcaagatgacagtctcatcgggaagagggacagggctcagatggtcacagacataggccaacaagacaactgcaagcagtaaagctagaaagcacaaaaaaaggaaaaagggaaggcccctctgaggaagggagggtttgatctgtgaccccatggaggagacctcagccagtgctcgggaggaagaaacgcctcagtgtgggagggagaggggtttgggagaaaacccccaaaggccagtggctggaggaggaagaggaggcagagccaggctgccataaagggccggggccctggaagccacagggaagttgagcctctaacctgagtgaaaggcgatcagtagaaggggcacgatctgcgggggtgagggaggcaggacccacgtgggagagcccagagtggaggctatcgcagagcccaggcaaatgatggtggtgtcaactaaataagaaatcagccttttgaccaggtgcagtggctcacgcctgtaattccagcactttgggaggccaaggtgggtggatcagctgaggtcaggagtacgagacgagcctggacaacatggagaagcctcgtctctacgagaaataaaaaaaaaaaaaaaaatagccaggcatggtggtgggtgcctgtagtccccactactctggaggctgaggcatgagaatcgcttgaacccaggaggcagaggttgcagtgagttgaggatgcaccactgcactccagcctgggagatagcaagaccctgtctcaaaaaaaaagaaaaagaaaaaatccaccttttggccaggcacagtggctcatgcctataatcccagcactttgggaacccaaggcaggcggatcagctaaggtcaggagcctggccaacatggtgaaaccctgtctctactcaaaaaaaaaaagcaaaaattagcctggcatgctggcatgtgcctgtaatcccagctacccgagaggctgggttgggagaacctcttgaacccgggaggtggaggttacagggagccgaggtcacaccactgcactccagcctgggcaacagagttaaactccatttcaaaaaaaaaaaaaaaatcagccattgaaaaaattaaagttagttttattgagtcttactgaggactgcaccctgggagagggtttcagagagtttctgttagactgcgccaaagcagcatttcagcccacagtttagatacagaggcaggcggttctgtgtgtgctcagaagctatggtcaggcacggtggctcacgtccgtaatcccagcacttttggaggctgaggcgggtggattgcttgagctcaggagtttgagaccagactgggcaaacacggcaaaaccccttctctacaaaaaatacaaaaaaaaaaaaaaaaaaaaaaaattagccaggcatggcggctcttgcctgtagtcccagctacttgggaggctgaggtggaaggatcacttgagcccaagaggtgagctgtgatggtgccactgcactccagcctggatgacagagcgagacccggtctcattaaaaaaagaagaagaaaaatttacatcaaatgtcttcagaagctacactagtgcaaatctcgccaaggtttgggttcgaggatgcacctagttatatagattatagaggcataatcgtcaatcctgtcaggtgctatcttatgtacaggaaaaggcacagccaggatcatttaacttatattttctaacaatgcagtgattcaggcaagaggcgtgggagcctgtgttctgccctgcctgccatcttcaaggcatccttccgttgggctgcccccagtcactgagtcagggctttgtcagcttctgacaagcagaaagagcaaatgcggtttcttgggattgcaacttggtctcacagtggcttaggccagggtgggagcagtgaacggagtcacaaaagaaatttttcaggtagcattcacgggtgggtgctggattagatgcagggctaagggcaggggaggaagcctgggtaatggaaggctgcggggccaaggggggactgggaatcctggagggccaggtctgggggagagttaggaggtcgtgaatttggacttggatgcttgttgaagctgatgcatcttgaggacatttgtgggacacataggctgggtcagggctgaaagaggtgctggttatggccgggggcagggactcatgcctgtaatcccaacagcccaggaggatgagacaggaggaatgcttgaggccaaaatttcgaggccggaagttccagacgagcctgggcaacacagcaagaccctgtctctagaaaaggaaagaaagaaccgctggttgtggaagccagccatggcccagagctcagcagtgtaggagaggagggtgcgggcctgagagaggcagcaggcttggctggagaggcagaaggaaaaccaaggcaggagagtgtcctggaagctgggagaaggcagagggagatcgaggcttactttctggctgaggggcctagggtgagtcactttgggaggcttgatttcctcctctgtgaaatgggcaacacacctacccttgcccacctcacccccctcaccccgtcgacgtcgagtgaggagcagctgtgaggaggaggaagctttgcacagacgtgaggacggccccgggcgcctctaccccggggacacccccccccccaggagatggaaccccgagggcacggcgtggcggcccatgcgggcagctcgcgttaggacccagcggctccggggctggagggcgggcgccagccccgtcgggggcccggagggggactcggagcgggccaaggggcggctccggcgggcggactcggagcgggcggcggagtgacccggacaggtaggcgcgggcctggcgcttgggggccccggggggcggtcaggggcgtcggcgggtcccccggcgcgggggcgagggtgccaggctctctgggtcctcgatcctggggcagccgcggaggttcctgaaccccgcgccttcagagcggaggccaagggggcacctggaaagtttggggttgctctgcagagagaacgcgaattgggaagggcggggagcccgagtttggggggagccagaggtgaggtcgtcgggggatgggacatcttttgttctcccggggaggttggaatgtggcgggtggggtggggggggggggtccggtgggaatggccgagacagagacgcagagagacaaagagagatcagagacgggagcgcgagggcgcgcggagcaagtttccgcsgctgattgttcccagctgtgcggcgctgcaacatctgggtttctcccgccgggacccctccccctgagcccggctctgrrgccggcagagccctccctccgtctgatgtctgagcgagcgtcggggccccctgtcccccacctcccaggacgcaggggagtcgggggtgggggaggccgcakctgtggaagaggccagaggtgggggtggggcagcctcccaggcaggtcctggcctcccgcacgccccaaaaccccttcgtctagaagagctcggagatgtggtcccgtgggaggagttcatgaactccacactgacttctctctttcctgcctccccgctagcccgtgggcctccttcccccaataagcctgggttcgggggccagtcctaggggaggaagactccccgcagggtaccgacaggcatcccccaacaccttgcaacccctcttgccccaattcagcgccttctgctgagcagcgggggctccgaccgacctgacggatggggagaagggcaaggaaggctctctgggtcttttcatccccctcccatgaggaggtcaagggttttcagaatggggtgtggggagccagctatccctcgcctctggggcagcttggtcctgagcttcgtctcccggctcccactccaccttagtgaggtgcctaatgcatgagaggagccagggggtcaggaggcctcaggattgagaggaaggagggaaagacctcctgctttctcccctttccctcccctctccctggactcccagtggggaaaatagaccaaagttggggtttccagctagctctctgaaaggacttcctgggttgcagccgggaggggccstcctggatggaccccgccctcgcagccctccctacagaaggctgacggacctgaggtggccctccactgagctggggctggatgtggggaaccggaggctcccccaagtcccaccgtgtagccaggactggaggctgggctcttgaatgtcaggagcctgatgaaagccacggaccccatgccctctccctccaaatgacacacacacttgcctacagtgtcagggggtgcagaacccccagcctgggtgatgtcacggccccttcagtgctgcctttctgggatccagaggagccccctcaggcttcactctcgtgcttcctgctgctgcaaatagcccgggtctcgtgagcctgtgatgcacacagccaggtcttgcgaggcctggaggcctggcaggagaggagtcttctgggagctgggagccctgcccggcctggccgctctgggggccgggcaggcccatgtgtatgtggtttcctgctgagcaggatgcttagggcccaggggctaattgggagcaggtggtggcttggcagaagctgctgagtccaggcggtgatgccggctgrccagggctggggtcccaaggatgggcctgggttcagtgattcacgcagtcagtgccttggacacccagggagccactgggccagagggctgagcacgggtgtgggtgaggacagaatggcctgggctgggagcacattaggaatgtccccttagtgagcagggcagggtccgcccttccctgaccacatcaagtacacccactacacggggtttgcttgtcaggatcagccctggagctgggttggaggccttgtcccttgtgacctgaacacctgggtgggccagcagggactgggatgtccctccactccagccctcccatgcctggcttctattctgggtgccassttctccagggcgaaatcaggggatcaaaggtgagctctgctgtcctgggtgtggccctgggtagagctctcccaccggtctttccccagctgtcctctctgacaccaccccggcctgcctctttgttgccatgagagctgcctacctcttcctgctattcctgcctggtaagtggctcctggggcagggggtagctcctcttatgtggggctgaggagtagggttagtagggggaattcatagtgagcctttgtcrcgacttatgaccagaactcagctccccagctcccagggccttctgcctgcttggaccacagactggaccagccaaccctggcagcatctggaggcagctcctggcccttcccccagccttccacagcagcaggcaggcagggttctggagggcacgtcccaggcacaaggactccgtgggcacaaggcacaaggcctctctgggagccgatgtgcaggtgcaggggcacccaaggcagggagtccggatgcttgagttctagatccattcagggcccttctgctctatacagtcctgaccttgtgggggtccctactggccaaatgaagagaatcaatgaggaccacaaaagtcctagcagggccaacattcattcattcagcagcgatgtgttgagtccctaccacgtgccaagtgctgggctaggccctggggattcagcgatgaaccaggcagacacatcgttgctcctcatcatgctgccagtccagggaagggagacaaataggaaacaagcagacatgagaaactccagcatgtgctgagtgctggacagaaatcagcaggagggctggtgggctggaggtggggcggcatcttggcacagctgaaattccagggaagacctgaaggagctgagcaggcctcacaggcccagggagtgtcaggtgcaaaggctctgagggaggcaggagcatgtggagtcctaggagcagccaggaggccagcaacaggaaggggcagggtaaggtcagggaggtgacccatgaccagggtggggaagggtctttaccatcgaagaagagtctggatcctctaggaatctgcttgtggggtcctaggctcttatrggcctgaccttgtgacccccgcctccactctccagaagcgcctcgggcccccgttgcccctcccgatggggtaccctacatgctttgcctccccacagcaggcttgctggctcagggccagtatgacctggacccgctgccgccgttccctgaccacgtccagtacacccactatagcgaccagatcggtaagggccttgccrggtcaccgaggcctggctgctcagatgtgcctggctcagccagggaccgcactggacacgctgatgggaactctgggggttggtccctggctcaggagggaacttgtttgccccaggggctgggggattagccttactcccaccaattccactttcatctttgtttgcagacaacccagactactatgattatcaaggtaacgggctaggggtaggataggacgggccggcagctggggtggggagaccccctgggaggggtagagggagcagacccccttatcctcccctggctgcagaggtgactcctcggccctccgaggaacagttccagttccagtcccagcagcaagtccaacaggaagtcatcccagccccaaccccaggtaggccccagaccctgctcccacccgtctcagctcctgcctcacccctccccaccctgtcaaccctgggagtgggggtctgccagggctgggagaggtgactccccttgccctgaggagacccctcccagtgatgtctgcctacctctgtctccacaccagaaccaggaaatgcagagctggagcccacagagcctgggcctcttggtaagggctttcttgacagctggaaaaatggaggcacgccctgaagttggggtggagtagggggtggtgctggtgggctggaggtctttggcccttgcccatgtgggctcttggcagtgtgggcagtatgactgccgtaggctggcatcaccaggccccccaggcagctccaggaggtcccacctgtccccagtgtgcctggctggaggctaaattggcagcctaggaaggcccctgacctcacagatactgggaggggcagggagtgtgctgggggcttcctgccagccagagagactgagtggtgcacatgtggaggcgaggaagggccagggagtgcaggctggctgagcggtgccctccggctgccctagctgagagcttgaaagaacaaggtgtgtgtgtgcaggagaatccgtgtgctcactctcgtgtgggttggtgtgagcgctcctatgtgggcttctgtgagcgtgggcacgtctgctcgggagttggtatgggcttttgtggcgatgcatgggtgggtgcaaatttctgtttgaacttaggcttctatagtaagtgcggttgtgaattgatacgtgaatattacagccctgggaagtctgacaatgctgcgtgggtctatgtgggcatgtgtaggtatgggtgtctgcacggggcctgaaggtacaggggggactaggccctgtgagccagcctcaggtgggtgaggctgggggccgccccccactctgggctcctagtctgaccccacctgtcaccagactgccgtgaggaacagtacccgtgcacccgcctctactccatacacaggccttgcaaacagtgtctcaacgaggtctgcttctacaggtgagcacagatgggcagctgtcgggaggattccggagcatggggggctagagggcacaggggacagctctggcccgccaaggtgggagttggaggaaagatagtgagtccttaagttgagctcagttctgtrgttgagcctgggccagggacctcctccactcctgggctccagtgccaggttctgtccgggctcccgtgccaggttctgtccgggctcccgtgccaggttctgtctgggctatcccagtgggattgggtggaagtggggctgagacctcccgtgccctgtccccgcagcctccgccgtgtgtacgtcattaacaaggagatctgtgttcgtacagtgtgtgcccaygaggagctcctccgaggtaggaaggccacctccccaagacctcccctgtccccacacccgcatcattatctggccacctagccacccacctgatgtttattcaacacrtattatccaccaggcccacttccaggacaccctgagctcccctccttgctacttttcatcctcaaaacactcccatcaccagagttgggggaggggcagcggttcccatcacccagctccaccctgaccctgcctccttcctgcccccaatagctgacctctgtcgggacaagttctccaaatgtggcgtgatggccagcagcggcctgtgccaatccgtggcrgcctcctgtgccaggagctgtgggagctgctagggtggtgctggcatcctgagtcctggccctcctgggatctggggccctcgggccctgcctgacctggtgcttttttccccatccccatgttccttttattctgtaaaaagttagtggactgcagccctgggggttgcaggctgcggtgcctcaggcccctccttcagcctgtggccacctctggggcacratgggggctccccactgcccagtctgcccctcgggttgggggagtatcccaggcctctctgtgggacctgggcccctgacgggccttctcagcccgttttgaggacagacagtcccccgaggtaggctacatccccccaccccagctggtctgcttggatttcctacagcccccgtgggcatggaccacctttattttatacaaaattaaaaacaagtttttacaaaagatcgagtcactttttcggtggagagcacagaggggccagccaagtgcccccaacgcggactgtcctgagaggctcctgaccccttggagtgaacgatctgctcaggtgccctgtgcttccgcagtcccagccccaccgccttacccgccggctccagctctgccctgcccagaacgctgcgtcatgacagtgtacgcgcgcatgcgtgttgtgggaattgcacgggagatggaaggcttcagggacacagctttctgatgaccggggctgcttggtgagcacattgagttcccatcaccagaggaacacagcaaaaatgggaggccgcccatggggtggggggggcacagggtcaaggcaggcggactgacatccaaggcctttgtttgggaagttggggagatgggtgccattaagagggcaaaaaaagcggggcacagggactcacacctataattccagcacttagggaggctgaggcgggcggatcacttgaggccaggagttcgagaccagcctggccatggcgaaatcccgtctctagtaaaaatacaaaaaaaaattagccaggcgtggtggcgtgtgcctgtaattccagctactcaggaggccgaggcacaagaattgcttcaatctgggaggcggaggttgcagtgagccgagatcgcgccactgcactccagcctgggcgacagagcaagactgtgtctcaaaaaaaaaagggcaaaaacaagcaagccattgtaacacctccctccaaccagcatgtggggcctgggctctgtgtgtgaaggctcacacactcctgtttagccgtccgaacaggcatatgtggtggatgcaattcatatccccttcttagagacaggaaaactgagcccagagacgttaagtaacccacccaagggtcccacccacgggtccacagctatcagtggcagtgctgtggctgaatcggtcagctggactccagcaggtgaggatgagtgttaatttctccttcggacactgactgagcacctcctatgtgaacttccccagagccaccctatgcggttaggttcccattttacagatgagcaaactgaggctctaagaggttaagcagctttgctcaggatcactcagcggtgccagggcaagaccccacgttcacatccaaacctgcacttgtttgccatgctgcctggaaggcctgtcactgtcccgagggtgggcttggatctaaggaggggccagagaaaggggcaagaaagcataggctggaaagagtcgaggtgcacaggctgggcccagtcccaggcctcaacagccccatctgttccatgggccgggtgaccgagtaccccagaggcctccccatctgacattctgtgaggctggtaagttcccttcccaataccggcctctctgctctccctgccgcctccccaagcacccctccctagagggccccatccctcttgccccagaccctacctgtctccccccgacgtctcctccaattgtctagaaaagggacacagctgtacaaacttttttaaaaacaaggttttgttacaaaaaacagttctgaacagttaacattgtaaaaaggtataaaaatacagggactctgagcactctgaggaatttcccgacacatgctcttaactaaggcggagagatctctgggaagccgaagtcagggcctgggcctctgacccctgccctgggcctggtccccctcctctttcccacgatcccatgctccagggctgaccagagacaagggctctccccaatcctggctacggctcagcctctcaaggaggaactttaatgatctacagtggctcatcctagaagaggggggctggactgcaggtgttgctgggaagcctctccaggcctggagctggagtacccgtcctcagcactgccagcagagcgcctcctcatcccaccccagcttgaggcccccaagggaccgggctctgggggggggggctgtccaaaagaagggtcctcccctgtcccaggcacaggggtgttctccagatgccagcaggagctcatttctctggggggccggagggtggggagaagggtgctgagctccttcgaagctcctgctgcagctggcccttcagtgtggacacctggggaagaaagggaaggtaaggccagccaggtcctcagcctggcttcagagaaagggaggcagcagggaacccggagggacacagtgccacagtttcaggaaaggtctggtctcactgagagccaggggctgtcctgcctttctcattttgttccttatagcagagtcaggcgtcttctgactgttgggcacctttgagggcaactccacccccattctttatccccatcatcacttgggtgggcgtggcttcagcccagacccaaggggtggacatgtgacccagcccggcctagcagagaagccttgcccggccgacaaggctggctcaggcatggtcaggaaggggtatgtgacctgagcgggccagtgagggacagccttaggacttctgcccctgctctcttctgagatgacagattgctgggagaacctgaggctggagctgctgaggccacctggccacccagggagaaggctaccctgagcatggagccagggggaacagagccatggcaggaggcctggggcccaggagcatcccgtggccccggtctggtcttggctgacaccagcgcagagccaaccccacccttttcggttacgggagccatcgactgcctatacccacaaggtcttgattgggtctctcctctttctgcagccccacacatccatcctggcccagccttctaagggggcctgcacacctgctcctccagcccacgcaccctctggcggtgggcccgctcccgagcctccagggtgcgctcagtctgcgcctgggcgctgcgcagccgctccacctcctgctgcagctccagctgctgctgctgcgcatccacctccagctgggccgggctgtggctctgctccagcaccaccacctgcgcctgcagggaggggctgtggtccgcgttctggcccagtgtgagtgtgtgtgtgcatgtgtgacgggttgtcaggtacctccctgggacacggccagtgcagagggggaaggcaggagagatccttgtgtgtcttccatcctgctggccctgacagtgagcctgcgagcccaggatgagtgcacccaatgacccccactcaggcaggtgcatggacacacacacacacacacacacacacacacacacacacacactcagacatcatacacacaggcacaaaggcaagcatgtaaatacctatctggactcacacaggtgcatgtgtatgtgcaaaggcccaactcccccatgcatgaaaacatctgtacacaaacacatattcataatacctagacacgccacaccatgcacaagattcatgctccatacacaagaatcgtcacatggattctcacactgctgcatggccacaacgtacatgaacccacaggctcacgtgcaaacaggcctttcgtgtcttttctgtacaccttagggagaacccatccctccatggcccgctgggtcactggaaggctcagggctcctgggggagggggttatgggccctgggctggctgggccatcagctccactggaattgctgagcactcatactagggatgaagttggggtcccggactgggtggggtcagacctccagctgctggatctgcctctgcgcctctgccagctccagctcagcccccgtgagggtgcggtccaggcggcccttctctgcgctcagccgcactgtgtcctcatggctacgaagcttctcccgctccacctaggcaggagagccacaggagatcagggtgccaggaggagcttactgagggggctcaggttcctgaaccctgatggaataacctaaccccaccagaggtagcagaccctggggatgtgcagtgggatccaccacggttaggccccagaggaagtgaggggagagcctggggagcagcctaccttgtccagcgtcctcctgagggctacacggtccttctccagccgcagggctgagcgctccacctcccgcttctcagcttccagctgagccagggcgcgctgcaggcttcccaggcgctcctgcagcagccgccgctcgtcttgcagcttctggacggtgttcagggctgcagcctcaccctcctgccgctgccgcagcacctgcaacagaagccaggcaggccccgaatccctctgggcctgagcatacttatctgaagcttggggacaatgaggctggcccactcacagagcaggcgacggtgaggcccacatcagagaattgtcacctgaagccaaacctgtctctctcagtctgtttctccatctgtataacaggactatgctctgaatgaaccatgtttccttactggaggctgcaccagggtttgggatgaggttgagatgggtgggaacgtccccaccctatcctagggcctcacagtcttggggacagagggggcacaccctggccctcacctcccgtagctgttgtagctggccctcggcctccacccgctgcagttccaggtcagccacctcgcctcgcaacgtctgcacctgctcgcccagggagctgctctgcttccgtgcctcagataatgcctgccgggcggcatccagccgttcctgggggacaggggctgatggtgcctggctggcctgggagccctaaggagtcctctctattctgtacctctggacaggtccacagagcataaaacaggcagtcatctcacctggagggtggggtgcacaccaaacccatccacggcctatccactgacctgcataaggtgggacccactcagaccccaactctccccaataaaccctgcccctgggtccccccaagtctataccagtagccttgtcttcttacgggacatacccagagcctcttctccttggctgatggtctactgggcccacgccctcccttcaaagcctgctctcattggctccaactgactgccccattggctggctctctaccagggcccccctccaagcctgctcttactggctgactctctcactgggcccaccccagccagaccctgggcccgagacctggagtacttggcggtcatgttcacaggcggtcagagccttctgcagatgcaggttcttgtcccgggtgctgttgaggctggcactgctctgggccagggcctctgtcaggccccgcaccttgtcccgcagggccccctcgctttcctccaccttggccagggccccattcagccgctccacggtcagctgcagggtccctgccttcacctcgctgtcggccacctggcaggaggacagccagaacaatcggggctgttcccatctggcctctatacctctgctcccactgtgacctccacctggcatgcccaatccacacccttcccacttctctctgggcctccatcattgagacccagtgttcctaagcactcctgctggctcagcctactgccacctgggccccatcccattgctggctaactactagtgcccagagtgccatcaacctagttgtctcagactccctggtctcctccctgtcctcactcctctctcctctctgctgtggaagagaaagggaaaccaccacgaccctaaaatttttttatttttgaccttgttgggtgttcaggcaaggctagccgtattatttaacattccagttagagctgagcttcctagcagtcaaggcaaaaagggaaatgagtgaaacctacatctctaacttgtcccagatgactcctatgtatgcagatgctgtcatcaaatagtcctgaattctaattttggctctgcctcttactagctatgggatcttagacaatgacatcacctctcagcctccatttgtccatctgtgaaatggggatgtgggtaatacttgcctcacagg

SEQ ID NO: 97824 - DNA, 44905 bp, Homo sapiens
gccctgcatgctccaattgtacatgggtgtcttctaacttgatcagctcagtgtggtccggcaggggtgagtaacggtaagaagctgctttgaggaggagttgagatacaaaagatgcgcagcagtcaactgacaaagcgggggtggggagagtgtttcagtggaggcagcagccatgtgttgtatccaggtgacaagaggccagaataatcgaaacgtagaaactagagaagttgacaatcccagaccttggccaggcaggattttatctggctgttgagaaacagccattgtagggctaagcaaaagtgagctgggtttcactgacctggaggaggcggctgcctgcctgctacgcctggtctgaccgcagagaggcaggtgggcggctggctttcaggcctctgatccctgtccaggcctcacccaccctgtctttctaacagttgcggatgattgtgatgggcaagaacctggggatccccaagccttttgggccccaaatcaaggggacctgctgcctggaagaaaagatttgctgcttgctggagcccctgggcttcaagtgcaccttcatcaatgactttgactgttacctgacagaggtcggagacatctgtgcctgtgccaacatccgccgggtgccctttgccttcaaatggtggaagatggtaccttagacccaggccctggagctgccagctctgccccagcgtggatggcccactgtcaccatgcaacagcatgattctttgcccagtagaggaggctggagagtccaggcaacagaaccctttcttccctgtctgccccgaccgaccctcggacccagtaggatggcaaatgccgccagcttgaacccctatggggaaaagatgcaaaagtgttcagccaagtgacgtttactaaatagccaataaagggctggtgggtgtgaatgcatcttggcagtgacctccttgtttggggaggggataagtgacaactgaggacaaggctgagctgagatacctatggccatgctggcctgcttgtgtggggggagagacttggctacatcagttgctgtccttcccctcatctctaaattatgtcgtggcaggaagtggttggacttatccaaatggacttagattatccaaatggatttaagattatccaaatgctgctctggtttaagcaactgggacaagctgggtctagagtccagggcccaggctagaggaaggtcgagggcctcccccttgggactggtaggacctggagggggcaggcccacggtgggggtggtgccatgcacggcaggcagctggcctcagcaagtggaggctctggtctccttgggtctgtaggtgtggcctctttgagaaggcacagcaggggtggacctgggctgaccctcagcctgaaatgtcccctccagggcccaaagccacatattcccatctgaccacccctgtgttaatggtacagggatgctgttaagctttaactggcgctgtggctcccaccctgctcctcctggatgatgatgactctaggacactctaatcctcagggtagaacctgagaagggagccctgtgtccatgtcccacagggagttgaaggcagagctgggcctcaaactagcccccttcctaacacctggggctctgtgggcagcaggcaggacctggccagcctctgccagctgctggggcagtggaggagggtcatcctaaggaagcgaggcagaagccagggttggggcagcagggctggtctctggatcagatgtgggtttttatccaagagctgtgccctggtgtgccagctaccccaggacatcttacgacatctcgttaacctgcccatggtggtgcagagtttatggactacactagagacctcttgttgtattcatggctctgacccctataccagcctgggactgacacagaccaggccttcaaatatggggagggatggatgagctcatctgcattttcagatagtctagaaaagccaaaagaaatagaggactctggaccccaagggcttggggctccatctctagggaaaaaggggagaggaaagccctagggccagaagggggacaaaaggttcactcttccacccccatgggcttttcccagggaacttgcccacctctaccaagggctgccttagggtggatgaattggtccctcctctgaccctaactagaccctcacccagagcttttcaggtcagccctgggcccctcccgccccacctgcctaagggtcctgcaggaaatcttggcagcttgacacccttctctcctgttacctcccaggcagcaccatcctgatagcacctggagaagcacccccccagccctggctgttagcagacacctgcagcagagagctgggtgtacttggcttgcacagtgttataaacgtctctaagttaggcactgacaatttactcaaagtctggatttccagctcctgctgccaagtctttagacctgaccacactgggcccgaggctgaagactcactggccacaccctctagacaaagatgtgctccaacaggccccagtccccatccctccccactgtgttcccctgcaaaggtcagtggtcatttggcgccatgcttgcactactgctgtagggaaggagaggaaatgctccctgtactggccaaaggcaagaaaacaaggtaagtgggctctgtgcctcagtttcctcaccagcgcaagtgggtaagagttgtgcctgtctcgaggttgttctgaggactggagttatttacataaagccctagaaagacacgtggcacctctcattcctgaaggctgggagaccacatctctgtagaagtaaacaaaaccctccattgcctgcatagcagacacggggccaggcgcagtggctcatgcctgcaatcccagcactttgggaggctgaggcaggtggatcatttgaggccagggcttcaaggccagccaggccaacatggggaaaccccgtctctactaaaaatgcaaaaattagtcggggcattgtggcatgcacctgtaatcccagctacttgggaggctgagtggctgagttgagagaatcacttgaacccaggaggcagaggctccaagatcatgccaccgcactccagcctgggcaacagagtgagacttcgtctcaaaaaaaaaaagaacaaaaatcacaggaaatgctggcggggtggggggtgggtgggagagtgctggggacccagtgtgggggcagctgagggttttggagattccagccctcccatgtgcctcccaacctgcaacaggccatcttttagttctctagaggcaccgagtcctctcccctccaggctgcttcagtgcccagaatgcttttagcagggggcgacccccatttcccttccaaagccttgaaggggctgttcctgtctccccttccctcctccctgcatccctgcatccctgcctactgagtcctcccagtctggagagtgggctccattgctattgtctggtgtgaacaccagctaagctggatcctgagaccctccagcttggccatcccgcgtggcgcttccgcaggtccccgcccttcaatgtggggctggggcaggtgttcggggcaaagcagggctgggtaggaaccggcaagtccccttccccattcgccatccttccagcccttttcactcttccctgggagcttaaggagccgcttagtgtggaggacattggccagaaaggctgctggcttgacggggcaggacaatagcaggaggcagcagctttgcaggtgagaaaaccccagagccaaaggccgggcacggtggctcatgcctgtaatcctagcacttcgggaggccgaggtagtgggaggaatcacctgagttcaagagttcaagaccagtctggtcaacatggtgaaacctcatctctactaaaaatacaaagaaattagccgggtgtggtggcctgtgcctgtaatcttagctattcaggaggctgaggcaggagaattacttgaacctgggaggaggaggttgcggggagccaagattgtgacactgcactccagcctgggggacattaaaaaaaaaaacctccagagccgcccgtggggagcctgccttctctgccccccgacttcaggaggcttctcccatcccccagccacaggcctggcgggccccggctgctctgtattggccacctacactgcccctggaagggcaggtgaaggtctcctggatgttctcgaagctctcaagacagcccctccagggtggccacaggtcacatgggctccctgtcctcagccaggggcaggctgggggagcaggggaggccatctttgttactaggatctttgtggttccaggcacaggtcttcctacccgccccactgtgtccctcagccaaagccattttctctctgcaccccacttccctctataacacaggaataaaaaacagccttcccttcaagactgtctgtgtggccgggcgtggtggctcacgcctgtaatcccagcactttgggaggctgaagcgggcagatcacttgaggtcagtttgagaccagcctggccaacatggtgaaaccccgtctctactaaaaatacaaaaattagcagggcgtggtggcacttgcctgtaatcccagctactcaggaggccgaggcagaattgcttgaacccaggaggcagaggttgcagtaagcagagatcacaccactgcactccagcctgggcgacagagcaaagctccatctcaaaaatacaagaccgagcgcggtggctcatgcctgtaataccagcactttgggaggcggccaaggtgggaggatcacgaggtcaggagttcgggaccagcctggacaacatggtgaaaccccatctctactaaaaatacaaaaattagccaggcatgtggtggacacctgtaatcccagctactcaggaggctgaggcaggagaatcgcttgaacccaggaggcagaggttgcagtgagctgcgattatgccactgcactccagcctgggtgaaactcagtctccaaaaagactgtcggagtggactgcaggagtcaggggcgagacacacgacactcaatttgcagcatgtgcccaatacacaacagccagtgtgtcagcagggacgctgcccccagcagtggcttccctgcccacgggggctcttccagggcaggagcatctgatgggaagctccaagctgccaaggggggagatggggaaacaccgtgttttacatttggactgtcctgcaacagtgcacatgctccttctgcagctaacaggccatgggagaccgtttcctcctctcccaaactgggccaatgcctgccaggaggggctggtctggacactattcagccagtcaacacaaggtggcctgcactcgaggttccagggatcccaggcatctttgcggctgcagggagccggtgtcctgtgcaagggtctggtctaggactctgcccggtatagactcagcagcagcctagaagggagagtgtccgtgatctctgaacctacgaccagcctcctggtgccctctggtgggcagttggccacaatgcctgcacagagcagcactggcctgaagccacagccggggcctgaccagagccccctgctgaagtctggggagtgggtgcacatgcagtcaccgcgctggatgcctcccatgacttatttttttcctctcaaagccccagtgaaaatgcaaagaactccacttctgaattggacaactgaggtactgactctgtcccactcccctagcatttcatggggcagagttgggggatccactcacttcaaccagtgcagtttaaacctggaagctcctctggggccacctgtctcctggcaccaccttctgtgggtgccagggcttaggaggtacacatataaggagttaagaaaaacagagctccgttccaaccgaaaaagaaatgcaaaatccaagacagtagacaakgttgtttatttaaaatgtttactccaagaaatatatatataaaaaaaataataagacaattacagcactaaaccaggcaccttcgaccaaatcacaacctcctctttgattccccttcacgctaagcctctttcaaattctttttcctgagctggaagaccagtcagatgcccgcagggtcagcgccaagcacattcccaaccgggcaactgtgtacctttctctaggagtgcacgacacccttcccccacaactccttrttttaaaggatttaacccattaggaagcccatktttcaatctaagccagaaggagctgcgggacaaggcagtcttcactttgaaggtccctttcctgctccagtccctgggctagggttctagaagaggctggctgccacgtttacatgaggccaccgaagatctaagtccagctaagcccagggaggctcctgcaaaggctgggacctcgggtgctgcgtcctcaaccctctcggtgaccacggctcaaagragagacctcaagggtgccaggagcacaggtgcctgggctgcattccaggaaagagacctgtccagggaaacggatcaggctgtcgcatggaagcttacgtcagagatggtggttttggggtgatttggacaaattaggttagtttagcaaagctctgaagtagcagaagcttctcccctggactactgattgaacacagaacaagagatgcrcgtggcgtcagactaagtcttagagagatgcaggccagtctcctcccacagggccttgggactggcaggacagacactgctacatgccctccaagggcaggagtcacggtaaggagcgactggggtggaaaatagggaaaaaagcaacaacaactacatcatttttggcattttaacatggagacagtgacaagtggtaacaaagcaaaagaaaaaaaaaacttgaagagaccaatatttaactttcccatccacccaagtctcacacttaagttctagtcccatctcccccataagcaccactgaactaaatatctattttaaagcacccaaaccagtccagaccctctggaaaccaagagccccagccacagctgtcgcctctcttgggtccaggcgagaggagggttccgggaaaggcacctcataactcactcagcgcagcacacacggcggcgagctcgggcacttgacraggacgcaggtggcagtcacagcatccgtgctgacacgcaaggaaggggactcttcggtaatcccaactatttggtaccagagccaagcaaacgtgactaaagggagctgggtcagcagaacggtaccccgagtctcagcaacaggwcggcccgcgcgaggcaggatccaggcgggggggagaaaaagagaccaaagcacaaggcgatcgaggctggcacagaaagggctgatccttcttgcaaggactggagaatgcacttgactgctggctggtccatctcttaattggcgagtgcgcgtgacaaggctcagccctggctccacagggagccaccaagctgactcaactgatacaaatgttcccacctctgccccacccccaagtccccatggttccacaatcacctgattttcatttggacctctttaacagctaaagtagatataaatggctaaacacagatccccaatcccccaccaggggggacacggccgattctataatgtcgcagccagaaggctgtgggcgtacaggcagccaaggggagaaacagaascgacacsggcctaggcccatctgcaagaaaaagcggagaaggagtgacccggatgcttccgaagcacgcgagcgtgattttggatggaggcgggccggtgactgcctagctgctgccggttcctgtaagggacattttttctgagtaaatggcgattcctcttccatgtggcatctgcttggatcacgatgctaattgtaactggaaaggggtgttttggggagtgtattcaggaraggaagaaagaaaaaacttaaaaaaaaaaaaaacctagattgctcaaagtttctgcctcttttgtaggaatggtaaatcaactatgagcaagtattttaattcaacattaagggaaaaaaaaggactttggaaagcatacagaaaaaaaggtagttaacgttggatcatgtgtaaaacggaacctcagggagtctaaacaaaaatgcaccttcggtcaacttttgcttttttaaattcctcgtttgacttcccgtcccagtgcacatggaaatgacagctgccgcgagaggtgtggagtcggaggagtctccgggagcatcagagggttcgggggttgtattctggcagtttcttgatcttctctttctcagtctcactttcatctcttgctatcaccaaggagtgtgagtagcccatggcgacctggggggacaaatcagcgttgggtgtrcctgaggcgcctggactaatcaatgcgttgaagagactctggaaactgggctgctaaagcgggtcagcatggagaaaaacagagtgcccttgaaaactgcaaaaagcccctctgcccaagacagctagtttccatgtgactgccaccaacgctctgccaatcagagccttccaggctgccctgggagacccagctggaaggaagcccactgggccacctcttatcagcagggacaggtggggacatggctccagctccacttccatcccccccctctctggctcacaatcctgcctgggtgaggtgcaccacccctctctgtgtcttggcagacagggccagcaggctggctgactgagccgcaggggcctcaccccgccatctgactcctgcagccacgcagcctctactctgtggacctgcggacctgcctccagcccagtggatctgagtcctgggtgtgatggagacgcgagcgatgtgctcgcccgagagtggatctgctgcggccagttggtgccatctgtcatcaagggtgaggacagccacccagcctggccagcaaccctgtgcactctctcctgcagaatgattgttacctctcaaacaaatcttagcgtgagacaccaggaaagccagctgagatggtaaacaagacaacccaaacagactgcgatgatcaaaatcatgaggagtgacataccactgggtacrgacacgtccccgagctggcacagctgcccccactcacctgctctgagaaaatgccatccagagtctttacctcctgggctgcagtggaagacttgggcttgtggtccccgtagccctggcgaagcaaacaagatgttcgcaatcgrggatccatgtggctcagtccacaagtggggaatcacggcaacatttcctggcccccactaaccagaagccagtgatgatgccctctggcccatgacaagcccggccacccttgcacacaagggccaggtggaatcatccaagtttatccacaaaaggtgccaccagcaggcgactagcgcttaacctaaggaagaccaaggtgcccaactctagcctgcaggacttctgtgtgcacaagtcccttctggggagtatggcactggtgacaagagatgacaccacgagtgcaggaagaatggcaactgcggcccttcaggaccaaagcgaccaagaacacgggctgaccaaatgcccttgatgcctccaccatccagagtggaataatcaccatccaaaacaaaacaaaataaaagggcttaagcgtgacagggagactattagcaatggcaccagagaaccagtttccctcccagaggtagaaggaactggatgaattggcgcagctaagggggagtcttgtgcaaaggtgtggagctgggcaattgaaagactgaaggccctggctcaggtgaaacagagggtcccacagggcgggagaggaggaccctccctccccagcccaggcctgcccacatgtccctggtttcatctcctgccaggccccacctcgggccttcccacacagtagatgttccctccaaggtgccaggccaacttctcacccttgagaagctccccaaaaagtctcccttgctcccctctagtttcaaaatttatatttagaaggtcaaagtctatttctgataggccccagaaaacatccttcctcctctaagaactatctgtagaaactgggccaggctctgtctctttcctgtcaatgtttcaaatcgggccaccagagcatctgagccagactccaagggtgtgcagagccccgagaaaaaggtgcattcaccatccatcccagccacagctcaagggaccaaggaacgcccttccttcccctcctctccatcaaccacaagagtaccttgcaaccacaagagtgcaggagagggagacagactgtgcttctaacaagaaataagggactaaaactaagaccaccaagagttaagcggagaatcaaaccatgactagtgtaggcagatcaggatgcactccacagccaagctagtcttcctaacaaaaactcaaagacccgccttggccaggtgcagtggctcacgcctgtaatcccagcactttgggaggttgaggcgggtggatcacctaaggtcaggagttcaagacagcctggccaacatggtgaaaccccatctctaccaaaaatacaaaaattagctgggcgtggtggcaaacgcctagagtcccagctactcaggaggctgaagcaggagaactgagaatcatttgaacctgggagacagagggtgcagtgagccaagatcgcgccactgcactccagcctgggtgacagagaaactccatctcaaaaaaaaaaaaaaaaaagactcacctagcaccaggatctaagaatgaaagacatttgtttgcggaaggccacgtgtgtgaaattgagggycatgagttctaacctcatcactcaagtaactggtattaacaacagaaacacaggtttaaactcaatttggaaaaatgaagaatgtcctcaaatcacccacaactgtgagtttcccactgacttaggcctccaggggagagggaacaaacaggcccttttcctaccataacccaactgtggtttacaaaatgtgaggggaaaccggatctgaaaagtcccaattttcagagtttacaaatgtgcagagatgactcagaattatctgactagcacagaattgtccttgaaaactcatgggactcaatcgtgttgcaaacctyaatacaataaggggggaatcccaaatgtttttcttctgtgtgttttgggagacaggtggagagaacccaaaggccatgagccaccctgactggcttccacttcccctgacccgcacaggtgacagcttaccagttccccaaaggtcggtgacggaccccagctgatggtgctctcatcggcggccacaatgatgctgctcttcctgcaaacaggcaggctgtcactgcagggccagcagccccagacctgcacccacgcagctatggctcaagggcatgagtgtgagctgccacttttcccttggcgtactcattccaagtagcaaacacaataacagggccaacaggtttctcctcaatcctaagattgttccgtgcaggccactcaacgcttcaacaaaacaacaaagcccttagacaggcctaggggccaaaggcaggggaccttgctgtgcatcctgcacagctctctctcagtgggaggtcgctttgggaagaggagaccagatcaggataaagtgaaagcctgttccagagggagcagccttcatgcataatgatttgggcagggctagagccttcaacagattaaagccacgccgacagaggcccctcatactgttccacccacacctgccagctgataaatccaactcctcagcaagaagtgctagctaactcaacaggtgtcctgaaatgaactacaaaccactgctgccaagacaatgtcgtcttcccagtgtcacagcaactcaagtcctgctacgtttccaactacgtataattttcaacctgcagcgtaggaatacatcaagctctgcttgtktatttctttgaacagaaaccttcaaaatgactttcttcccacaagacagggaacagccatctgttctagcagcaaatgggccctctcccctcctgtacccccggactctgggattcagtgtgtcagatggcctgctgaggacagcccaacaggcagcagaaacagagccccatcagggaggggcaccccatgggtgtgtctgacacccccatgaaaggaagagacctcatacccacaggagatgctgccacctacccacaagccaggctccgrattctccagccgcagaggtcctgcactgcttttgggtacatggtagattcacgggaggtgttggtggccccccagaaaaacagaccacctaagggaagacaaaacatgttcccagcgtgaccagacatcgagagctgagtctcatcttcagtattatcagggtgaaaagaggacgggatggcaaacaagtgttctgtctaaaagataactggagccaggcgtggtggcgtgccygtgcagtcctagctactcaggacgctgtggtggtaggactgcttgagcccaggagttcgacaccggcctggacaacacaacgagttcctgtctcaaaaaaataaagaacactgggaggtaaagagaattggggttcgtggtctagggacaggacaatggctacayggttccgcaccagagcactgataagccagggggsagaaatcactaacccacttcactgacagcaaaggagcaggtgtaaccagcatagatctgggaagccccacgcccagggaagtcaaacagcttcaccaggcgggggaccatctcatccttctgctctgcgtggcccagccggccatagccaccaaagccccaggagaagactcgcttctgggagtccaggaccagctgcaaggaaagaaaacacagggttggaacaaacagacttccaacaggcaacaagaggggtcatcgtttctgtgcagacaacctggtgcaaatgctaagggcaaaggaacagcaacattcaagatcccctaccagccgggcacrgtggttcacatctaatcccaacactttgggaggccaaggtgggtggatcacttgaggtcaggagtttgagaccagcctggccaacatggtgaaaccctgtctccaaaaaccaaagaaatatcctttgcctgcctccagcagaaagatcctctacctcccgcctccagcagtgggggaggaggcaacaggagcaagtgtagcaaaatggcatgcattcaataagcccagtttgctattttctctgccagggactccattttccaatccttttttgttctgtttatttatttaagttacaagtcttaaccctttccttaatcagaagcaacagggctatgtctcctgagagttgggcaatcatttgattcccactacaacagagattcggccagatgcagtggctcatgcctgtaatcctagcacgttgggaggctgaggcaggtggattgcctgaactcaggaattcaagaccagcctgggcaacatggtgaaacccatctctactaaaatacaaaaaaattagctgggcacagtggtgtgcacctgtaatcccagctactcaggaggctgagacaggagaatctcttgaacctgggaggcggaggctgcagtgagccgagatagcgtcactgcactccagcctgggtgacggaatgagactccatctcaaaaaaaaaaaacaaaacraaacaaaaaaaaaaacacaacaaaaaaaaaacagattcaattgcagaaagaacagaaaaggcctacctgttcctggatttttcgtttcttttccccccctcgagagggtctcgtgctctgttacctaggctggaatgcaatggcacgatcacggctcaccacaacctccacctcctgggctcaagcgattctcctacctcagcctcccaagtcgctaggacttgggtgtgcaccaccatgcccagctgatttttgtggtttttttgtagagatgggggtctcaccatgttgctcaggctggtctcaaatgatctgcccaccttggcctcccaaagtcctctgattacaaacatgaaccactgcgcccggcctggatttttctttagacttccctcacccacaggtacagaggtaacctgtacctggtcactgatgaaatgaactcagagacacttcaagtgtttaagatttatcttcttcagtctcgttttcccatcttctgacatgccaattcagttctttgatgtttcatgtctaaaccatgggaatctacaacttactaaaaaacttggcctataaggccctaaacaagagccaactttatttcccctgactacatcagacaaaacaaatcagtttttggacttgcacaaactgaaatctcctaccctagtcctagcccaattccctgggcattcttcatcggcaagaagattccaagggaaggaggtggtgagctgagaccactcagtggggaggaccaacttgatctctggaatcctagcccaggctttttcaacaaagcatagaacaaagagactcctaggcattctcagacagaagaaccacaggaaggccattaaaattaaaagatacactaacagccgggcgcggtggctcacacctataatcccagcactttgggaggccgaggcaggtggatcacgaggtcaggagtttgagaccagcctggccaacatggtgaaaccccatctctactaaaaatacaaaattagccaggaatggtggcaggtgcctctaatcccagctactcaggaggctgaggcaggagaatagcttgaaacaggaagacagaggttgcagtgagttgagatcccaccactgcattccagcctgggtgaaaaagtgaaactccgcctcaaataaaaaaaaaaaagatacacaaacaaaagattgcactgcagtttatctaaagtgacctttaaagaaacaacctaggccaggcgtggtggctcacacctgtaatcccagcactttgagaggccgaggtgggcagatcacctgaggtcaggagtttgagaccagcctgaccaacatggagaaaccctgtctctactgaaaatacaaaactagccggggcatggtggcgcatgcctgtaatcccagctactcgggaggctgaggcaggagaattgcttgaacctgggaggtggaagctgtggtgagccgagatcacgccattgcactccagcctgggcaacaagagtgaaactgtctccaaaaaaaaargggggggggggcgggggggacaacctactgattaaaaacgactcacatccccagtatggggcaccatctactgacctggaaagatgtctgtgatgttatgttagataaaagccaaaagcagaaagtgcttaccttaaggtgcaggtgagggcggcaaaacatctacgtgtttaagatgtgtctatttaaatcacgggagaagttaacataggaggcagtgacagggaaccctgccctgggaccaaggaccctttggccaaggtgcaaagccctcttgaagaagcaagcagatgtctacctgggatcagttcctagccaaagccaagcgtcaggaaacttgagcataaacaccccttccatcctggtgcgactctcaggaagtgagaaaagccgagcctcaccgtgtggttagcgccacaggccacgtctcgtacaaccacgtttggtacaggcagaatctgtccatctttygtcttctcaatgaagatggccactcgccggggaactagttcacagtcgtactctatccgctgtgcccgggcgatgaacttcccatctgagttgtgtcctgtagagaccacagagccggccatcagcagcagcacaagcacaagggacgtgtcagtgtgctcacacggactctgtagtgagccccggcagcaccccaatctggcccttctgggccttagaccagcacacgttggtcaacaaaggcagcatttccaatcttaggcacagcacagtgagtgggtcagtgaaatcaattttgtgagctaagaccagttattttttaaaaacgaatagaacagaatgacaaagaatactctacacataataatggcaccatgttacaacaattccaggtaaggtattatacgttcagattgggttgcaaaagaaaacttatttcttacaatgggttgcagtcaaaaaagttgaagctgctgatcaaggaatggtctatcaagtaagatctctaccccactggagggaccacaaggagcccctaaaagaccaagaatagacagaaaagctccatacacaatcccaggcctctgtttttatgaattaccagtaacctaaacgtatggttacgggtggctaaagcctgcaattcccacactccgaatgacccagggactggttcgcaaagacccagctcagcacaccacacaccagaagcccggctgctccagtcctgagaacacgccagacacccaagctcctgcagccacctgcagcagcagggctgctaagtagtttatagttttaaactgctcctgttcccacactgtgatcatcagtttggttgggcacggtgggccacgcctggaatcccagcacgttgggaggccgaagtgggtggatcacctgaagtgaggtgtttgagaccagcctggccaacacagtgaaggcctgtctctactttaaaaaacaaaaacaaacaaacaaagattagctgggcgtggtggtgggtgcctatagtccagctacttgggaaggctgaggcagaagaatcgcttgaacctgggaggtggaggttgcagtgagcagagatcatgccactgcactccagcctgggcgacagaacaagtttctgtctccaaaaaaaaacaaacaaaaaaacttgttgttatcagtttgtaaactagcccccggcttgtggctaatccccctccatacggcacgctggtgtgcacctcagcccttattggtatgtgtgtttttgagcactgtgctatttaaatacagtcagccctccatggccacaggttcaaccaacagtggtccaaaaatatctggggggaggaggaaacaaggaaaaaaaaaagataatacaaacaatacaagtaagaccatacagtagaactacttacataacatttacatcacattaggtactgaagtaatctagagatgattttaagtgtacaggttacatgcaaatactatgccattttatataaggtacttgagcatcttaagatcttggtatccacagggggtactggaagcaatcccccaggttaccaaggagcaactgcaccctggaatcacaactacgctacacacaataaaactcctgggcttgtttacagggcgccttataacactcatctcataagcaggttctatttttttttttttttttttgagacagagtctcgctctgtcgcccaggctggagtgcggtggcatgatctctgctcactatcactgtcttatgacagcagttctctactgttgacataatcccttccagtggaacatctgtccrtttaaaagtctgagggtcttggccgggcgcggtggctcgcgcctgtaatcccagcactttgggaggctgaggtcggcggatcacgaggtcaagagattgagaccatcctggccaacatggtgaaaccccgtctctaccaaaaatacaaaaattagccaggtgtggtggcgcacgcctgtagtcccagctactcaggaggctgaggcaggagaatcgcttgaacccgggaggcggagggtgcagtgacccgagatcgcgccactgcactccagcctggtgacagagcaagactccgtatcaaaaaaaacaataaaagtctgagggtccccactaagaaattcccccaccttctaggctacgatgaatgtaagagcatcacagtaaatagaatgcatttccggatatgtcgctacttttctcacaaaaatggtatttttaaacacttgcactcttccggacaaggtttcagcaaggcagtcaacaaatgattagagtccttttatttgctatcgacacagtggatactgaacagacacaactcccagacaggagaggaggcacatttggtgactgctttttccacctcctttaaagagctgcacacatctgctttctccagaagtacaggacagaagctactccagaaaacatcgaacagcgggcttccctgtccctctagaggggtgacagctctttaaaataaagttaaatggcatggctgggcacggtggctcatgcctgtaatcccaacactttgggaggccgaggcgggtagatcacttgagatcaagcgtttgagaccagcctggtcaacatggtgaaaccccgtctctactaaaaatacaaaaaaaagttagctgggtgtggcagcgggcgcctgtagtcccaactacttgggagaccgaggcaggagaattgcttgaaccaaggaggtggaggttgcagtgaactgagatcacaccactgcactccatcccgggtgacagagggagactccgtctttcttatcttggcgttgcccagcccagttcagtgcactgcaaaaaagggggcacaaggcatgagtgtgtgtggatgagacacggccatagtcggatttaggttcattctaaaagtgatctatctggatttggacaacgaaacaaacacctgccttaaagcaagtaatacgctgagaataagcgattctgtagctacaaatcaagccgatttccaaactacctgcaagttgagtgtaactgagcacctgcgaatttgtacaaagtgcttacatggtgcctggcacacacagtcactgctccatgaaagtgagccgtttttatcaccaacagcatgtcatgcttcctgacggaaaatcgacttgccggggtgcagaggggaggccaaggcagcaggagcgcgcacgtggcaggaagcggaccgctgctgggcaccgcagcagggctgtggccatggaaaccgctctccaactgtctcgggctccaccacggcaaccaacgcgaaatgtgaaatgtgcgtaaggggctgttctctcttattcacttctgacttgaagtatatttagtttcacaaagtcactgttccccgaggctaaggccagcgggctcggcgctatttttaccttttccatctgccaggcgctgcggctgcaggagcgcgcgcggccagcagagggcgcccgcgccacacctcgcggaggcctccccagaggggctggagtggaggcagagccacaaccgggaagcgcacttcagggaaccgcacttagggtccgatgggaaggagaatggagaccatcaggtcggaagacactccccccactaactgagaactgatgcctgaattctccttttccaccaatgagatcgaagaaacaagtttctggacaactagattctggctagggatgacgcacggggagggggtccaccagggctcctcacgtggcaacccgaaataatcgcccaggccagggtttccagaacaacgttcattttccgtaattttctcattttcaataaaggcataatctttaaatgtgaaattgaatgaaggtggtctgatttttttttaactttgaaatccctttatataaatgaattcccaaatcagaaaaaaagaaatcttttgtaggactccagtcccaacttttccattgaggcagtgttgcaatactccataatcctgtgaatgaggacgcgctgttctgctgaacgtgagatccacttaacggacaaaggctattatctgagatcaattacccacatttctaacacgtgtgtgcagccccacactgatctctagttctgaatatatacagttagattacagagcttttaaaaaatgtacttccatacccagctgaccatattcagggcacccaaaggaatagaggtttcctttgcagtccattatcatactgaattcagccccacaggccattttggtaattggctggccgttgtacattatctgaaaagacaagaaaggagactttcattttttttaaagactgataaaaagcctctacctctctgcatgttggtgggaaacaattactaggttacaaacggaagtttaataaactcagtaattctgaaggcaaaagctgaaggcatttctagaacacaaagcttagaagatatgtaaagaagcaccctcagacccccaccctcccagcacagagcagttcaaagcctagccactgtctctttaagatcaataaaaccaagtccctcccttccttcatcacctagaccactaattaggcacttagcattcttctgcctttagtagtagtttgtttttaaggtataaatctcacccctccaactcaagtttcttagaaaaaaaaagactgcctatctcctgggcgcggtggctcacacccagcactttgggaggccgaggcaggcagatcaggaagtcaagagatggagaccatcctggccaacatggtgaaaccccatctctactaaaaatacaaaaattagccaggcgtggtggagcatgcctgtagtcccagctactcgggaggctgaggcaggagaatcgcttgaatccgggaggcagaggttgcagtgagctgagatcgcgccactgcactctagcctggcaacagagcgagactctgtctcccctccaaaaaaaaaagactgcctatctcgtatttgtrttctaagcatctggctggtgactttatacaaggtcaaaacaaagtatttgggggaagtacaattacatccatataacatcactcactttctttggaacagaacaggcttacgacaaggcatttctaacagatttctccatttggaaacaaaatgttttcaggatggttttcaacccgaccacaaactaagcctgttttaaaaactatagcaaggctgtgtgcagtggctcacacctgtaatcccagtactttgggaggccraggtgggtggatcacctgaggtcaggagttccagaccagcctgaccaacatggagaaaccccgtctctactaaaaatacaaaattagccaggtgtggtggcacatgcctgtaatcccagctactccagaggctgaggcmggggaatcacttgaacccgggaggcggaggttgcagtgagccgagattgcgccattgcactccagcctgggcaaaaagagtgaaactccgttctcaaaaaaaaacaaaaaacaaaaaaacaaacaaaaaaactctacagcatgtaactaaacatccagaccctgtttttacaaggggtaaattaactcaaacggagaccccaccttagaaaatcaaacacaaaagtaaagagaaacaaaaagccatggagccggagctgaggaggggtcacctgcgcggggctgggaacagcgtctgtctggttgccaaggcccagctgccccatcttgttttccccaaacgcaaacacggagcccgtttctggaagaaaggaaaaatatcacaaaagggaagataatggtgaatgttttgaactagatttagaatcaaaggcatcaaaataataaaaacagctcatttgccaggcagaaggcaagtgagactgcccaaaagctggcagtgcagacgcttcacagcaaagccatttcacatcagaaactgggtgtgcagagaaacagagggcagcgtctcctactcccagatgggcctcctatggccactggggaggctcccaatgccctcaagaagccactccatgccaaggttctcagggcctctttctgatcctgaccaagagtcacaaggggaactccaccaccccacgccccatccccaaggcagaccacctggcctcttgccaaactgagaggagacaccagcagccacctccttacccgtcaaggccaaggtgtggttccgcccacatgctgcagacacaatcacttcgtggctaagaccctcgatgagtctaggggcttctactctcttggtgtcaccatgtcccagctgccccttctcatttcgacctgcagatcacatgagagaaagtagaaaagagagagggtggtccaggcggcaccaccaggagaaggcgagtacaaacacactctcaaatgatgcccatctgtctctggaaggtaccctccaaattcccaacaacagccaagatccagagcaaagaacgccccggccctctgcccrctggaatggcgcctgctgcagctccccggacctccttccctggggcagcagcgggaccacccgtgcacacctcccacgtctctgctacaaagggaaatgagaggctcagtgtggtagggacaccatgcacaggcgggcatgctcgcagaaacacgccgttcccacttagagtgcctgcaagacaaccaccccgtccctaccctctgagatgtattttaagacagcaccccattttgacacctggctcaccagagtttaatcactttggtgctctgggcatccactgaggaccatttggtgtctgcccaatatttctcttcctttttctaccctgtaaatggtgctcacataacagtgccaatcccacccctagggatcgcccctcaaggactctcagccacaggaaccctggtgacaaagcacagatccaccctcaacacaacacgcccagccccacctccaggactgctgcaggtgcgaccaaggccctgtatctgtgaattccagcggaaggcaggcctgagggccaacccctacccccaagtcctctgcagaaccaaattcaactccaaacagacgtggaagttgggtgggccaaaaggagggctgggagcccctacaccgcatctaggtttcaacacaaactaccaagttccaaaacaaaaattcaaccggccactctcggatccctcccgataagagaaaaaccacacatgtaacctgacgtggggaaactgacggagatcttacagtggtgasaagtcagggcaattctagggggttttgcaaccttctccagcaatgaacttttcacccttaggttgtgataaaggcagacagcagagccattaagatgagttccagctgtcctggagaaggcttgcaggagcagcctctgactacagaaggaattgcgacgaagggaaaccagcctctgactcgctctaattaaagaacggcgggctgaagggccagcactggcactcgagcaggagaggcagatacaccagcttccaatgggagctgcccaagttcatgtgaaaggcaygtgaatacagagcaacaagtgcaagtctcagtggactgagatgcggcaggacagggtgagcgggccacagatggagaccccacatgagcaatgcgtcagccaccctcccgtggtactctactcacaccagacgccgccccctgccttctagagtggcgagcagtgggcctgtgacaccttccaaccctgtcctcaccaactgcactgtctgctcggggatcacacgtcttgatggcgggacatacattgtccctgcccacagggtcagaactgagggcgctttcagagccaccacgcaagtgaagctcagcgagagatcagaactgaggtattttaagtttggaacactgacataaaaggctgtgttcagtgttggaacacaaagtaggaggggtgctctgggggaagggacacacatctatgccaaccgggagaaaacaaaaactgtggcaatgtcagcatgtcatcaagagactataaagtataaatttgggccagacacactttagcttttttcaacagaattacaaaattagccatgtgcagggaagacaacagatgttaatatatttggactttggtacagcagctcatgaaatcacaaaaaacggttcaaacagcccaaaataaaaatgcagtcatatggactaaaagctagccagaggaccagcgacaaagggtggggacaaacgccaatatgccccgctggaggcagaggccgggagtcaccaaaagggctggggataaaatgagccttagcccataccctatgattggaatgatctggaagaggacacgggcaggaatgggccggccggctgcagaggacagtgccgtggacagaggctaacagaagaactggaacccatcccgagtgcccaggtgaggaaaaacagaagggaaagccgaacaactccaaaaaagcaaactgaagtatctggggaaatatcctaagaagcagacaacacggacagtgagctgccaagcctgcagaccagacttgggcagacctcagacacgagggccatggcggcagggacgcagcatcctatgacatgaggcgggaggtagaaaagccagtggcatttcaagtggcagcaacagaggtctcatgtcatatcgtgcctcaaagaggaaggaaactgtctgctggaaggacagcctgcctaacacactcacacacctcagtatcagaaaagatcaagcttcgggcagaagattcaggaaaatgttccttgtgtaaacacaaggaatcaaagaagtaggggctgcgtatgggcaaaaaatgtcaggggggaaggggatctgcatgtagcgtgtagacaagagacgagctgggaattaggaaaaaagacatgggctgtgaacgaaggagcccagccttataagacgcgagtctcttttccaggcaaacagaagaacgtgctgtgtggggacagctggtgacrgtggtccccagtgcccagcacccgcacggtactcaccccagctccacagcttcccttccgtggtgatgaggaggctgtgtgcagcacacgagcccgagaccactgtccgcacccggacccccgccaggcacccatatctgtggggcccccacaaattctgaccgagattgcggtaagcagctgcagagagaatgagaatgcagatcagacacctggggtggtggggtgacctccaaaatgtcactggccaccaagcagccacttcccgagggtaccagggacaggtgttcctcgggtgccaccctgccttggctgttgggaggctgcacaaggatcgggttttcacttcgaatctctgcgatgcctctgaaggcccaaaaatcaaaatacccagaagctggcacaggcctggcgtcacctgccacctttacacccattcggcyccagcccsctctctgggtcccacctctcacagggctcagccccacgtgttctgccattgagcacgcccacccgcaagtgcccgggacctggtgcgaggtctgtccaggaggcaggagtgctggctttccacagccgtcagctgaggaagaggctgacccargaaaccccgctcaccctgacagtaacctacccctcctcctcactccctgccgcctgcccctcctttcccaggctctcctgccctccatctccggccttcaccctgggccagaaggctctttctgaggggtgacccgagtgtcctgtcttcatgttcccagcagctccatcaggccccttgaggaggggcactgctcacacagtatcaccccacctcctgctcccttctcacccgtccagtgtgacagccacttcatgactcccctgacmcccacccatatattcgcttcccctagaatgtccttcccacctcctacttcttcctgaaagctcaagtcaagcaccagttcgcctccttggggaagccctccagggcaacatccactgagaaatctccttcccccagggctcccctgccccagctctgctcagccctgctcagcccaccacagctctcttcctgagccccccagccctcccactccatgagaagccacccagggctaaagctgtaggctccctccagcctagaccctcacaaatgcctggcacgcagcgagcactcaatgggaaagaaaaccacagcaycttcctcacaaaccccccttcacaccctattagaggatggggcagggccaatttcttacttttctttttttttttttttttttttttttgagacagtttcactgttgcccaggctggagagcagtggcacaatctcggttcactgcaacctctgcctcccaggttcaattgattctcctgcctcagcctcacgagtaactgggattacaggcgtgtgccatcacacccagctaatttttgtatatttagtagagagggtttcaccatattggccaggctggtctttaactcctgagctcaagtgatccactcgactcagccttccaaactgctgggattacaggcgtgagccaccatgcccagcaatcttaatttttgaaattgagatgctcaagagtatttccaggattgtggtgattatcctgaaatgctagccactgccaaatcragtgtgtaagactgatccaatgtaggaactgataaaaaggctacaatgtctctatcaagcrcctggctgcctagaaagtatctgtgaagtacgttccagccccaccctcygccctcagcagagggcaccacatgctccctcattcaggtgtgggggcaagtgggcaagactcctggccgcaggcgggcaggggccagccgatcccgcatggcacctgaagcagcacacctgcagacacctcccctgaaaggaggaagaggaacatcaacaatttcctggggaaagagcaaaccaaaaataaaagcctcatggtctatattaaaacttaagaaaaactcaaggaggtggcacctaaattaagattcaggaactgtattaaacaaaactcggaagggataaagagaaacccaaggtctctttgccatgaagacaaaatgatggcatgattgacgagtatcatcacgaccctgtgccgcaacacaggaggccacgggacgccaggcaagggtgcggtgccacacttgaacttgcttggccaaggggagtctcaggtggtcagatgctcctggacttaccaaagcatctttccctgcagtgcccaggatgccactggctcctgaggagccgggttgggtttcttccggcctcccaaggaagggctggagggactggagggaccgggcaggggtgggggagggggagcaagtcaaattaaacgccctgcagcagtcccaggctctgcggtcagactgagaagtcaattcccacggcctccggatccctggggtctggtcccaatcacagagctactgtgtggcttgctgtggtgctatcttgcaaaaaccaagacatccaggctgctggttttcaccagatctacagcaacatacatgcgcgggaggcaacagagttaactagagagtgggactccaaccctggccctgccactcgcttcctttggtatttactgcccttccctgggcttctgtatcttcaatgtcaactgggctgctcagttgaagaacggctttgagaaatgatgcaacacgggcacaggactggcaacaaggcgccatcagcacctgggcttacgttactgtagaccaggaggtgcttccctgggacaamagccaccatgtggacgtggccccctctggcttgggcctgaaggctggrcattttccaaacaacgcgctgctgctacctgcaacttaaacccatttctaattcagctggcccccaggtgttttcatggaacaaggtgatttccaacgcccctgttttaaggtgccaagacgagccagcgtgcaaatatttgttcatggggcaaagcaatgctggaaagcactttgggagtctttccagatgaaatcaagaagccataaaagttggctacatgccagccttccttctcctggatgggccttttcccttaagacaccagttttccaaaggtaactggggacaaaacattacttcttaaggacctctctgctttcccccgctccagactgttctgtcaaaccagttcctgcaacaatttggcagcttgcaaagaaacgtggactcttctgcaatgcctgaaattttgacacctgacatttgacaaatgtctaggacattctgacaccatctcacagacctggtctcttcattttaatgaaaacaagtgaggtgagagggaagatggaaaaggtggcaatgttcatttgaggatactacttgtattttcctgattaatcttaacggaattagtgagtcacttcaaaattgtgmctttaaaagactaagattagggttcaaatccagctcatcactacagtggctgtgtggcctcaggcaagtcacttggcctctgtgaaaatgcatttgtaaatgaagggaatacctaccaggcaggtggtcaacagaacctagcacttaagaagcactcaatgggtttttgaggcaccattctcataccttgctgtttaggcacttcttttcgaccaatcaagtcccagttggttgccccaaaaatcaaaagctgccctttgcactttgacccttcaagtttctgcagagacagagaaaggaaaaaagaattagtgtgtaagtctgcacctagctttccaaggctgtccaatgacagcacgaaacgaaagaaaatcattcagttagcccttatgtcacctgtgacctccacacgaacagagtctccccacactcccctccctcatcggcaagtggcaatgcgggcaaccccaaacctgcccacagccgctcacttgctaagcccaggctcatttttatcctttgacttccctttaaaatagcttttgcaaaacactaaaaaaaaaacccaaatacatgcctccttcgcaaactgatgtacagaggtatttgcaggaagcctgccggacactcaggggcgttaaatccagctcatcctagggccaagtctctatttcacatggcaagcacggcctgcgacctcaaaccttaggagcctcacatcacttctgctgcccactctgccgagagcctttccatggggactcaggaagaaaacagtagagaacaaggttcgatttctccactgaagggagaccaggcagaacacagctttggtgggtatgcaggggtctgaatcaggcggcctttgatggcaccctcatgccgctgtccatgagcccgggagccaatggtgagtgaaacagkacctcccaggggcccggctctcaaggaacaagctgtcacagcagccagcatacttcagtgttcatcctcagtctctcaacacaaagtcatcagggccaccaactctcatactgtcaacgaaaatctacgccatttaaaaaggccattgttcaattctgggtggcactcataatattctcagcactttgcttccttaaatgtcaaaatatactttttcaagtaggttgttagtggaagactcaattctgaactcctcactcagtccacactggcaagggaagcattcactgctatcactttccgctcttacacatctttcctggacgtgaaaaggaaaggggtttccttcagtttacagaattgttcttggaaggcttcaggaaaaaagtctggcaaggcgcaatggctcacgcctgtaatcccagcactttggaaggccgaggcgggcagattgcttgagcttggagaccaggctgggcaacatggcaaaaccttgtctctacagaaaatagaaaaatgagcctgtggtcccagttacttgggaggctgaggtgggaggattgcttgagctgaggagctggagactgcagtgagccaagatcacacctgctctccagcttaggtgacatagccaggccttgtctcaaaaaaaaaaaaaagggggccaggcacagtggctcacgcctgtaatcccagcactttgggaggctgaggcgggtgaatcacgaggtcaggagttcaagaccagcctggccaatatggtaaaaccccgtctctactaaaaatacaaaaaaattagccaggcgtggtggcatccgcctgtcgtcccagctactccagaggctgaggtagaagaatcccttgaacccgggaggcrgaggttgcagtaagctgagattgcaccattgcactcccagtgttgctgcccaggctggagtgcagtggcgtgatctcggcttgctgcaacctctgcctcccgggttcaaacgattctcttgcctcagcctcccaagtagctgggattacagacactcagctaattttgtgtgtttttagtagagacagggtttcactatgttggccaggctggtctcaaattcctgaccgcaggtgatccacccaccttggcctcccaaagtgccgataaaatgccaataaaataacgccgatgaaagttcccaaccatgccaataaaaatgtatttgttggccaggcgcggtggctcacacctgtaatcccagcactttgggacgctgaggcaagcagatcacgaggtcaggagatagagaccatcctggctagcacggtgaaaccccatctctactaaaaatacaaaaaaaattagccgggcatggtgaccggcacctgtagtcccagctactcgggaggctgaggcaggagattggtgtgaacccaggaggcggagcttgcagtgagccaagatcgcaccactgcactccagcctgggcgactgagcaagactccatctcaaaaaaaaaaaaaaaaaaaaaaaaaaatatatatatatatatatatatgtgggctgggtgtggtggctcacgcctgtcatctcarcactttgggaggctgaagcaggyggatcacctgaggtcaggagttcaagaccaaccatggtgacaaagccagccctgtctcaaaaaaaaaaaaaaaaaaaagaaagaaagaaaaagaaaaaagggcagctccaggcccaatcattctaacctctacagygtgatcaccccatgggtatgctttggcagtacggctcacgcatttctaagattacacatcttcatgacggatgatttccacttcaataggaacctttacacgacccaaacctgattagggcgtcccccaagatataggttccgtcacgcttgcccactccaccacattatgtaacaggaaaaagatggtcaatctacaggaatgcatcctgcagtcctcatgaaaaggggaagtgaggccagccgcggtagctcatggcccgtcatcccagcactttgggaggccaaagtgggtggatcacctgcggtcaggagtttgagaccagcctggccaacatggtgaaaccctgtctctactaaaaatacaaaaaattagccgggtgtctgtaatcccagctacttgggaagctgaggcaagagaatcgcttgaacccaggaggcagaggttgcagcgagccgagatcacaccattgcactccagcctgggcaacaagagcgaaactctgtctcaaaaagagaaaaaaaaagttggggggagggaagtgaaacaacacggaaagggagaacaactttggttcatttaaattatttagaaaatgaccttaatcagagggtggcccagcccctgcagcacccacaactcaggttacttgaattggagcctagcttcccctggttatctgcccttctttgtttaactggcaggcctggctggaatatgctacaggtctatattcaatggcttctgttgaagtccctgtggaaggagaggcctctgggtcctctgcccaagcctaccaagttggcatggagggggcagtagagacccaggaagggtgctaaggcactggagaccaagctcccaggccagagggcaagcctagaaaagagccctggaatgccagcaactgcagaccaggcaggcggaggttcatgggcacctgtgctcagtatgaaccattgaagtcaaaccaccctacactgagatgcaaccactgcagcaaaacttcacagtgctgaggccacaccagaagcctcagctccatcaggccagagggcatggttcaggggcaagttcagacagccagagcttaaccgcagtggccttggccttggggagggagtttcctgggtgacctggacatttggtcaagggctcatgaagactgayccatcaagctagctaagcatttataggcaaacccaaccacgccaataaaaatgtatttgtgggccgggcatggtggctcacgcctgtagtcccggctactcgggaggctgagacaggagaagggcatgaacccgggaggcggggcttgcagtgagccgagatcgcgccactgcactccagactgggcgaaagagcgagactccatcttaaaaaaagaaaaagaaaaagaaaaagaaaaaaatatatatatacactcacacacacwtatatatacacacacacacacatatacatacgtgtgtatacatatacatatatacgtgtgtatgtgtgaaaaaccccggtaaactgagtctactccagtgacggtggtcagattcctatgaaggacattaactgttattcaagtttttacgtcatggatcctatttcctcacacattagatggaggttagtgtatttcgttattatttacataattgtttgctctaagctgctttcttttatttctctataacttctttcctctgccttatgtggaattaacatttaaatagagtaacagagaactcccagcaccccttctcacttaaggggtgctcctcttcctcagagaccagaaacagccaatcgtgggagagactcccgcgcttgcgggctccamccggggcggcggggcagggcgggggtgccagtgggtgtgtgggtgtctgaagctcagtgtgccctcccaggyggaatccagccttccctgatgggcctacggattgtttttttggacgaactcagtgtctgcgaccctgcttgtgtataaaggccacgcagcagacagcctggcaaacagtctgcccaatgagatgagtgattttcatgtcatttcacctggctgcctccagcaacttggtcacataacctgggcagagacacacagaaatggacagaaaaggcactgagcttcttcaatcaacaaaatgggatttctagtctaaagcaatttttgaattatgatccaaatgcaaggtgcgcgtttacggggcccagagtcaaccttttaacataggtccatgtagaagaccgctgctccggggaggtaagacccccgggaacaatgccggcatcgaccaattacctaagggccatcaactgaaacagacttccgggttggctttcagttttatttatttgctcctttcagattcaacacatctgtctcagggtccacaaaaccttggcaacccaagactggaaaaactacaaagacctgggcagcttgcaacactcacctgttttgtaggatctggccaaggctgctgcctttacttgctttaggaggttatgaagtgcgcaaagaattaggactgaatctaccctagtgtgacactgccatcaatatttggagttcctggcatgcaacttcccaaatccttggaatctccaaagcaatgtctttttgtatgctaatgactgacactggcagcccccaggcagcttccggatggggcagtgggagcctagggactttcagccccatcctccaacctcaggagggagatgactgaaggttaaagtgatgatcaatggcttaatctaccatgcctacataatgaagcctccgttaaaaacctgtaaggaccaggtcacagagcttgtggagagctgaacatgtaccaggtgggtggtctgcagagggcacggaaacacagtgccccttctgccacatctagccttacaggtctctttatccatagcctttgtaatatcctttataataaactggtgtttccctgagttctgtgagccattccaataaattaatcgaccccaaagagggggtcatgagaaccccaactagaggctagttggtcagaagctaccagggactggacttgcaactggtgtctggggtggaaggacagtcttggggactgagccctcaagatgaggaaatctacctccaggtggatagtgtcaagagatgaactggaggacacccagccggtgtgtgctgcagaactgattgcttgcttgatagcagggggagacctccctttacgtctagtcacagaagtcttgtgttgggaggcggggcrtggtggctcacgcctgtaatcgcagcactttgggaggcgggcaaatcacgaggtcaggagttcaagacagcctggccaacatggtgaaaccccatctctactgaaaatacaaaaattaccgagcacagtgacaggtgcctgtcatctcagctactcaggaggctgaggcaggagagttgcttgaacccaggaggtggaggctgcagtgagctgagatcacaccactgcactccagcctgggagacagagcaagactccatctggggtggggggtgcggaagaagtctggtgttggttgttgagtgtggccgtgagagcggaggaaaaaagaatttgaattttttcttaacacctaggcaatgacaacgctcatctgccataagaatgttctataaaatgcacatcttttactcaaggcaattctgcccctcaacaatgtaagtatttggctcatcttctacaagcccgacacctgcagctttggggtcactgaaggcaatatggttttggacatttcctgggcggctgctttcacacagacctcctcctagcaaccctgagcggggcaaggcatgcaaaatgctcagtaaaaaaggttctttctgcaacaaggactgctgtctgcctgtggcagcacacagggtccctaggactgctcaacagagaaacagagaccagaaacctggggccagggagactgggcaggaggccaacccaggacaaggggcagagggctgccctaggcctatggaaaggcaatggggctgcatggacccagccccgaacatggaccaaactcagtagatgctaacaaaacttaaacgtggggcactttgggaggccaaggtgggtggaccacctgagatcaggagttcgagaccagcctggccaacgtggtgaaaccccgtctctactaaaaatacaaaaaattagccaggtgtggtggtgggcgtctataatcccagctactcgggaggmtgaggcagaagaattgcttgaacccgggaggcggagattgcagtgagctgagatcgcaacattgcactccaacctgggcaacaacagmtaaactccagctcaaaaaaaaaaaaaaaaaagcaaaacttaaatgtagggtgtgcactttccatgaggcataaaggggcatcatatgctgaaccctcagcctcccaggtgctctgattctagaacagcaccgacagcccaaaggatgggcatcatgggcccctgttggttttaagtggatagagaaaggaagatgtagcttttagagtcctgcttatacacatatgtaaaataataacgtatttatgtgtataaacaggaacttaaaagctgcaatggactgctgtttactcacattaagacttacaaacatgcaacccaacacagggctcgcgcctgtcatcccagcactttggaaggaggctgaggcaggcagatcacttgaggccagcagtttgagaccagcctggccaacatggtaaaacccagcctctacaaaaagtacaaaaattattcgggtgtggtggaacacacttgtaatcccagctgctcgagaggctgatcagcacacaaaaatcacttgaacctgagaggcggaggttgcagtgagctgagatcgtgccactgcactccagcctggccatagagggagactctgcctcaaaaaaaaaagactaacaaatgtgccatttccattgacaaagcagcttcaagcagcacagctggagacagaggtgggccagggagagccagtgtccctcacacactccctgtctctacctccttgggtcaatctcagcatggggtaaggatcttttgctctgatggcaaaattcagcgttccaacagtctggagctgtacagctgataactgcagtcttggatgtctaaacacaatcttgcttttggaaactcactcaaaataggatacaggagacgcggaagctcacctggcctttctttttagtttcrtcctaacatactgtgttcggagggcaaatgtctggagtctggcacagcagactagacgtcaaaggaaaacagttcctgtgttccagtttctcaatactttggccattgtctagtctarcctgatccaagaccccgggcaagaccttttgacagcttttgacgggctctcctccactgcctaacatgttaaccctttcacccagarggcacttttacaaagcatattcccatgtgcaatttgcagggacatcaggagttacagcatttggagatccagttccatccatgactttggacaaggccctcgaattctgtgccccagtttccctatctataaaacggacgtagaaaatgtgttattagacactgcctgcgcttctctggaggaaagcactctgctgttaacccttaaacacccttaggagatgggcacttatggaaggaaaaaaacctctccgggtgtcaggctctacaccccaggtggaagttcttgctctctgggggttatctgagaatctggtgaaaacttagaccctcttctgaaaaacatatcccacaccacaccaaacttaaagaaagttctgtgggggtggggagatgctgtggcggcagatgccgggttcagatctccggctctgcaggctttttcgggaacgttaacttgagtcagccacgaccttaattaagatttkagaaaacagaagcccgcccaggaccctaggagatgcttcttcacttgggggggctacaacagagccctcgcgagcatcctgcagcttcggaccaccggcggcaaacaaagcccgagcaccgctcagccggggggcttccccgacctcgggggagggctctgcggagcatgcgccctcgcaccccgtcaggccccgccccccccgggcgccggagccgaggcggcgggaacctcaaagccccggcgcaaacggccgctccccgcagagcgccggccgccccctccccgcggcgcccgggcgcagcggcggccacggacgtgtggggcccgctggccgccccctcttccaggccgggcgaacttaccgaggtcccctttcccggggcggggggggaggggcgcagagggagctgtgggggcggggccatgaccccctcgtgcgggcttcggccgcccctcccccgccgcgggcccgggcgcgcgccccaaccgccaaccgcccgcgcggtgcccggggtcgggtaggccgcgggccgcgcgccccgtaccgagcccttttgttgcgcggaggcggaggcaatgattcagcccgcggcctgcgccggcccggccgccgggagggagcgtgacgcgaggcggcccccggctggaacgcgcgccgtgccgcgtcgctgagcccgccggccccggccctgcgcccacccgtctaccctgaccctcactcacgacgcgctccttggtgtgctcgggttcggtgatgaccacggccgcgccgcccgccttgcctgctgtcgccggccgcgccgcgcgcttgcccccgccgggggccccgtcgagctccaggccgtcctcgtcgccgctgctgccgccgccgctgctgctactgcagcgctcgggccgctcgcgcttcctgcccgccgggccgccgcgtttcctgggcccggcgcgggcagtgccgttgcccgagctcggctcctcccaggccgccgccgccgccttcttcctgggcatggtcgcggctggagggagacacggggcagcggcgcacaatggacgggttataaactgcgcggggggaggggagcggagacgagccacccggcctccacttcctcctctgccctccccaaagtggcggccgcagggtgggcggagagggggcgagttgggagaggaaatcgcgcccctccctggccccggcgcggctccttcggggaatcccgcagggcagccgggagccccagaggcaatcccctggagggagaattgagacccccggcctatccgtaagttaggtttgcccacaaagcatcacagttgcaacctcgccccccaaaagtaaagggaaagtaaaaccagcctccagtcccctagattttcattaaagaaggcttcgggacacttccaggattcccccttggcacctgggtggtaagggagcccctgctccccggctaccccacctgctgcttttgtctccgcagyctccccccaaacccactcatsgcatttaatgcaacgctctcccccaccccgcatcagccctggacccccgttcggccccagctcaggggtgccgacctcgggctctagttagccgaatccctacggcggactgcccccggcgacgggggaagagcccgaagaaagctggaccccagccccaaacacctgctcgcacagacacgaaaaataaaaactttaatggtgcccaactctctcccagcccccttgccggccgtgcggcccggccggtytccgattcgactgcaaagtgtccagggccgccgccagctccccggcgtccctgcgctctcccctgtctgcttttttttttttttttaattgattttgaacaatgggatctctgtctgtctccgattaaaccacgtggatccgccttccttcctctttttattccttcaatcacccagcccccctcccccaggtttttttttaaccttttctctttaaaaaaaggaaaaaaaaaaaaactttcccagaccccacaaactgatcactgtcgattttcagaccctacctggttggagtgatgagaaaccggagagaaaaaaggaagagaagcaactaaaagacggatcggagggcttttttttttccggcccagacgagggctccagcccactcaccagatacacttaaaatgtaaatacgagcttccagaacaaatgctacaacacaaaacagaaacacatgtgcggccgcgcggcaagcgagcgcgcggcggggcgggaggcgcggggcgcggggcgcgcgcgccccctgccggccggcggacccgttgccggcgcccccgccccgcccggcctggccctgccctgcccacccgagcctgcgccgcgcgccgcgcgcctcgccgcccgcctcggctccgctgctcctgcgcctttcgcgggcccgcgagcgcgctttgggccttccacgcagtgcggcctgcgcgtcagggacttctttgcggcttaggaggatgttggattgtttttcctgggcacgtctagacaggtcacatgaggacactcgctggaaaatagttacttcgctcacgcagcagccaacaagggacgtgccctaattgagtgattggaatgaaagatgaatacaatttgaataattttttcctgtgcagagagaagctgagttttatttgcctgtggatgtgtcctcagtatgtaacaaggtgctgtgacacggaagaatcacataaaggtttgctgtattagtgaattaattcataattaatttgagggccgtggaggcactggaagctggctttgaggggaactttttcattttttgccaaatatttactgagcccccggtacatgcaagacccacagtgcccggggctgcagagccagtgaacaaggtttccaccccagtggaacgcacagcctaacggaaagacagatcagtaaacaagtaattacaacagtggtaagctttacaaagtgatgcctgtgtaggaacattatggcgaggggatttatcctagtccagggccagggaaggcattcaggtggaaagttatgctgaacaacttaaaggatgaataagacccgatgaaagggggcaggaaaagtattccaggccaggtggagtgaacgggacgctccacatttcgagatcttgagagacacctcctgggagggaagctgtctggtggggctggggtgagaagagccaagaggctgggttctgaggaggtaggcaggggtgcgagggcctgcatagaccctagtgaaccgcagtgaggcttgatctcgttcgcgtgtcctgggacgggtgaaaaaagccttgcttgcttcctaccggtctccaccctccacctctccaccccacttccattacgatctcaccgtcacttgctctcctctcaaagcttttctcctgcttcttttttcctgaggcgtaccgcacaaggaagttccttcttcaggcaacttcttgaaaacgcataaagttctaggatttttgtgattcattcattcattgttagtgcaagaaacaggactgggaagcatcaagtgtcctgtaaaggaagacagagaaaccaagaggcccaaatctaaggtatttgatcaaagtcaaaagtctgtgtgtcaagagagctgagagtgcttatgtaaaagaactttggaaatgagaaatcaactggtacgtttcagagattttcagaaaagtcaagatggaatagaagcaccctttgaaagcctattcttaatagacctgcatttaaaaagattttttagaggttaaactttgacgctttgatataaagcataagtagaaccaaccagaaaagaatttcgcctaaatatgccatcaagtccccttcaggaaatggcatgctgatgcttgtcagccgaggcgggtggctgggtgtttatcctctaaacaccctgtgtggccaattaggaacaccactgacagtacctttagatttcagtctgcaagtcttttccttttttctcctgcccctttataatgctttttgccagcttaaaagactcatgcctcagacacactgatgcaatgagacgctaatatcatattgcatcatctgatcctaggtgtggtgctcctgaaactggtttttcttgaggttatgctgcagtagaaaagcactttgggtataacaccctggaactggccctacttgtcagaagacaaaagtaatttttgcaactccatgcctcaattccacaccactattctcccagggaaagcctgcgtgactctcccggctggaattgggtgtgcaacagacattcatcagttaggcgtgtcatgctgccacttatgtaacaaatgttacatagtgaggtgcacctacaggcaagctgaaaatgacacttcctccttcaaactgtgcttggaatttcacctcgcttctaattgagcaaattctccagggacaggatggtttggtgcaaaaccgggagaggggaagggaaagaaggtggctgagatttctctgacactttgaggcacaggtgtctggcactgtgctgagcattttacacccagaattttggaaatgtggctgcaagtgccagcctgccgtcactctttaacctcatcttcagcaaaatcatattgcaagttagattcagctacgcttaagttcttttccaggggtgaggtgtgattttttctttctttttttttttttttttttttatttttttagatagaatcttgctcctccagcacccaggctgaagggtgatggtatgatcccagcttactgcagcctctaccttccttgctcaagcgatcctctcgcttcagcctcccaagtagctgagaccacaggcatggacagctacacttggctaaattttttttcttttttaatgttttgtagagacaaggtctctctctgttgcccaggctggtctcgagtggtcctcccacctcagcctcccaaagttgcgggattataggggtgagccactgtgcacagcctcagaagtataattcatttttttttttcttttgaggtggggtctcgcactgtcacccgggctggagtgcagtggtggcaacctccacctcccaggttcaagcagtctcctgcctcagcctcccaagtagctgggattacaggcgcataccaccacgcctagctaattttgtatttttagtagagacggggtttcaccatgttggccaggctggtcttgaacttctgacctcgtgatttgcccgccttcgcctcccaaagtgctaggattacaggcgtgagccactgtgcccagcctcagaagtgtaattctattcaacttggctacagaaagctacacctgtacttgaaagattaattttctgatccagtgtctataaaaatgaaaccagtgatcctgggagtgatgcgctaaccaatggaaacgattctttctctttttttttttttggaaactgggtctcactctgtcacctaggctggactgtagtggcgccatcttggctcactacagcctcgacctcctggggtcaaacagttctcctgcctcagccaccctagtagctgagactgtagacgtgcacctccacgcccagctaatttttaaaatttttttgtggagacaaggtctcactatgttccccaggctggtctcaaactcctgacctcaagcaatccttttgccttggcctcccaaagtgctaggattataggcatgtgtcactgtgcctggcttctttttactcttttcaatgtgactaccacaaaatttaatattacatattaagttttttgtagctcatatgttattcctgttggacatcacagccttcgaaagcatagctggaaaaccagtaatttcctccagaccccactctttctgcatctgttctctagtttctcctctctgtaaaatggcaagatagagtttgggctaaatttctcttgaggttacttctggatttcgtattccctgattctgaggacagtagtcagcggggaatccctgtcatagtgtttggagagatgttttctgggagatgcagatccggtcgtcctatttctgccaatgagtcatgaaattttcaaacgcagagtctttaaatattgtagttggacctttaagttctctgtctgtgaggcatgcctgggcttggcttgtggcttcttcatctttgtttttctagcaagcacccagagcagcccggcgtgtagtaagctgtcaatatatgtttgttcatctaaataatatccagcggaagaactgaagcccagggagatgctgaggcctcctgaggccacacagctggcagataggatagccaggaagtgtacaggcatctgcatcagtaggaggattgtcagaaacacagaatctggccaggcgtggtggtacacgcctgtaatcccagcactttgggaggctgaggcaggacgattgcttgagcccaggagttggagaccagcctggacaacatggtgagaccccatctctacaaaaattagaaaaaaattagccagccgcggccaggcgcagtggctcacgcctgtaatcccagcactttgggaggccgaggcgggcagatcacttgaggtcaggagttcgaaaccagcctggccaacatggtgaaactcccgtctctgctaaaatatacaaaaattagccgggcgtggtggcaggcaacttaatcccagttacttgggaggcagaggcaggagaatcgtttgaacccgggaggcggaggttgcagtgagccaagatcgagccattgcactcaaacctgggggataagagtgagacttctctcaaataaaagaaaagaaaagaaaaaaattagtcaggtgtggtgacgcaaacctgtagtcccagctactttggaggctgaggtgggaaaatcgccagagcctgggaagtccaggctgctgtgagccatgatcatgccattgcactccagcttaggtgacagagtgagaccctgtctcaaaaaaataaaaataaacactgaatctcaggttcagcccccagacctactgaatcagaatgtgttttttttttttttttttttttttgagttggagtttccctcttgttgcccaggctggagtgcagtagcgcaatttgggctcactgcaacctccacctcccagttcaagcgattctcctgcctcatcctcacaaatagctgggattacaggcacctgccaccacacccagctaattttttgtatttttagtagagacggggttttgccatgttggccaggctggtctcgaactcctgacctcaggtgatccacccacctcgacctcccaaagtgctggaattacaggcgtgagccatcacacccggcccagaatgtgcatttttaacaggtgatttttatgcatcttaaagtatgagaggtgcagccaggcatggtagctcacacctataatcccagcactttgggaggctgaggcgggcagatcacctgaggtcaggagttcgagaccagcctgaccaacatggagaaaccccgtctctactaaaaattagccgggcgtggtgagcggagattgcgccattgcactccagcctgggcgacaagagcgaaactccatctcaaaaaaaaaaaaagtatgagaagtgctactgaaatcataccacttttccataccctgtggaagccattcaaaaggtggtttctcatactttaagatgcatctagccgggcgcagtggctcacgcctgtaatcccaacattttgggaggccgaggagggtggatcacgaggtcaagagatcgagaccatcctggctaacacggtgaaaccccgtctctactaaaaatacaaaaaattagccaggcatggtggcgggtgcctgtagtcccagctactcgggaggctgaggcaggagaatggcatgaacccgggaggtggagcttgcagtgagcagagatcgcgccgctgcactccagcctgggcgacagagcaagactccgtctcaaaaaaaaaaaaaaaaaaaaaagatgcatctagtccagggtgaggaggtccaggatgcagaataccaagactcaccaagctggctgatgtggttaggctttgtgtccccacccaaatgtcatgtttttatttatttattaatttatttattatttatttttttattttttgagacggagccttgc

SEQ ID NO: 97825 - DNA, 23349 bp, Homo sapiens
agtcatttaatctctctaaatctgtcatatcacctgtgaaatagcaataataatacctactgcctaaggctactgcaagaatgaaatgggatcatgtatataaataaaggcttgcctggggttctttctcagcggagatcgctgcctgcaattctcttccttgcttccttttgccccagccagtgggagcagcctggtggtggcccccagcctcagttcttccactcactgtaggacctgagttatagtggaagcagagtgcttcacatctcactcctgtggctcactctgcctttagttttgagatgactgagcctccaaaagcctttgagagatacctctgccctcagtcttggctgtggtttggagttgtcttggaggtcacttggagctgggtaacaagaaaaatgacatttgacagaattgttttctttgtcagatgctgcaggaatttttgggggagtttgttggtcatgattgcttaaaaaatcctttttttaagtgggacattagtaacaagatgttaaaattgttaataattttttttttgagacatggtttcgctgtgttgcccaggatggagtgcagtggcatgaccacagctcactgcagcctcaacctcccaggctcaagtgattctcccatctcagcctcccaagtagctggaactagaggagcgtgccatcatgcctggctaatttttaaaatttttttgtagaaacagggttttaccatgttgccctgggtggtctagaactgccgggctcaagcgatcctactgcctcccaaagtgctgggattacaggcgtgagccaccgcgccctgccccacatcatgtgggaagggtgcggtggctcacgcctgtaatcccagtacttcgggaggctgaggcgggtggatcacgaggtcaggagtttgagaccagcctgactaacatggtgaaaccccatctctactaaaaatacaaaaattaatcaggcgtggtggtgggcgcctgtaatcccagctactcgggaggctgaggcaggagagtcgcttgaacccgggaggcggaggttgcagtgagccgaggtcatgccattgcactccagcctgggcaacaagagtgaaactccatctcaaaaacaaaaaacaaaaaacaaaaacaatggtagcgtatgctttgctgacacaattattttatgtccctaggttggttatgtgaagttttctgactcttccctgctatttaggaagggcttcaaagacctgaatacttagtagccagtgcagcagggtttcagggtctggcctggggaggggaggggagggggagggcaggttgcagctcaagtggctttagagatgctgagcctctccttctgtcctgcccaggacgcaatgagcccctgaagaaagagcggcttaagtggaagagcgactaccccatgactgacgggcagctgcggagcaaacgggatgagttctgggacacagcgcctgccttcgagggccgcaaggagatctgggatgccctcaaggctgccgcctatgctgctgaagccaacgaccacgagctggcccaggccatcctggatggagccagcatcaccctgcctcatggtaagtgggcagggccagggctttatccccgctggagctagggggtcaccagcacagtttgagggtgttgaggagtgtggagcggtggggcaggtggttactcacgtattcattcattcaagcaccccttactgagcatggaccaggagtgggtacacaaagaaaaagagacacagtctatgcttgcctaatgacatgacagaaagacaacaaacctgcaaagcagtgtcacaaatgcactttgggaccccagaacatccaaggcactgacctttttattttatttttttttttgagatggagtcttacttgctctgttggctaggctgaggctcagtggtgggatctcggctcactgcatccttcacctcctgagttcaagcaattctcctgcctcagcctcctgagtagctgggattacaggcatgtgccaccatgcctggctaattttcgtatttttagtagagacggggtttcaccatgttggccaggctggtctcaaactcctaagctccagtgatccactggcctcagcctcccaaaggcactgaccttttattgggttgttatgtgctggacaccgaactagaaacttccactgcattagctcacgtaagttcatagcagtcttatggggccatgtaaagcagagggtgacagtggagccctagaatcacagacttgagtttctttttttttgagacggagtttccctcttgttgcccaggctggaatgcagtggagcgatctcggctcaccgcaacctgcgccgcctgggttcaagtgattctcctgtctcagcctcctgagtagctgggattacaggcatgcgccatcacgcccagctaattttgtatttttagtagagacagggtttctccatgttggtcaggctggtctcaaacttccaactgcaggtgatccgcccgccttggcctcccgaagtgctgggattacaggcgtgagccactgcgcctggccacagacctgggtttcaatctgaatgtttccctttcctaactgtcttggctttagcaaggagcttctcgaatttagagcctgactgccttacgactgtaaaggggagatgattattaggattcagtaagatacacataacatcatttagtccagtcccagcacttagtaggtgctcaagagacaataaacatatttctccatgcattacgttttgccagtaaggacactaaggcccatggagagcagagctgtgctatttcattcatccctgtaaccccagcacctggcacatgtgaagaagtgaaaaataatatgccaggatgaacaagccagtacctggtggagctgggatgccagctcaggtcttcctgactccagccctgtacacctggtcatcaggctgtcctagggagatctgactgtggggtggccatggcaggtgtattagtctgctcaggctcctgtaacaaaataccacatgctgggtgacttaatcaagagacatttattttccacagttctggaggctgggaaatccggcatcatggtgctggccggttcaggttttggtgaggactctgttgctggcttgcaggtgtccgtcttcttgctgtgtcctcacatggggagcgagtggagagtgagatagtgctctagtgtctctacaagaactgtaagccagggcagtggagcacacctgtagtctcagctgctcgggaggctgaggtgggaggattgcatgagcccaggagttcgagactagcctaggcaacatagggagatcttgtctcaaaagaaaaaaaaaaaaaggaccatttttcccatcaaggggtcagaaggtcagggccccacgctatgacctcatttaactttatttatttctgtataggccccatgtccaaatacagtcacattgggggttagagtttcaccatatgaatttggggggacccaaacatttaatccatgatagtggatccccaagctgactctgacagccctgcctctcctacaggcaccctctgtgaatgctacgatgagctgggcaatcgctaccagctgcccatctactgcctgtcaccgccggtgaacctgctgctggagcacacggaggaggagagcctggagccccccgagcctccacccagcgtgcgccgtgagttcccgctgaaggtgcgcctgtccacgggcaaggacgtgaggctcagcgccagcctgcccgacacagtggggcagctcaagaggcagctgcacgcccaggagggcatcgagccatcgtggcagcggtggttcttctccgggaagctgctcacagaccgcacacggctccaggagaccaagatccagaaagattttgtcatccaggtcatcatcaaccagcccccaccaccccaggactgatgggcccacggacccctgggaagaggccccgcctggagcactaggcccccaccctgctgctgccttccagtgctgtcattttcttcaggggccctcccctcggtgtggctggtgggtgagccgtgaagggaccctgcctttcagggcactacgcgccaccagttcccggtacccagggagcaggcagccacacacgggccttgcaaccttgtcagagaaaaggcgaacagggccctcaccctgcctgtctcccgaagcaggttcgagccacaagggccaaccaggaggcccctggagcccagatctgtcatctggtgctgccagctgtgctcactctggttttctgctcagggtctgaagcagctgctgtctccctcctctgcccccatcccctggctctcccctgggcacagtgccactcccttggaagggagggaaccacccgtgagccccagggcttgggaagcctgaggcgggcctctgcctctccctgcccccagcacaattggcagagatgaggcgggtggtggacggctgggctgtcgtggcagggtctgcacagggccatgtcctggctgtaacccaggcagtgggaggtctgcagcctggtcatggcctccacagcaggtccctgtggacagacatatctgcatatttatcaataaagccttttgctccttctcgcttgcctggcatttgactgaattctcctgcagctctgtggggcccctggagctgttctggtatgggaacaggtggatgcctggcctccccagctgctctgggcatgcaatctccagcagagtgagcctggaactgccagtcttctgggccctgatcccagctcccctggtgtcctcatgagtcctcaggaaaagccactctttgcttttctttaaagcagagccatgctgcctgccttgcctcctccatcagttgctgggaggattaagcaggaagacagatgtgaaagtgcttgcaaggcgaagacagcacctcaggaaggtggtctgctcctgcagcaagaggggctaacttccggccctggagacgctgtagccatcgtgatgttaaagcaaaatctctgacagatttagatcgtgtgtcagaggtttgtgtcagcttcccagcaagggaaccagaaaggaaaaggaaccggttcctcatgcttcctaggggaatgcatgcatatctgaagagaagggaatcttatataaggctgtttagctaagggcagccaccagccaggtgagccttacagaagcacagggctgggtgtctgcagttccctagcagattaacctgggtcacagtgactcagagctccagcatgcgagttccaggtgtggaactgagcaagtacagatctgcttttgctccacttgggagtatttttccttcttagtgagcatgggcagcctcctggccagggaagtctggcactgtctgggcctgacagggaaaccctgggagggtagaaggatccagagtagctgctgttcctcgctagctgggcttagtgctttccggagacccctttcttgaagcaagactctgtaagccctgcagaggtcccctgagcacttaccaagagaggagacagattggataaggtttgttcatgactaaaagtcacccagccaaatgcagtgatgcttaacggggaagcatgtgggaccccggagagccgaaggccagcgtgagctgtgatcagagagggagacagctgcccttcctgctaccacggccctggcctggacaagtagagtgtgaccctcctcacagccagcagggcctgtctgcaggacagcctgggagtacagaactgtcctgggtcccccgtttggttttcaggccctcttcctggagctggctgagcagggtttccaggcatccagcaggtggcactgtcatctgggctggagcatgcagccagcagttcccttttgcaactcagttgccttggctaaggcccaaccagtcccaagtgctcaggacagaggctggacgggctccttcctgcacccctgctcttgggacacagtgccctccggctctaataggccaggagttgggggggcaactggctctgctccctggccctggctccccctgctccctggggctgcccgaggtgaaggtgacaggtgggggaggcaggtggagaattgggccagtgagctcatggcaaaggcgcccagctgggcaggggtgggtgctctggcctataaagcccccgaggccctgtggcctgcagaggcggttatggacggcaccatggaggactccgaggcggtgcagagggccacagcgctcatcgagcagcggctggcacaggaggaggagaatgaggtgcgagcaggggtggaggtgcccaagggggtctgaggagatccagttctgctgtcaaggggagggagatcctgtctgctacacctgtggtggggaggggggcagatgtccccaggggyccagttgggcctcattcctgtcccagggtattactggcagggggtattgctggcagcagaagactgaggcttcagccttcaaaattaagtcagtgagatggggagctgggctgggcttcctaagactgctcaccctcctgggccttgagagacagtgggctgtacaaagcagacagctgggtgctgcctgggactttcaggaatgtgtggccctgtgatgccccagtgactgagtgggaggctggggcaggggaaactccagtatttggccagtgaagaagagagtgaggaagggatgctgggaaatgaagcatggattttgccagcctgctggccacccttggggagtcctttggcgtgtggtgttctgggcaattgcattttctctgggataaggaagtggagcggtggcagggggtgctggcttgtcctattctgcatttttttttttgagacggggtctccctctgttgcccaggctggagtgcaatgcatgatcttgactcactgcaacctccgcctcctgggttcaagcgattctcctgcctcagcctcccgagtagctgggattacaggcatgcaccaccatgcctggctaatttttgtatttttagtagagatggggtttcactctgttggtcaggctggtctcaaactcctggcctcagatgatccacccaccttggcctcccaaagtactgggattacaggtatgagccaccatgcccggcccctactcttcactttatttaaactaatacttcatctagtgttggctctgccaagagcccagagctgtagaaatgggtggaccaataagggtcagaccctgccttctttttaccaacccaggattcattttagcccatttgttggtttcatagtcaactaagaaacaaggcaaagggaagaaatgactaaatagaggtgtgaatcagaagtggaggaacacaaggggctcatgaattgttctgagggccttcaaggactcctctgtggacagggccaggtgcagtggctcaagcctgtaatcccagcattttgagatctgagatctgaggtgggcagatcacttgaagtcaagagttcgagactcacctggccaacatggtgaaatcctgtctctactaaaaatacaattagccaggaatggtgtcaggcacctgtaatcccagctactcaggaggctgaggcaggagaattgcttgaacctgggaggcggaggttgcagtaagccgagatcgcaccactgcacttcagcctgggtgacagagggagactccgtctcaaaaaaaaaaaaaaggggactcctctgtggacaggaggatacctgagctgggccttcaaggggactcagtggagtccaggatggtggagggtattccagcctcaggaaatgcaggagctgaagtttccatgagtgaaagcgtggctgtcttgataaagtctggtagtaggggctaaggctggaaagacacaagccagagagggccatgtaaaagatatttattctgtgggcagtgaggagccactaaatgttattgagtgagggagattggtgtcatctgacctattttaggaaagcagctctgatggccctgagaaggacttgttggaaaaggctggccctagcaggaatggaggggaggagataaatcaggttggaggtagatgccattcaaaaaaaggagtgtgactgaatgaggggtgaggaggaaggaagggtcaagaccccaagggaagaagggatgaggtcaggaaagagcttggaatgagccctggctggggcaagcatccctggatctctaggaatcccacttctccctcccccaagggcatgtgcctatggttggctggtgccaggcaggtgagtcatgctgctatgccagttctggagtgctgccaatagacacacagaccttcagcaaggggacgcagagcagtgtcttccgttcattcatccaataaatatagctacagagctgtcaggacaccagtgccaggccctgtgctaagcattttacaggcattctcccatttaatctgcatagcaatctatgacgtaaagtgggagctttgtgtgtttcatgaactcacattcaatgcagcaaacagctactgagcacctactgtgtgccagcccacaaagacaaacctgaaatgaagggctgtagggtctgaggaagatgtgggtgagcattagagtccccagttgtctctaccaggccccagcctggcagggttcttggaggagaacctctgtctagcctgtgccccatccccagggtgggaggggaaagagggccccagaggccagtgcaggggctggagttccactgtggcgagtttactgggttaggtcatcactgagaacttaagggttagcagagatgctgagtctgcttgccatcatccattcgatcattcattcattcaccagtcactaagcacctactatgtgctagagcctgtcacagatgctggggacaccaagatgattaagacacaagctcgggagccacagtggctcaggcctgttgtcctggcgcataaggaggcaaggctaggcatttgaggccagcctggacaacatggaaacctctcatctatgtgacaacaacaacaaaatttatagccgggtgcagtagctcacgcctgtaatcccaacactttgggaggccaaggtgggcggattgcctgagctcaggagtttggaccagcctgggcaacatggtggaaccctgtctctactaaaatacaaaaataattagccaggcgtggcggcatgcgcctgtagtcccagctactcaggaggctgaggcaggagaattgcttgaacctaggaagtggaggttacagcaagccgagatcacaccaccgcactccagcctgggtgacagagtgggactcggtctcaaaaaaaaaaaaaaatacacaagctggccctctggatgctccctgaggagcccagccagagtcccacatgcagcagtagctgcagccccaggttatctttcattcttggaagaagatgcagtgtttctgattaggccagcactgagacctcaaaccatgaagcccaacatgaaagagagaaagcagtggctaacagaaccttcagaatgaagacctgggaaatcggctctcaaaaccaccctgaaggagcaaatgcgggagctcagggaggaatgggaaaggggcctgagtgctctgtaagggtggcctccttcccagctgccacattgactcaggaccctccaacctgggcaattgttcctggactcatagccacacaagctgcctggtggggactgcagagatgggagtgccagcacatcacaaagagagaagaagcagtccaggaaaatcagagggcaaatgcagagaagacctggcaggcagttggacctggattacagtgaaaagaaggttaagacttagagcccgtttcaggctgaaggctgaggagctgctgctcccatcaccaagttcccctgaaagcaatagtttccaagctctagacttcacagatcagtgaaatctgagagaaaaaaaaaatagtatctaacaaagagctgccaaattttatattgctgagtaagaacatttaagaagtaatcatctctcatcataattatttcatcaaagtgaattatttatttttaaaacttattttatttatttatttatttatttatttatttatttatttatttatttattttttgagactgagtctcactctgccgcccaagctggagtatagtggcatgatcttggctcactgcaacctccacctcctgggttcaagtgattcttgtgcttcagcctcccaagtagctgggactacaggtgcgtgccaacatgcctggctaatttttgtatttttagtagggatggggtttcaccatgttgcctatggctggtctcgaactcctgggctcaagcaatccacctgcctcggcctcccaaagtgcttggattataggcgtgagccactgtacctggcctatttattttttgaggcagggtcattctctctctctctcactgtcactcargctggagtgcagtggcatgtccttggctcactgcaacctccccttcctgggctcaagtaatcctcccacctcagtctcccaagtagctggcactacaacaaaagccactacgcttggctaattatttaatttttttgtaaagatggggtctcactatattgcccaggctgatctcaaacttctgggctcaagagatcctcccacctcagcctcccaaagtgctgggattatagaggtgagccactgtgcctggcctatttatttttagagacacgatcttgctatgtctctggagctggtctcgaacccctgggattgagcaatacttctgtctaagcctccccagtagctgggactaaaggctggcactaccacacccagccaaagtgaatttttaatgccaaaaaagtaaagaaaaaaataatcttggtgcttgaaagagtgaatatatttaatctcatgaaaaactcaactctggtggcctttaatgttgttttgcagggatccaggccagttagtgggcaggtgtctgagctcagggttgggactggggctgaagctgaggtggggaactcaccccttttgggggcccctccaggggccctgctcttgctgggggctccccaggatcagccagaagggctctgagaccayccaggaggatgtcyctgtggggtgtccttggtgtggttgggggagaggctgcctrtctcctcgggtcctggagaaggtgccctctttggatcaccagaaactccgaggagacrcacgccagaagctgcccatggacttgctggtgctggaggatgagaagcaccacggggctcagagtgcagccctgcagaaggtgaaggtaagcctgggaggatccaatgtctgcacccaggggaccagccaggtagccatggcctgtctgcacctctccccacgtggcccatggaccagcagttcagcacccccggtagagcttgctagccctgcagaatctccgccccgtcccagaactactgagtcagaattcccccaatgtgagagccatctaggcctggaaggagggatagaccttggttccttctttcttaagagggtcttcctgcccaccccaccctccccaccagcttagctcagaggtctcccaagccccccaaactctctgcccggcctggggggttgatgggccatcccgcgcagggccaagagcgcgtgcgcaagacgtccctggacctgcggcgggagatcatcgatgtgggcgggatccagaacctcatcgagctgcggaagaaacgcaagcagaagaagcgggacgctctggccgcctcgcatgagccgcccccagagcccgaggagatcgtaagggtcctggggaggacaccgcgagggggcggagggggagcccgggaggcttcggattgctgggacggcccgtgactgctgcgtccacatctgcagactggccytgtggatgaggagaccttcctgaaagctgcggtggaggggaaaatgaaggtcattgagaagttcctggctgacggggggtcagccgacacgtgcgaccaggtgatgctcctagccgcccctgaccagcctccctgtcagttgccacccccactccgttcggctcctgggtcagcccactgtgagcctatttgagaggaggcaccggtgttctttggatgggtgggtggctggggcgctcagaatgggtgtcccttccccgtacaggaattgacctaaatccttaaacccttttccaacttgaatcacctgcagagcaacaaatgtcacatgtttgtttaggaaagaaagaaaaatagaatcaaataaaaacagaccaggaccagaagatgtgggctcaaatcccatctctctcactcacgagttgtgggacctgtggctgggtcggtgccctctccatgcctcagtttcctcctctgtaaaatggcctacttccctcacaacatgttacggtgatcaaatggaatattaggctgggcactgtggctcacgtctgtaatcccagcactttaggtcaaggtgggaggagcgcttgagcctaggagttcaagaccagcctaagcaacagagtgagaccctgtctctatacatatatagataaagatatagattttttttttttttggtaaaaggaaaaaaggaatattagcacctcagtaactcagtattcactgaatgaatgaagaaactatcaagcatgtgttaagatatgatatttttgtttctcatggtatagtactgtactttttttttttttttttgagacagagtctcactctgtcacccaggctggagtgcagtggcgcaatctcagctcactgcaactttcgcctcttgggctcaagcaatcctcccacctcagcctcccaaagtgttgggattacaggcttgaaccaccactcctggcctatttttttttcatggtaaaacataacgtgaaatgttccactttaaccattttaagtgtacaattcagtggcattaattacattcacaatgttgtgcagccatattttctttttttttctttttctttttttttgagatggagtcttgctctgtcccccaggctggagtgcagcggtgcgatctcagctcacagcagcctccacctcccaggttcaagtgattctcctgcctcagcctcctgagtagctgggattacaggcgcccgccaccacacccggctaatttgtttatttttagtagagacaaggtttcaacatgttggcccttgacaacaagctggtcttgaactcatgatctcaggtgatccacccacctyggcctcccaaagtgctgggattacaggcatgagccaccgtgtccggccccttacagccatattttctaaatttttcatcacccatcatacttctttttgttttgcctgaaactgcctctttcacacttcccggggtgctttcttgctctcgtatcctggaatttggcacattagtggttttccacctttggtctgcattattgtagacttggaccacatgtcctttctgttctttagactccagagtcttcatcctctcagtctgtccaactacctcctacttccgagcaccatgctaggtgccagaatacaaaaaaacaaaaaaagcaaaacaaaacaaaaaaacagaccagggttggttccttggggagactgacatgtaaccagatcattagaataaggaaagatactcactgtgtgtgtcctgtaaccagatcatgagaatatggaaagatattgtggcttgagcgtttcaaaagtccaaggcagaaaggagaaggggaaaagtttattctttctttgaatcagtgatcagtgtcacctgttcatgctggccttgtgctaggcacttggggagtccagcaagacttgacctgccctcgaacacactctcacagttaagggtcatctgggccctagggaagccctggcctagaggtttcaaggaaatgatggcatttgagctgcatcttgaaggagtagcagattttatcaagcactcccaggaagtgagggcaaaacaggcatgcttggcagaggaaaccacctgtagagaggcatggcttgatgtgcctggggggcagtgagaaggtcgggttccctggggcagagrgctcccaggctggtctggatagagcataagggagctggcagaacacagaaaacatgggggccaagcacaggggtgagaatcaagctggggggaaggcctgggmctcagcttgggtgggagatgggctcaggcctggagccagaggccaggccctgacagcctctctggggacagttccgtcggacagcactgcaccgagcttccctggaaggccacatggaaatcctggagaagcttctagataatggggccactgtggacttccaggatcgggtgagtgagagggcaggtattcaatgggagacaggaggtgggtccagcactgacagacaccctctccctgccacctgtgccaacctgaagcataaacaggttgctcaggtgccagactccacctcagtggcttatgtgaccttgagtaagccccttctcctccctaagcatcctctgtgagtctggcttggaccagatgggccctgagtgttcttctgttccacttggtccattgcccatgcccaggcctgctccctgtacctttcccctagatatccctctgccttcctggctggggtacattacccccgaatactttcttccctgcagctctgtagttagaccccctcatttctttctagctggactgcacagccatgcattgggcctgccgcgggggccacttagaggtggtgaaacttctgcaaagccatggagcagacaccaatgtgagggataaggtgaggcaaaaacrctcagaagcaacagatattggggtggctgtggggagaaaggcaggggtccaagggcaggaaagcctagggggcaggaaggtagtgagctagtctggtttctggctgcagagcagggaagctaaaacagtgtcctactgggcctcccagcccagggatgggtccctgccatccacacaggcccttgaggaaccaccatctgaggataggagcaggaagagcagacaagaagggaagacaagagactcactgtgttgggggctttgggaccactcaaaagatgcaagatttgttcatgttatctgtcattatccttctgtctacctatctattcatctatccgtctatccatccatccattcctccatttattcatcccctcattcatttatttatttatgcaccatccttctattcattcattatttcatgtacaaccttgaacaagtgacagcctctgagcttctgttgctcatctgtgaaatgtcttgcagagttcttgtgtagcttaggtgggaaaacatgtgtaaatgaattatttattcaacataaggcaaatgtcttgtaagcttttgccatgtccattacatagtcatctctcaataaatgacatmtattatgattattaaaagaagggtagaagagtgagcagctgggtgagaggagaatcacagaaggcttcccagaggaagtggcatttaaggctttagagttaggccattggataggatggtaagaaattgtaccattctctgcccctccaaggctcaggccttggcactaggacttggaagagggattaagctggagttaggacagcccccgccttcccaggggtaccacagttcaggccccgtcaactagcagttcctgattcctcccacccagctgctgagcaccccgctgcacgtggcagtccggacagggcaggtggagattgtggagcactttctatccctgggcctggaaatcaatgccagagacagggtgagtgctagcctgtccgctgctcacccgccatgggtgtgtgggcagcctgcgggcccctacaggtggtgtccttcctcctggggccttcaggacttggctcctgagcagggtctccagcccacctcccatcacccttgcctcctcccactgcccacaagggccatagtgagtgccacactgactctaggaaggggatactgccctgcatgacgctgtgaggctcaaccgctacaaaatcatcaaactgctgctcctgcatggggctgacatgatgaccaagaacctggtaagctcattccctccttgattcagtcactggcgtgagcactcatacagtggaggtgctgtcctggtccctggagcagcccccgcctagggacatgtatcatyggctctggccagcaccatagtacataaacttgtcctcttccagagcaccattccaactgtccgccccattctctatgtgtgtctatgtccagagtgcaagtgcagagagacagcaggaggggcagcaagaggacttcccaaagacccccaagtaggccagagggggtcctcaagtactggcccaaggaggccagaatcatgaaaggccagagctggaagggaccgagcactcagctggcatgacagttcctagcaccccatgtcagctcctgtggtctttgagttttcttaggatctaggcaggaagtccttggaaggggaaggtgcccagggaacaccttggactagggaacacttagtccaagttcttctttggggcccagagcattcacaaaaggaggccatgrgagagtccctcgggctcaagaaaggctaaagggataatgagaaaagcaggaaaatatggagaaggtataaatgaggggttttcaccctcagcattattgacatttagggcygggtgattgtttgttgtaggggaccatcctatgccttgtaggatatttaagcaacattcttggcctctgcccactagatgccagtagtacccatcccctagtgtgacaaccaaaagtatcttcacacaatgccagttgcccccatttgagaagcactggtggtgtcaatgagggtaccttctgtgaaagccttcaggacagttaacagattttctcttgccaacccccacgccccgtcccgccccctccaggcaggaaagaccccgacggacctggtgcagctctggcaggctgatacccggcacgccctggagcatcctgagccgggggctgagcataacgggctggaggggcctaatgatagtgggcgagagacccctcagcctgtgccagcccagtgaatgcgtgccccagcccagccagctacccagcccctctctgtgtgcagccggagggtcctaagaatggctcccggagctaactgagggcccagccttttttctgcatgatccaggagcacataccacaaactaccacaataaaaaagctgtttttgctaattgcgatgttcatttccacttgtgtctgaaatctttgggaatgaaggaagactgggggcaaatgctggtttggggaggagggaaactgggagccggttggccctctgagccagccctgcagcttctttactgtggtctcttttcctttcctccctgccactcaacttttcctgccccttctcacatctccagggccaggcttggcccctgcatggattgacttggtaatacactcatcctggcccccttcctggtgcctgctgtcctgtggggctgtgagtggctagcacaggcttgtcacgtggctgccttggcaggaggagcctggtaagggagcggggcaggggatggacagcctgtcacaggcagcttcttgcccagccttgccacacctcccacagggcaggacctgctcagccaatcagctccaccaacctcagaactgcccgtggaaacctggctgggcttctggcttcagagctgggaattgtgggaggagggcccagatcccactggagataccgaaggagatactctttagtattgggatcccagaaaccagtcctatatctggccagagggacactgggttgtggcatctctctagctgctacccagaaggaacagggccccctggggcctataggccttgcccctgaccctgggaacacccagctcaggcctgccccagtggccacaagtcagggaggccgcaaatttttaactagaaacattgatcattaatagggggttagaaagagttcaaactaagtctcactctgggacatagaccaattgtgcttcaggcctcctgcagagatgctgggtccccaagtctggtcttctgtgaggcaggggctaagcaggagcttgtccaggaatgtgggggtctgggcctcaggggaggggaagaaggtggacattgcgggtatctacccccctgtgaccacccccttcactgccactgcagaggtggactatgggaaactggaggagaatctgcacaaactgggcaccttccccttccgaggtaagtggggctgtcctctgtgggacctggggagatgtgagtggccctttagccagagaccaagggagggtacacaggctctgtcaagctgtccagggatagtctggtactcagtgggtcattttattatgggagaggaacaggggagactggtctggagtcaggagacaggcaggaagctccacgctggcctgtaaccttaagctaaacctcacctgcttcagtttacccagctgtaaactgttaaagtgcctttgtagctcccagagtgattctgaggttggactggataatgggcgtgaaagtccttgtcaaccttgtcacttggtgcagatgtgaaggcatgtggctggggtcacgtggcagcccagccacagtcccagttccctccaaagtttgtttgtacattctcttctggacaaagcctccttgccagaattagttctcctgtgaccccttggctcctgtgactcctgttgtggctcctgtgaccccatctctctttacacatgggtctccccaactctgaggttagggaccagatgatatttgcaacaatcaacatgtaacagagtcccaggcacaataaatgaaggtagaagaaaatgtcaaattctgcctgccctgctccgcccatccccattccttactgcacaatcccctgaggcagtgctctctgtaggaccatcccacagatgggaatctgggcctcagagtgacatggtcactgcccaaggtcattcggctaacacatagctgagctgaggtttgcacctcgtctgactgcatggcccatgctccattttactccctcgctgactctcattataaaccctttggagctgctaggccacactatttcaacggagtgtctggtcagcactagctttgttgtggctgctattgaggcagtatcgtgtagactgtggactctggtttcaaatcacagctctggagtgagcgcctgtaatcccaacactttgggaggccgaggcggagggatcatgaggtcaggagttcaagaccagcctggccaacatagtgaaaccccgtctctactaaaaatgcaaaaattagctgggcgtggtggtgtgtgcctgtaatcccagctactcgggagactgaggcaggagaatcgcttgaacccgggaggcagagattgcagtgagctgagatcataccattgcactctagcccgggcgacagagcaagactccatctcaaaaaaaaaaaaaaaaatcaaatcacatctctggcactgacttagtgtgggatgattgctgtccctatcggacacatgggagtgataatgctcatattatgggatggttggacaaaaaaatctgagagaatgcaagtgaaatcgtgctataaattgtggagtaatatacattggaaggtactgattccaatggtaataatgattaaaatgacagtgtgattggcattgcagcaaagctgctttgtgactgtgacccctggcctgatggacacgttgatcattcatagctcagtactgagggaatgtgccccttccttggggacaatgaatgccctgtggagggccacgttgagcagggcacaactgttaggtttctgctggtgcttggctcgtggggcctggaggtttggtgaggtcctggttctcttgaagtgagaagcattttgagcctctaagtgaagaccttacttcagcttcaaggttcaaggatgctctagttcagggtggggagggtggactttgcatctggtgtttgcctgacacccagagaatccacagagacccccagactcttctctggaccctcccttctgggccacccacccactcttgcagagggcatggggtgcccaggagcacaggcttccgtggatttagcaggctgtgggctgcacatacccacttgtctgtctccctcgcaacctatgcaggctccagctcccatctgatcactcacccacacaccagagagccagcggggtgtggtaggaagagcccagcatcttgagttagaggacctgggcaagaatcctgccacttctgccagttaacagagaccttggggaaaccacttaacctttcaaatccagtcctcgttttagaataggaactgagccttcaggcttctagccacagggtcaatataatcctcccaaggcactgtcacagaaaacacagagatagagggtcccttccctgcttccagggtgcagccaaaatgcccaggaaggaagacacaaacaactttagctctgaaatctgtgtttctcttgccctgtcctggcccctgaggtagactttgcagcccaacactcaggctgaggagggaacgtatcacattgtaagggcctcctgcagccagttaaaggtcctctgaagaggagatgagggccaggcacagtggcttactcctgtaatcccagcactttgggaggccaaggcaggaggatctcttgagaccaggagttggagaccagcctggccaacatagtgagaccctgtctctattaaaacaaataaataggaggtggaaagctgccctggatgaatcagtgaagagttagagattcttctggaaagcactccctgaaactgtgtagcttttttttttgagacagagtcttgctctgtcgctcaggctggagtgcagtggcatgatttgcctcactgaaacctccgcttcctgggttcaagcgattctcatgcctcagcctcctgagtagctgggattacaggtgcctgccaccacgcctggctaatttttgtatttttagtagagatggggtttcaccatgttggccaagctggtcttgaactcctgacctcacggtccgccggcctcggcctcccaaagtgctgggattacaggcgtgagccaccgcgctgggcctcttatttatttatttatttttaagatggggtctcagtctgccacccaggctggactgcagtggcacgatctcggctcactgcaacctctgcctcctgggactaaagcaatctgcccatctcagcctcccgagtagctgggaccaaaggtgcacaccactatacccggctaattttttgtatttttagtagagatgggattttgccgtgttgcccaggctgatctcgaattcctgagctcaagtgatctgcctgcctctgcctcccaaaatgctgggattacaggcatgagccaccatgcccggccccgtgtagctctttttaaaaaatctttttagcattgctaatttgtactgattatttgaatagagagtattctttttgttttttctttcttttttttttttttttgtgatggagtcttgctctgtctcccaggctgcagtgcagtggcacgatctcggcttactgcaagctctgccttccaggttcacgccattttcctgcctcagcctcctgagtagctgggactacaggctcccaccaccatgcacggctaattttttttttgtgtgtgtgtatttttagtagagatggggtttcaccgtgttagccaggatggtctcaatctcctgacctcgtgatcgtccgcctcggcctcccaaagtgttgggattacaggcgtgagccacagcgcccagccaagagtattctttttaaataaaaattatgaccagagactagaggaaggggtcattacagaagggctctatggccctgaactcacacccataaacaccctcaaagatggactttgaattgttatttccaaatgaggttagccaaccacagaactagtccagcaggactgggaagatgaggttctccataaaacacttgtgtcctattccttccatacatagagtggaccatgctttcttgcaaagatataatattttgtatatattaaaaccattactctgttaaagaaaatattttgtttaaagcatcacaatgtttacaaccccattttggcatttcttatttttttttaaatgggctagatgcttttgaggggaaaaaaaaatacagtggcccaggcctgtttataccctgagaggccttggagattaattaggcttttagttgtctgcacctatggaaagcctggccagccagcccacctgctcacaacccgaaccatgcctatttatgggggggcaaattctgggtttgtaggtgcctcactaaggcaagaggtagcagctaccatcccggagtggccccagggatctagacccgatgaagtctcctgtccactctgccttctcagcccactgcttgcctctccaccctcagcccattgtgacctcatgttagttactccagaatgagctccttcctgggttcttttccctctgaactctgccctgtagtgaggcgaggggctgcaaatgaggatggaatatgccaggctggcagcagacatgggcactggatggaggtgcactggtctcagatggctaggaatggataccagcccagtcaaggggatcattctgtcatggccagcctgacccagcatactttgccccctgggggccaccagatggggagagagagaaaccaaagactggaagatacaaaggcctaagttgtagaatggattccaagcagaaggcagaaggactcagaattggagaagcagccctttcactgagcctggggacagctgtcagggtaggagacaggacccaggcctcaggcaatgcctgccaggctagacatgagggatgctgcggcctctccccaccccactctccccaccccacccgcaactgccttcctcacaatggggttcattgttgaggtggtggggggcacctagggagggtgcagcagggggcctgcctgtcagacatccttggggagcctgccctttcaagcatgaatcataccaccagagatcacccagcgtgctcttagctctgcctgcctggtgtagggtcctggagaccttcttggagctcatccagcagccatcatgcaaggtggtgctggggactgccctcttgct

SEQ ID NO: 97826 - DNA, 32128 bp, Homo sapiens
tcctgagggtcgacaggaggcaacatgggagctgctcagcctgcccatcatggggtccttgggctgccccgagccacctcccgagggcccccctccagaggacactgctagctccactcacccagaatcttcctggtacagttcaaatatgtggcaggaggcgtagggggcttgttcaccattgtagacatccagtgccatttgcagggcaaccagggtagtgtcgtgctgcgggggagaggggctgcccgtcagcattgttccccacacccgcaggaaccgaacagagaagaaatccagctccttgcctgacacagcacgctagggagcgcaggcactcaccgcagagtaaaccagcagcttggggagctgggaggtggtcgccattagggtcaggttcttccttatctgagccagcaggactcctgaaggagaaaagtccccggtgttgctggctacagccacctctgccttctaattagacctatctgtgctcctttcaccctctgccaggcctgggcctcatcacctacacggagaactctttagtgtcatagggaccatgtaagaactctgtggcacccctcctctctaagaactgtcaaatgtacagaaggaagcaagacaaaacaagatatctgcctatatttcaacacggatgtagaaacctgcctgtgtttacagaagcacttcagtttgaaacaaatgtaaacttaagattgcttcagagtacacagcgggtgggtgcatgcccgggtaactaccatatgctctgaaaagtgagatgtcaaaaaggtgtgacagcaggcatgcccttaggtgctcaaataaggaagctggcatgtgtgttactctcagccttctcaaaatggcccccagtggttctcttggggcagctattcatttaggagagggagggtcttctgatgtgggcgaaacttaagaacatgaatggcagggctgggcgtggtggctcatgtgtgtaatcccagcactttggaaggctgaggcgggcagatcaccagaggtcaggagtttgagaccagcctggccaacatagtgaaaccccatctctactaaaaatataaaaattagttgggcgtggtggcaggcacttgtagtcccagctacttaggaggctgaggcgggagaatcgcttgaacctgggaggtggaggctgcaatgagccgagatcgtgccactctactatagcctgggtgacagagcaagactctgtctcaaaataaataggctgggtatggcggctcatgcctgtaatcccagcactttgggaggccaaggtgggtggatcacctgaggtcaggagttcaagaccagcttggccaacatggtgaaaccctgtttctactaaaaatacaaaaattagctgggcatggtggctgaggtcaggagtttgagtccagcctggcgaacatggtgaaaccccgttcctactaaaaatacaaaagttagccaggcatgatggcatgtgcctgcaatcccagctactcagaagactgaggcaggagaattgcttgaactcaggaggcagaggttgtagtgagccaagatcgagccattgcactccagcctgggtgacaagagggaaactccatccccccgaaaaaaaataacaatttttttaaaaagaatatgaatggcagaaaaggaagagaggtggggaaatttggtgactagcggcatgaggagggggatttggttttgaaagagcagggagtgtttcagtagagagggaagtgtgtgagaagcccccacagcagatttttaacgccttagggtcctgaggagtagagtgacacgctgtccttgtcactcacccccctgaagccgggccttctccgcctgctggtagattccgaagaggaagcggaagctgaagtcctttagccggctgagacgctgcatggtttggggtgaggcccagggcggcaggcgcagcccgtgcgtttgctgtgtatcgcagcaggcaggttagcgccccaggcctaggccagcctctccagggggcagctctcttccctagtgggaaggtgcctgtgtgtgtgagggagggagaggggagagaggcagaggggctggaaccagtagacatggcaggcggtgtggatgcttcagggcacaggaaaggaagctcaggcacaaaaagtgagactcagcagaaaggagctctgggtggagagcagcagggactgctgacaattaataaaccatttcccactctgaggatctctgtcacccatgagggaagttcccgtgtttcacaagcacagcctccctggacctccccaggggcgtgacggtatcaggcactgtgttctaccgtcctggtgacctgggcctgctgagagggaaaagaatgatcacagtgggcaccctagtgggctcacctcacagaagagtgtgtcatagacattccagacggtctccagtgtcaggtctgtaagccctgtctcgttggccaccatgtccagaaattgctatgaaaaatggatcagggtctcagtcctgctctggggaaaagacagcgtggtgagctgcacctctgcccccactcactgcattccgagaactctcattctgatactctggtgtctgccgggtctcgttctgcagctgctcataacggggacatgggcccaacgggaacttcagcagctgtagagcgaagcggggaaacaggcagcgggaaaaggagcctggcatcagcaggcctacggccagagctgtcccctcaccaccccagggaagggctggccactcttaccctgtcctcagtgatgggcacagtgtgcacaggaataggctgccacgagatgttcgggttgaagcgctgcatcccgttgggagggaagagtccagccaggttggcctcagcactcatgagagtccggtcaaagtctgtgcttcgcacataaacctgcagcgatagcaacacaagtcgtgtgtgtgtgtgtgtgtgtgtgtgtgttggggaagttttggtcaccctgaagtggagccttgtatgtatgtgtgtgtgtgtggtgggaagttttggtcaccccaaagtggagccccagaggagaacctgttcctgatggtcacccagcaaactaaacctaccatacatctggccctcaccctcctctggcctctggccttccccatcccccaaacactccactgggggttgtcaccactctgtgaagaactcttgtgggaatggccttagttgaaatgccccttccagtcaaaagtgctgagtcaatcagtaaggctctctggtctgtctggtttcataacaacacctctctccctgtctagatcagggtccttggggcagaaactggctccagtgacgacccttagagaccagggagaaaaaaataagataaagggctgggcctggtggctcacacctataatcctagcactttgggaggccaatgcaggaggatcgcttgaggccaggagctcgagaccagcctgggcaacatagtgagaccctgtctctacaaaaaaaaattttttaattacccaagtgtggcgggcacttgtagtcccagctacttgggatgctgaggcaggaggatcacttgagcccaggagtttgaggctgcagtgagctatgactgaggcatgtgctacagtttgggtgacagagtgagacccctttaaaatatatgtatatattttgggccgggcacggtggctcatgcctgtaatcccagcactttaggaggccgaggcaggcggatcagctgaggtcaggagttcaagaccagcctggccaacatgatgaaatcctgtctctactaaaaatacaaaaattagccaggcatggtggcacacacctgtaatcccagctacttgggaggctgagacaggagaatcgcttgaacctaggaggtggaggttgcagtgagccaagaccatgtcactgcactccagcctgagcaacacagcaagactctgtctcaaaaaaaaaaattttttttgaagagcttattcagagatagtggctcatgaaaagggaggaggaaactggggaaggacaagctcaggacagagctgggccttaagagaacaataacaatgtctatggattcttgatacggctgaggctgacagtggtaatcagaggaacagcttcccccattcctggggtggggcgaagactcaaggagcaggcacactcaccagtcctccctgatgtgccctaggaatatagcacgacctggcgcagcagacagggctcaaaaacctcatcttgatcaagaaaagacaagccctctctacgcatgtcttccccgctgtctttcatcttggccctgtctggtttatcattagatacccccacaacattctaagctccatgaagacagagatcatatctgtatggtgcacaactgaatgcaaagtgctagcacagtccttggcctttaataggtactcaatgtcttggatggaaagcctgtgatttcacagtcagaaaccactttgccaggcccgcccttaagtccgaatttggatgcttaatcaaatttgcctcatcccagccaagcaggggcaactcagctcctagggctttgttccagacagctctcagatgtcttttcctgtagttgtgaccaaaaatacaagaaggaggccaaagtgcccagcctcagccttaggctccctgagggcaaaagatgagggcagcataccttgttccccttgcctctggagctcccaaccttacctcttgccggtgataagaggtgtttaggaagccgtgatagcgctgccgcagggcctggcccagttcccagtgctgtagcatcccctcctgtgggcaaacccaagggttaagagggtctagagggaaggggtggcttcaagccccatggggtttaggccctgttgctttccaggttcacgctttgctggagtcaattaatctgatcccagaagtctttcattaagtggccagtcatgcacagcaatatcatgggcacagagattaaggttatgaaatctggtcaaagtcagcacccatatgggaaaaggcagtttagtaggaccccaagttttgtagactgctctagacgtcgctcattctgcagctcatcctgaggaaaggctggcttctgacccaccttggttaactgaccaaacccctggggccattcttcttcctgataggggtccttgggatatgtcttcactggtgaacggtctccatggcggtacagctgagagaataaaatggtttgcctataggtcagaagcatccccttgatagggacccagagcctaccttttgccccatgttagggaaggaagtctcattccctctgggaagcctactggctgcaaaagaccccagctaggagtcagtcacttcttccagattccagagattctaacttagctaagcaatgctactggagaccataggcaaagccaaggtacaggtaggaagggaaaagagaagtgaaagcaacgtatgtggtggggacaactggggaaaaaagataaccaaaggcttctttagggatgagtcttaaccattcaaccacttccctgtctcaaggcagactcaccccgacgtattcggtcatcctgactcccataagccagggctccaggtcaatcctgaatccagcctcccaactacccaggccagtcgtcccctcctaaaccagctgttccttcccgagatcctcgacctccaccagctggcctttgcccttttagcttcagggaagtctttggtgagcccatctctcattaccaaggtaacgaagcgcagactccgggcccgggtgggcggcatcaccaccaggttcacgccgagaaggagctggaggagagccgcccggctccagccggaccgcttgcccgccatcaccgttgtaatctatgcagcaaacaagctggaacccgctgggtggcacctgcaagcagccgcccggacgcacccgtaaggacacacgccggaagtgcgttcgccgccatcttacttagggacctgctggggtgcggggaaaaggcgcagtctcggtgggattgcgtgcaggagggtcgtggtctggctgtggcggaggagcataagaaggtaacgcgacctggcgcggcagacagggctcgaagacctcatcttgattaagaaggccacaaattcgcgtttgcctctgctcggagaaatcccttaccaaggtggcacttgcagtgggcgggaccatgtctggagaaccagcgtcccctccaggcttgaccccatagctagatcgggtgcagaattgaggcgagggatgggaaagtagaggtcgcttctctccaygcccctgcctttgtggggagattgagccctggccctgttctccaggagatgttttgcttggggtgcaggacacagtatgtaaacaaccctttggactccgtgtgtccttgaggttgccccagtctggcctaccgttcctgccctgcacaaagcttcagtagccctctcactttcccttccagtcctttccctgtcctccctcccctccacttccaagttttagttaattagagtcaagacgtcatgtcatgcctcttcccaaaggagttgggttgcacaggatgttcagactttacaaacccaaagcactgaatccctgggggaggaatttcagaccagtggggaggtattttgaggtaagggacaggcgcatatcataaagtgggagtaggtggggtttccacagaatcaatggccctcttggcattgaccattaggattcaggtgcagccagtttggcctcaggactttgtgactcctgtgacggttgcaggtcagatcataggtcctggggatgctttgattcagatctgcctactggaagcaaatctcctcagatctttgggaaacaaaactgatcaggcttggcctgggcgccgtggctcacctgtaataccagcactttgagaggccgaagcaggcagatcacctgaggtcaggagttcgagaccagcctggccaacgtggcgaaaccccgtctctactaaaaatacaaaaaaaaaaaaattagccgggtgcagtggcgtgctcctgtaatcccagctactctggaggctgaggcaggagaatcgcttgaactcggaaagcggaggttgcagtgagctgagatcacgccactgcactccagcctgcgcgacagagtgagactgtctcaaaacaacaacaacaaaaacctgattaggcttggtgtggtggctcacgtttctaatcccagcactttgggaggccagggtgggaagattgcttgagcccaggagttggagaccagcctgagcagcttaggaagatctcctctctacaaaaaaaagtttaaaaattagctgggtgtggtggcacacacctgtggtcctagctcctcgggaggctgaggtgggaggatcaccttcagcccaggaggttgaggctgcagtgagccatgatggtgcaactgcactccagtctagatgacagagcaagactgtgtctcaaaaagaagaaaagaaaaaaaaagatcaggattatctgtctttattttgtcctaggactccagattcaattatttatatatacttcaggatttaaactttgcttccagagttgtcatggaggaggccaagaagcaaatagagtaagagccaaagcctgggtagccaaacagttcttaaccttcttatttaatcacaagcccctttatgaatcacatgaaaattttgcacctctcctccagaaaaatgttcacacatataaacacacacatggaattttgcatataatcccaaatggttcacaaagaccatttattacaggtttcataaatcagcatctctgaatacctgatttaacctagtcctcttactttacagcttaggaracaaacctaaagagaggaagtgacttgcccaaattcacagtttgggcatgggcacagtttgagaatggattaaaagtcaagttttggccgggtgcgtgctcacgcctgtaatcccggcactttgggaggccgaggcgggtggatcacgaggtcaggagatcaagaccatcctggctaacatggtgaaaccccatctctactaaaaatacaaaaagttagccgggtgtggtggcrggtgccggtagtcccagctactcaggaggctgaggcaggagaatgtcgtgaacccagcaggcggagcttgcagtgagcggagatcgtgccactgcaccccagcctgggcgacagagcaagactccgtctcaaaaaaaaaaagtcaggttttgtgattttcagttaaatagtctataatgggctgcttcttgcaggctactcaaactgcattactaaactgtaattggtgatcccgaaatcctttcaataaagaggtatctgtcaaaggaaaccttttcaaattagttggactaaacgggacctaggccggacatggctcacacctgtaatcccagcactttgggaggaygaggcgggtggatcacctgaggtcagcagttcaagaccagcctggccaccatggtgaaaccccatctctactaaaaatacaaaaattagccagtcgtggtggcgtgtgcctgtaatcccagctaccggggaggctgagacaggagaatcacttgaacccasgatacagaggctgccgtgagccgagattgtgccacttcactccagcctgggcaacagagcgagactctgtctcaaaaaaaaaaataaaataaagagggcttgggtaattggcaaaatgctgcatattagtggtagtgggaggcagttgagtgttttgttttaatgggcctcttactccttgcaaactagccagaccattgtactttcagagtgtaaatctttggctcaccaaatttcagctatctctcaaattcagcttttgcttttcttcccacttgctcaaatatgtctatattctttgtgcatgcaagtatcccacgtaggagggattgatgaagcagatactatttcagtttttatagggagaaactattccaggaagggtggggattacagcgcaagtagatagtagagcctgaagctgagccctagtttcttcacccctttgccttcagcttttgcattttctgccagatgattctgtggttcttacactttggttcgtaactacaggtgcaaaaaaaaaaaagaaaaaaaaaaaacacatgtagatagatggatatgtgggcctatcccagatcaaataaatcagaatctctgaaggtgaggacaggaaccactaccatattctgtgttggcagaagcaaacctaaatccaggtatgttagccattttttttccatctgaagaggcagtttttgttttgttttgttgttgttgttgttgttgttgttgtttttgagatggagttttgctcttgttgcccaggctggagtgcaatggcgttatctcggctcacagcaacctccgcctcccgggttcaagcgattctcctgcctcagcctcccgagtagctgggattacaggcatgtgccaccacgcctggctaattttgtatttttagtagagacagcttctccatgttggtcaggctggtctcgaactcccgacctcaggtgatctgcccattttggcctcccaaagtgctgggattacaggtgtgagccaccgcacccacccggctgttttttttgtttgttttgttttgtttttgtgacagagtctcccactgtcgcccaggctggagtgcagtggcacagtctcggctcactgcaagcttcacctcccaggttcacgccattctcctgcctcagcctctcgagtagctgggactacaggcacctgccaccacacctggctaatttttttggctttttttttttgtatttttagtagagacagggtttcgccgtgttagcctgacctagtgatccacccactcggcctcccaaagtgctgggattacaggcatgagctactgcgcccggccccagccggcagttttatataatggagtgtatttgtgatttttgtttgtttgagcttgagctcaaacttttgaatcagctaaacttgtattctttttttttttttttttttgagacagtctccctctgtcacccaggctggagtgcagtggtgcaatcatggctcactgcagcctcgacctcctgggctccaacagtcctcctacctcagccccccaagtggctgggactacaggcagatgccaccacgcctggctaatttttgtgcgtgtgtgtgttttctgtaaaggtgaggtttcgccatgttgcctaggctagtctcaaactcctggactcaagcgatctgcccttcttggcctcccaaagtgctaggattacaagtgtgagccaccacacccagtcttatacctgtattcaaatttgatatttgccccttgctagtaactatctcctagagtttactgtgagaataaatgaaataatgcatgtaaagataaatgtatgtagtagggatgaaataaatgtcacatctttcctttctgccttctgtatcatctctgaactcaggtctgggaatccaggtttctggattattctctatgttgtgattggaaggttgggcagaagtcacttgagtagatacgcagtggtctgcaagatgatccctgcactttccacccttccagaacggtgaaggagggaacaagaagcagttctcctggtccatccctgcagaccttaccctgtggcctgcttcatgggaatgagtactttcagggcagttagccagtactacctgtgaccatggctggtgaatgctcctgtttctgcttcaagtttctccttgctgtgagaagaaacctgtggaggttctggggggccagatatgtgacttggtagatccccgagtgtgttcccagagacattgcctcctgcaggagccaaggaaacacagaagaggcccataggactgggggactttggacctaacaactgtgggctggtgggactgtggcacgggggtggggctgccaaagtgggaacatgattccagctgctgatcacttcactgcttgccctggcttgaagtaagtctcagtggttggtctccagaaactccatggaaatactgcccacaggttttggtcttctcccattttcctctccttttccctctttgtagggatgagggttggggtttctgagctgtaacctgataggacggctctggcagttgaagtcctggttataattcctcctaaacaggagaccctagcctgcccacccccactcccacaagatggggctcgtatgtggtcctgggtcctgggaagccacctgtggggagactaggtgtcaggggagggagttgaagaacaaagtggatgaaagaggcttctcccagctcccagaagatagggcaccaggccccagaccattgagtcctgagtttcttgaaaccagccatctctgtgacatctctggctgccctgctgggctggagcttctgggagcagggaggtagaggagggagctggactggtgatgtgggtgctgggacagaatagtgccagtctctcagtgactagagtccctggtttctgcttttccaggacagctggggccttgtgaaaatcagagagggaacacaggcgagaggaatggagagccttgtgcttgtgactcagagatacccagaccagggtgggggccttgggaggggacgaccttgtgatgagggggaacaaaagcaaaagctggaggcagaagtctgagatgggggtgtcacaggggcttttctgaaatgtgaaaatgaatacatgggcagattttgcaacagcacccagcctgctgtcttctcacactctgctccccagcccyggcctgttccccctctcccaccctgtgcttcctctcatctttcaccaggctsctcttctgcctcagccttcatctttttctcatctggttccttctgtcccatctacaccccctgtccactctttccctgtttcctgtgttctcttccctggtgccctgttcatctgtttcggtctctttggctgcttgccctggcccccgtccttctatgctttaatgtggggcccatgggaactggagttcatagcaaaacaggaagagccggtgagcaggaaactgggaatggggcagggggtgaatgaccagcagtaacctcagcagcttgcctcccacatctggactggagcatctgcagggttctcagcctctcccctgtrgcccaccagccctggctgcttccattacagcacttcactggcccaagacgcaacaagacaagattgtcctggactctgacacagcaaagggactggagtgaggacatctgggttctgatcccagcccagccactaactgtgtggtcttggaaaaggccctcacatgagtttcagtgttctctgtcaaatggagctcgggttacttaccctcctttcctcccagcgctgctctaaggaccagaaaagatagtgaagggtttgtgctgtgtatggaaacaagtacaaagttcaaaatccaccaagttaaagcaatgggaagacctacagctgaaagaactgggagggtgatgataactcgtgccatttctcaaacactatgtgccacacgttgtgatagactctctttctttctttytytttctttctttctttctttctttctttctttctttctttctttctttytctctctctctctctctctytctttctttctttctttctttctttctttctctttctctctctctctctctttctttcttctttttttttggagttttgctgttgttgcccgggctggagggcaatggcgcgatctcgggtcattgcaacttctgcctgccaggttcaagtgattctcctgcctcagcctcctgagtagctgggattacaggaatgcatcatcacacccggctaattttttgtatttttagtagtgatggggtttcaccatgttggccaggctggtctggaactcctgacctcaagtgatccatctgccttggcctcccaaactgctgggattacaggcatgagccaccgcaccctgcatgatctgtagtttcaatcccacaacaaccttgtgtggtaaaaattactattatccctattttatttatctttctttctttttcttttttttattttgagatggagtctcagtctgtcacccaggctggagtgtggtggcacaatctcggctcactgcaacctcccagattcaagtgattctcctccctcagcctcccgagtagctgggattacagacccgcatcactatgcctggctaacttttgtatttttagtagagacggggtttcaccatgttggccaggctggtctcgaactcctgacctcaagtgatccacccgcctaggcctcccaaagtgctgggattacaggcgtgagccaccgtgcccgttctatttatttttcaacacaccattgctggctcaactattcttattttaaagatagggaaacaaagattcagagacgttaagtaacttgctcaatcaagatcacataggtaataagaggtttaggatttgaacccaaaatctgagcccagagtctgaacgctaaatcaacatgctgagttgaaattgactacagcagttgtgatggcgtgtgcctgtaatcctagcactttggaaggctgaggtgggaggatggcttgagcccaggagtgtgaagccagcctgggcaacatagtgagaccctaccccaaaaaaggtaaaaaaaaaaaaaaaaaggaataataaaaaaaattgactagggctaataagtacgggatagacgagaataatatttcttttttttttttttttggggacagagtctcgctctgtcactcaggcaggagtgcagtggcgcaatctcggctcactgcaagctctgcctcccgggttcacgccattcttctgtctcagcctcccgagtagctggaactacaggcgcctgccaccatgcccggctaattttttgtatttttaggagagacggggtttcaccgtgttagccaggatggtctygatctcctgacctcgtgatccgcctgcctcggcctcccaaagtgctgggattacaggcgtgagccaccgcgcccggccgagaatatattatatttttcttgttattcattcaacaaataggaacacagtacctactctgttgccacatctatgccagccctgtttcaggggtgttgggggagatgaaatcaataaaatatgatgtctactttcagggatggatttcatgccccaggcagcagagtaggaagaatgactatagtctcagtagctgctggttggagcctgccatcacttcagatggggttgttccccagaagaggcaacccgcataccttcccaggtccatcctgggctgccacctgagttgcctgtcttccttctgccacctccacccctatcccaggcctgccaytgctcatagcagatttcctaycaaaggctctcctggcctcctctcttatctgtggcccccgcagggcacccactttcagaaactccctggaaggcccagcacctgcctctctccacccctggatttctaccagcttggctgaggcctggggctagtggggagagcttcttggcctcttyccagaggcaagggaggaggagggaggctgggaaagccgctggggctcagtgtcgcaattccgggccgtgctgggacctttgctccacgaggtgcctatggaggggagggaacacgattctggaggctgctgggattggggtgggggttcctgggaggcagtccttttgcaagagctgctaagagcgctgggtaaggagaggaaggggagagacatggaacttggctggtctgcagggaaatgccactgttttggccgggagtagggggcgggagtggcgggagagggggtggccggctggggaggagccagcctggtggagaagctgccctgtgggcgggggtgaggaggggagggctgtggtcaccaggcaggaaggaggggtggcctgacccctcggcagtccctcccctcagcctttccccaaattgctacttctctggggctccaggtcctgcttgtgctcagctccagctcactggctggccaccgagacttctggacaggaaactgcaccatcctcttctcccagcaagggggctccagagactgcccacccaggaagtctggtggcctggggatttggtgggtctgctccttagcagtggcctggggctctgtgtgtgtatctggggtggggtcggggaatgtcctaaggatctgagaagggggtttctggggagaagtgaggggtgatggtgatggaagcttgggacaggagcaggactctgggtcccagaataactcatgaggggctcaggggaggaggtcctctatgtgaattggggagattcttggagacaggtttgtgctgggaccctggaaagtggcacgagcgaggttctctaataagcagcgtgtttcactgggtggagtgagctgtcctcagtgttggagtgagggggaaggggcccragagaagcagggcagatgcacccaaacattccctgctggcctggaggggactttgggggagaaaagccggcacggtggctgggagcccagactttggagtcagaggagggttggagtcttgactctaccgccgcctaactgtgtgaccatagttacttaatctctttgaacctcagtttgcttatctgtaaaatgagtttaagaatagtcctgagccaggagcagtagcgtgcgcccataatctcagatactcaggaagctgaaacctgattgcttcagcccagtagtttgaggcgatagtgtcctattattgcacctgtgaatagcactgagttccagcctgggcaacatagagagaccccatctcaaaaaaaaaattaatagttttgacctcagagggatattatgaggaaagcacataaagccttataacaggctgggcgcagtggcttactccaataatccccacactttgggaggcccaggtgagaggatcacttgagcccaggaattcctagactagcctgggcaaaatagggagaacctgtctctaaaaaacataatagtaatataataaagccttagtacaggctaatatatggcaagtaaatgttagctgatattgttgatattgataaaagggaggatcaggtggagaagggagctgaggccagaaaggagcccagttctagaagagtataatctgggtccttcctgcaggacagtgccttggtaatgaccagggctccagraagagatgtccttgtggctgggggcccctgtgcctgacattcctcctggtaagcttcattccatccctctcccctgagcccagaccgcaggctccacgcctcctgtaggaatcagcctccttcattacctgccttcttccttcctccagagagcagtccagagtcattcttagtcgtgcttgcctcccgcccagatcacctctcccctggttccagtgcctggcccttgcaggcacccgcccagtcctccccagtctggatttgctgctagagagttggccagctgagtgcttaccctgctctggctttgaagagttttatctgatctctgaaatgcatacactccagccccccaaagggacaaggattaacatcttcatttaaggtcctgagatgtaagaaactacaagtgactagtcctagctagagcccacacagactctagggtcccaaagcctgagctgggactttgctgccctctaagggtggggataagtttgcagtttcccagctaggacgctgggccgtggagccgggatggggcctgagacccccttgtgcctctcttttggagctcagactctgcggtggagctgtggaagccaggcgcacaggatgcaagcagccaggcccagggaggcagcagctgcatcctcagagaggaagccaggatgccccactctgctgggggtactgcaggggtggggctggaggctgcagagcccacagccctgctcaccagggcagagcccccttcagaacccacaggtgaggagcttctgggtttggaggaggtaggggtccagattccaggtcctggatctggaagaggttccttgggggtttttactttatatataatctcatggttaagttcagaggctttagagctaactaaatctgactgatctaagtgtgaattttgtctctaggcctttctgagcctcactttccttgtttataaaatggaaataaaaattatggttgtcataaggatcagtgcatataaaaggctcayacagtacctagaacataatggcacttggcaaatgagggctactcttctcataaaagagagactggagtttgtataatgaagggaatgaaggtcactgagtgcccagggcagtggctgagtcagggagaacatgatgtttttcctcgggggagagcgttgaagcactttcctgtatccagagatccgtccacaaaagcggaaaaaggggccagcccccaaaatgctggggaacgagctatgcagygtgtgtggggacaaggcctcgggcttccactacaatgttctgagctgcgagggctgcaagggattcttccgccgcagcgtcatcaagggagcgcactacatctgccacagtggcggccactgccccatggacacctacatgcgtcgcaagtgccaggagtgtcggcttcgcaaatgccgtcaggctggcatgcgggaggagtgtgagtttctggggctggagtggggaagaggctgaggggaaagagggggccagggtgtgacccaaaacaggtgcctgaacttgcaggggctaactgatccctaagtatggatcccagtatctttcttgaccgggcgcggtggctcatgcctgtaatcccagcactttgggaggccgaagcgggtggatcacctgagatcagaagtccgagaccagcctggccaacatagtgaaaccccgactctactaaaaatacaaaaattagccgggtgtggtggtgagcgcctgtaatcccagctactcaagagactgaggcaggagaatcacttgaacacgggaggtggaggttgcagtgtgccaagatcatgccactgcactccagcctgagcaagtgtgagactctgtttcaaaaaaaaaaaatcttcttgcctttacccagtgctgtctgcttttctggagccccaaaccaccccctttgccccatccttccctcctgtctttcccccacccccttgccccatcctttccccatctgctcccttcctcatatttggccctgtccttaggtgtcctgtcagaagaacagatccgcctgaagaaactgaagcggcaagaggaggaacaggctcatgccacatccttgccccccagggcttcctcacccccccaaatcctgccccagctcagcccggaacaactgggcatgatcgagaagctcgtcgctgcccagcaacagtgtaaccggcgctccttttctgaccggcttcgagtcacggtacttgacacacctggggagaggcrgctgcgcccagatcaccagtgggcttcttgatgtccgactcaaagcgctttgccttttccctcctgggtagccttggcccatggcaccagatccccatagccgggaggcccgtcagcagcgctttgcccacttcactgagctggccatcgtctctgtgcaggagatagttgactttgctaaacagctacccggcttcctgcagctcagccgggaggaccagattgccctgctgaagacctctgcgatcgaggtggctggagaagggcaagggatgaagggagaagcagagtgggattatctgtgggaggggcctccagacatcgagctgggagagccaaatctgctgggaagcagggatgaggagaatcggcctccctggaagaggccrtgctccaagaccagccctcctagtccccgtttgaggtttgctgcttgtgtgcaggtgatgcttctggagacatctcggaggtacaaccctgggagtgagagtatcaccttcctcaaggatttcagttataaccgggaagactttgccaaagcaggtgagaactgagatcacacagggattggggttgggtggacagatgcttctttttttattttttatttttaaaaattgagggccaggcgcggtggctcatgcctgtaatcccagcactttgggaggccgaggtgggcagatcaccaggtcagtagatcaagaccattctggctaacacggtgaaaccctgtctctactgaaaatacaaaaaattagtcaggcatggtggcacgcgcctgtagccccagctacttgggagatcgaggcaggagaatcacttgaatctgggaggcagaggttgtagtgagccaagatcgcaccactgcactccagcctgggcaacaacaacaacaacaacaaaaattgagatagagtcttactatgttgcccaggttggtcccaaactcctggcctcaagtgatcctcctgcctctgactcccaaagtgctgggattacaggcgtgagccacccaccatgcccggccaagtactttttttttgtttcatttttttttttagacagagtttgctctgtcacccaagcaggagtgcagtggcgtgatcttggctcactacaacctccgcctcccgggttcaagcaattctcctgcttcagcttctcaagtagctgggattaggtgcaccaccatgcccagctaatttttgtacttttagtagagacagggttttaccatgttgaccaggctggtcttgaactcctgaccttaagtgatccatgtgcctcagcctcccaaaatgctgggattacaggcatgagccactgaacctggccaggactggtgctttttgtcagaggcccatagtgactacagagccacaggcccaatgtttgggtggctggtaagggaaggctcccttgttttttgaagatagaaaattggaatgctgataggcttctctcagctgctccagatagacccctgtcctctgttgctttaggtcagtggttttcaaactgtattccaaggaacctgagagatatatggaatggcaccttggaggagaaacagggaggcacaggaatgtccttcatctttactttagccaaacaagaagctccatttaaatctgcattatatattgcactgctacatagtattttgcttgcagattttacagcttgaaaaaaaagtttgaaactcagtgcactcaactttttagtagtcaaaaagtgaacaaatcttcctcacatgtgctctttggggatcatgggggctgatttcccctacttttttttttttttttgagataagttcttgctctgtcacgcaggctgaagtgcagtggcatgaacgtggctcactgcagcctcaaccacctgggctccagtaatcctcctgcctcagcccccaagtaggtgggactacaggcatgcaccaccatgccaggctaatttttatatttttttgtagagagtgggtttcgccatgttgcccaggctggtctcaaaatggtctcgaactcctgagctcaagtgatccacccacctcggcctcccaatgtgctgggattacaggcatgagccaccacacacagcctcccctactctttttctttttttttcttttctttttttttttttttgagatggattctcactctgttgccaggctggagtgcagtgacgcgatcttggctcactgcaacttctgcctcccggattcaaacgattcccctgcctcagcctcctgagtagctgggactacaggcgcgcgccactacgctcagctaacttttgtatttttagtagagatggggtttcactgttttgcccaggctggtcttgaactcctgagctcaggcaatccgcccgccttggcctcccaaagtcctgggattacagccatgagccacttgtccaggcccctcccctactctttttcaattgcactttctgacgaaccagaaccatggcatggcaaacatgcccagagaggatgtacaataagagcgaatgcttccatctccatcctatatctgaagtattttctccaaaaattagttcattctgcggctctctatctgatgctcgcttgggagctacgcagaaggggtttcttcatattcaactattgataatgtttgtatcatgagaactggcctgggaaaggacgggaggctgagggagttttggagggactggaattgagcttcagcaggaaaccaagtagcttaacgactggatgagtggggctgtaaaatatggctgatgccctgactccactctcagggctggtagatctgtggccaggccagtcatcaagccttccttggtttctgataactcaggccagctcacgtgcctcttgctctcccaacgcagtccacccagtgagctttctaggaaggccactcttcgctgtagggcataacagggctatgttggcaccttttgccttctatagtaaccggtgtgctgcctggatgtattgacacctaatggggtgatttaatgactttatccagctttaaagcccagccctgctcccctcttccaaaccactttttcctcgatggttattatctcagaccttcttaaccgtggctctcccctccttcagaatatcctccttgtggaaccctgcccagttctaagatctttgtattcctttggcacttgtagactcatgctatctgaatctgcacctattcatagatttatttatacaagcagttttgaagtaatcatgcttgcatttctyatttcatgagtgaggtcttggggagaaggaacaggagctctgcttgtcaagtctcctcccctccctatccgctactatttactgcatgcagtagataactggtgacatggactgagcacatttraggtgttcattccgtgggcatcagcagaccctcagaggtgcattagctaactatagaacctcctcttaatttctctataaagggggctgtttgccacactttggggctcaaaacctcaccaagaaatgctttagaaaatggggcttgccgccgggcgtggtggcttacacctgaaatcccagcactttgggaggccgaggcaggcggatcacctgaggtcaggagttcgagaccagcctggcccatatggcraaaccccatctctactgaaaatacaaaaattagctgggcgtggtggtgcacacctgtggtcccagctactcaggaggctgaggcaggagaattgcttgaaccagaaggctgaggttgcagtgagctgagatcgcgccactgcactccagcctgggtgacagagcaagactccatctcaaaaaaagaaaaaagaaaaagaaaatggggcctgcccattaaatggaccaacacacaacacttgataaacatcagggtgaaagtacaggaagtgactcaccaagaagccttgaatggaaaagtgtagcagatggttgctaaaagaaatctgamaaagcctggggaactctgtagggtgcagagactttgacaatgtgtatgagagacattctctaggtatcattactttagctcatgttttgttgcattttagtcttctcagcaggaagactgtttccaagaaaaatgtattatttattgaccaggcgcggtggctcatgcctgtaatcccagtactttgggaggccgaggcaggcagatcaygaggtcaagagatcgagaccatcctggccaacatggtgaaatcctgtctctactaaaaatacaaaaattagctgggcgtggtgacatgcaccagtagtcccagctactcaagaggctgaggcaggagaattgcttgaacctgggaggcagagcttgcagtgagccgagatcatgcaactgcactctagtctggcaacagagcaagactctttgtctcaaaaaaaatttttttatttattttacaaacacttatgtggtagttaccatatatgccacatatttatgagataggtactattattattcccattttacagatgggaaaaccaaagcccagagaggttaaataacttacacaaggtcacactgccttgtaagtggtagaggcaggactcaacccgaggcagtctggcaccaaaatccacatcctcacccatactgcaatattccctcgaggatgtgatacatgaaatgtatctctagtgttcaaataagtaaggccaatgccagtgaaaaacaagtcttttttttttctttgaaacagggtctcgctctgtcgcccaggctgaatgcagtggtgtgatcaatcatggctcaatgcagcctcgaccttctgggctcaagtgatcctccttgagtagctgggactacaggtgtgaaccaccgtgccctgctgaaaaaggattttttttttttttgagccagaatcttgctctgtcgcccaggctggagtgcaagtagaacaatctcggctcactgcaacctccacctcccaggttcaagcaattcgcctgctcagcctcccgagtagctgggactacaggtgcgccaccatgcccagttaatttttgtatttttagtagagaccgggtttcactgtgttgcccaggctggtctcaaactcttgagctcaggcaatccgtctgcctcggcctcctaaagtgctgggattatagggataagccaccgcatccagccttttttctttttctttttttttttttgagatggagtttcgctctgtcatccaggctggagtgcagtggcgtgatctcggcttactgcaacctccgcctcccagattcaagcaattctcctgcctcagcctcctaagtagctggaattacaggagtgcaccaccacgcccagctaatttttgtattttcagtgagacagggttttgccatgtcggccaggctggtctcaaactcctgaactcaggtgatccccctgcctcggcctcccaaaatactgggattacaggcatgaaccgccgtgccttgctgaaaaacgattcttgataaacaaaaataagagttgcctctatttctagaaatgtggagccctcaagaattttaatgacagaattggcaggtgatggtgtctggtgcctgtaatcccagcactttgggagggcgaggcgggtggattgcttgagtccaggagttcgagaccagcctgggcaacatggtgaaatcctgtcacaactgaaaatataagaattagctacttgtgatggtatgcacctgtagtcccagctactagggaggctgaagtaggaggatggcttgcacccgggaggtcgaggctgcagtgagctgtgattgtgccactgcactccagtctgggtgatagaacaagaccctgtctcaaagaaaaaaaacaagaataccagaattattatttaattcagcacctcttgtgtgccagacacagcgctaagtgccctgcatactttgtcattgaactataccaacaattttctgagaagggttcagatatgattcccatttcacagatgaggcttatagaggggttaagacatttgctcaaggttacacagcaaagccttgtagaccttttttttttttttgacggaatctcgctctatcgcccaggctggagtgcagtagtgcaatcttgggtcactgcaacctctgcctcccgtgttcaagcaattctcctgcctcagcctcccaagtagctgggattacaggcacctgccaccacgcccggctagtttttgtgtttttagtacagacggggtttcgccatgttggccaggctcttctcgaactcctgacttcaggtgatccgcccgcctcagcctccgaaagtgctgggattacaggcgtgagccactgtgcccggcctcagtaaacttcttagtgagttcctaatagttccctaaggtgaggagagaagaaagttcctgctgctcctgctgcttgcgtcagcctcccttcttcctccccagggctgcaagtggaattcatcaaccccatcttcgagttctccagggccatgaatgagctgcaactcaatgatgccgagtttgccttgctcattgctatcagcatcttctctgcaggtgtggaggaggggcaatgggaaacagcaagagacttacaccaaggagggctgcaggtcccacaggaatcggtggggggaggggggtggtggcttgggarggtggaggcatttgctgtgttattttaggatgagagagcttggctggagcatgtctctatattttggttgcaatttggggtatggaactggaccctggccagacctgctcctcaactctcttggtgacctatagaccggcccaacgtgcaggaccagctccaggtagagaggctgcagcacacatatgtggaagccctgcatgcctacgtctccatccaccatccccatgtgagtctccccatggtgttccttttcctccttcccacacacaggcccattccctgacatacctactttcccttcaagaatttctctctgactgcatgctgtgcagacaattcacctctcccacaactcccctactcttgccccgcttccctggggacaggcaaaagctgtgtttgtctctctcctttccccaggaccgactgatgttcccacggatgctaatgaaactggtgagcctccrgaccctgagcagcgtccactcagagcaagtgtttgcactgcgtctgcaggacaaaaagctcccmccgctgctctctgagatctgggatgtgcacgaatgactgttctgtccccatattttytgttttyttggccggatggctgaggcctggtggctgcctcctaraagtggaacagactgagaagggcaaacattcctgggagctgggcaaggrgatcctcccgtggcattaaaagagagtcaaagggttgcgagttttgtggctactgagcagtggagccctcgctaacactgtgcygtgtctgaagatcatgctgaccccacaaacggatgggcctgggggccactttgcacagggttctccagagccctgcccatcctgcctccaccacttcctgtttttcccacagggccccaagaaaaattctccactgtcactctgtggtatggccataaatgcctcagcgccgcctcactgataggtctggtactgtttgaacaggaagatcaaaatgaatacaaaatgagagaaaccaatttctggattgggggtggggacacggtaatagaggaggaagcctgcgatctttaggatccgcctccaggcccagaggagggagagtcacaaatgacagccttggccgtgagagggggcctcttcttactaacccccactgcgccatatgggtaaatggaatgctgaggcttaggcgcccccttcccctgctgggatccgggtaggatccggttgcctttctgcggtggaggaggaagtgttggatttcagcgctaaggcgtcggcggtgcacctcacgtgcatgtgtagcatgccttggtttttcctttggcatctgaaaaaggcacaacctgaaagacctagaacccagtgtcggtccccaggccctttgggacaggaagagaagagccgtgtggccgcggggaggatgtcctgcggcggggctgtcctcgcggactgactggactccatctcccagcgggcgccgcggcgcggccacgcccccccactccccgcgcgcgcccggtggaggtaaccgcggccgcgcgcccccctctgcccccgctgcccaggattggtaggctccaccgctcggcagccggcttccctgctcggacgccgagcaccgccaaagcgcgtgagtggggggtggggactgggggatggggagcccgtcaggaagtctcaggggccgattatcttgggaagtgactttcagaggaatccccatgtcgtcgaaacgggcgctatgaccccgtcgggtgagagtctctctgagcaacccaaacagaaggtactgctgtgggtcccccacttggcacgcgacggcgctgggtcggcctggcgcgccctcccgcgcccacgggcgctaggctaggtctgtgcgcagccgctgtctcccgaggtcggccccgccccgcggcgctcggctcggtgcagccccggccccccgggctgaatggtacggccccggccccggcctccccctccgcaccccgcgcgagtggtgcgtgccccccagtgcagacgcggaactggcgcccgctcggagcggcgccgcgctggggagcgactgacgccccgctgccgggggacgtcgggctgggcctggccagtcccccagagcttgggaggtaggagagtctgggccggtggggtcctgggcgagcgtctggggactccgagcgggagacgggctctgagaggacaccgtggctcttggaggaaggggtctctcaggaggccctgggggagtgtgaaggggcgtggggacgggggtctgccgaggaggggcggggacggggatgggggcgccccgggcagaggagggggctcaggctactgggcttggttcctgccgagcgggcggctcgggttcaggttcggggcgggggcgggggcgggggagaactgtccagcaggtgagggggcgggcagagctggccagccctggggccgaacccgcacagcgcttggcgggtgtgcttgtgcgtgtgcgtgcttgcgccttatttttggctagaatttggagaaacacgtttggttctcaagaaattttttttttaacttgatatttcaaaattgacttgctggagagagaacaccatttcatctttctgcaatcgctctcctccccatcctcgtgtatctaccttcttccacctttccctgccctcccctctaccccaaccctgccagctgccagcctccttgctccagttctcccatacgctggaccagtctgtgctgatgagcttgcaaggtcactgcctggggaggtagaggaggggaggagagcctcctgttgtgttcacgtcagcagagatgtcatatcgctctctggttcctgtggttttactgtgagatcctgtccaaaatgagggacgaatccaaagggttggttagcatggctatttctgctgaaaaggcatagataacttaaaagtttgtgaatcctaaatctacctctgggtggagctgatggtgatgtcggacttcagcagatagatatgcattttgagctggatgcttttggaatacaggaagataggaaccagaggctctacgttagtaaacatggttgaggcaagaggcagagtcggagcctcgttggttgtgaagacaagagtgtgagttgtgggtgatgttagaggatttagtctttagaggagttaaaggtgttagtctttttggggaggggagagaggagagaatgagaaggaaaatcttagttatctttgcaatctgaataactgaaggcagtggctgctgatcagatgtgaactctggctaaaaatttatcctaccacccgtagctagaataataacaagatctcagggtccttgtggctctggaaggaaatgattgtgagtgacttgagtttcgtcagatagttgtcagtggagagggactgagatcccaccaaggctagagaggcctgatgcgtactcagtaggaggtgcttcaggcctgatctttgagattttggttggagagggctccgggttttcaatgtaaacatagattgcaaggtgtagtctagagctctggttctataaattctgttttactttaagatactttggctctcactctagtcatttctacataattcttttttttttttcgaatcccatgacaggttaactacataattctttattaaaacaaattatgctttttactcatatcccatttcatttctctatttctctcccccttggattctgctcaggaggagctgagtgcggctctgttatagtgccccacctcctgcagtttgctcatgactctattgcagttgggagaaccaagggactatttgggttcgttaagcagtggtgatacctagaaatgaatatatggcgtgctcagaaacctggtggtgttctagagatatcactatcaaaagccagaattaggacgaagtacaaactacagacagatgagggagaagacaacctaattcttagcaggtactgtcagtgggagaagtgtctctaggttcgaggagagtgaattgttatgggccttggctgactctggagtagcagctgctagcactgtgcggtcaccaagcaggggaggggctgtggctctgctataaatagtgctgggagccagagtcgctatagagataaaactgaatcctattacctgcaggtcctctactgggagcaagggaaaggagaaagcagtattttgaggatttgagaggtattgcaaataggtcttgtttattgttaggtaggggagaaaaaacttctactcattacctaaaccaaatagggccttaagcatccagggagtgtgtatgtctgtatatatgggagtgcccgcagcagcaggtgagggagtagagggtgtgtgtgtgtatacgataatgggtttctctccgtgtgcattgaacaaggtcttaggccgcatgtagagcacagaggtagaatcctggaacactagaaatatgagaaaagaacttctactcatagaagaagtagccctaccagaaatagctgtgcagcggggtgaaacgttttatttagagaagtgtatagacacttaacacgaaataaattataattaagaccatgaaagcttttcctaattttaggacatagtttagaaatttctctgagcacctctccctgtccttgcagaaatcctggtatttctgcctctaattcatagcctctgtaatgtatagtaggacaaggactcatctgtgggtattgtattactgattctgagcctgagatcaaaatagaggagagattatgattcagcaccaagggcagagctagtagcagtggcctctgggctcctttcttgcctgaaggagggagaaaagtggtgcagattaggcaattggggcatggacattttcatttgagatcacatgaggtagaatagccagctgttattgtctgagcatggttaactagacagtctatgtggtagttttacatcaagctgaatgtagattgttgaaacagaataattaagtttccatctagacctagaagtgcaggttagtgctagctagttgaggagtctggtttgatcctgatccaccctggagggatcctgagagtgacttcaatttttgttacaatgactgagtccagattagatggcctaggtctgtttttcagaaacagagccccaggcgttaagctggaaattaagtcattggtagggataggtaggtgaaccattatttatctacattttttttttttcttgagacggagtctcactctgtcacccaggctcgagtgcagtggtgcgatctcagctcaccacagcctccacctcctgggttcaagcgattctcatgcctcagactcccgagtagctgggattacagatgtgtgccaccacacccggctaatttttttgtatttttagtagagatggggttttgccatgttggccagctggtctcaaactcctgacctcaggtgatccgcctcggcctcccagagttctgggattacaggcgtgagccaccatgcctggcctattttttaacattcgattctgtgagctcatgagcctagacacgaggctaggcaagcgtcaagttctcctatcattagtatgaaagtggaagaccttctgacctctgcctctggccgggaagaagttgagagggatgagtcccttaggcacagcagtggatcttatcagtactttttttcctattagacttcgattttcagaattcctcctgggaatgctgactccttgcttggtgccctgatgcttctctgagataaactgatgaattggaaccatggtgcaaaagaagaagttctgtcctcggttacttgactatctagtgatcgtaggggccaggtaaccaagaagagattgacttttgtcttaatatctgggatagccataaaatctgcagttgttcccttctccgatttccatgttgctttgcatagctcatcttctcctgttattttaccctgatgggagcatcgaagccagtagggaaaaaacaaaatcaggtggattgaaagcaaaaccctgctcttaactaacatcttcttgatgtcgagcaaatatactctttatacctcagttttcttattttgtaaaaagaaaaagtacattataagctactcctctatgtatacttttttggtaatttattagttaattcactttaaaagatgttaatcatcttaaggtgccagtgataattttattgtcaaaatctccccttcgtttcagaatagatgccttcatgacagtgtagacttcacttaggttaccagctccatgcggcaggcagcacccatattttccaaggtgttacagtcaggttactttatccaaaatagcatcttgagctttatttgttgactgtggttaaaatttgatagcccattccatcccttcaggctgctgaatttgtctttatgttcttcaggcacccgagcagtgatagcgtggcccagactcctgaattgctacggcgataccccttggaggatcacactgagtttcccctgcccccagatgtagtgttcttctgccagcccgagggctgcctgagcgtgcggcagcggcgcatgagccttcgggatgatacctcttttgtcttcaccctcactgacaaggacactggagtcacgcgatatggcatctgtgttaacttctaccgctccttccaaaagcgaatctctaaggagaagggggaaggtggggcagggtcccgtgggaaggaaggaacccatgccacctgtgcctcagaagagggtggcactgagagctcagagagtggctcatccctgcagcctctcagtgctgactctacccctgatgtgaaccagtctcctcggggcaaacgccgggccaaggcggggagccgctcccgcaacagtactctcacgtccctgtgcgtgc

SEQ ID NO: 97827 - DNA, 15378 bp, Homo sapiens
ccaagggaacatgaggggatggcctgaggaggagtggggagtaggcggaaggccccttggagggagctggggcaggcccgtccttcactttgccgtctctttctgttgggcttctcccagttcatggtttttgtatgttttgtttctttatcttgcttcctgctgctcatgtgcccccacgctgtctccctgcaggctctcagtcccacataactatatgaggttgagttgctgtttgtataattttttcttaagttccatctttattatattttagggcccagggatcatcctgatattgttgattcatttatgcaactcctggcacaggtgtgttttagttttattcattcacgttctgttctctctctttctctttctcttatgttgaaattcaatttaagcctatttttagctttctgttgacaaattttttttctgttcagttgaatagagtttcttcatctgtttccgtggaagttgacaacccaacatcctcctttagtgcccctatgcctcactagctcagtcttctacaaagaccagggagaggctgatcccaaacggagggagctgggctggcatcgggtggggaatgggaaagggagggggtggtgactgcgcccagcagcttcttgttgcccaagaagttcacgtgtagggctggagttgaagggtctggggtacactgtccccgtgctcctgccgggaactgcctgcctcagtgcccccagcctgctcctgagaggtaggctgggagcagctccaaagcgaggggctgaagaggaatgtgcgcggtggagcccagagttgggctgttggagaggttgagctgctgctaggaggtggagtgcaggctccatgctaggatgtgtttgcattttgtatgtgtttcagtgtgtgagaccttattttgtatgttttgagtttggtttgggaagggaacagaaatcacctgtaagtagtatgtgaattgtgttgggtgctgagatgaatgtgtgccttgatgtgtgctgtatgttgatgtgttgtgtgttttgtgttgtttgttgatgtgttaggccttgatggatttagagcgtggacgtgtgttggaggtgtgtgtgttgggttgtcggagtgtatattatggaggataggagtgtatgttgtggcattggtatgtctgtatcagagtatggtttggagatgcatgttgggctgtgggggtatgaagttagtgtgatgggggcttctgtgtgttaggggatcctagcacgcagaccccctaacctgtgaattggggtaaatggagtgtttctttgcttaatcattccacagatatttattgagtgtgtgatacatgctgtactttgctaggtactgaggatatgatagcgagcaaaaccaggcacagttcttgctctcctggaacttacaagtctagtttctgggggatgggtagggtgggaggagggaagaatagggagtgttctgggcctggatggatatgtgtgtgggtgttttcaaaggtgtatctttgatgcggagggtgtctgaatgtgtatttgtggatgggtatgttggaagagtgcacagggggactgtgggaaggctgagggtgtaggtgtgtggacatggtttggggatgtgcaggtgtttggtgtatgactgtgtaatgagggtgtgttccagatggggagagtgtgtgtatgttagcggtgttagagaagtgtgtaaggagggcatttcaagtgatggtgcatgtgggggtgtttgcacatgagtaaacatggggggtagaggggatgtgaggggctggagggtagaggtctatgtggtatgcactgggggcattgctggggagcagcagtgtttgaggatgactggagctgtgcagagcatctcctgtgacctgaggatgtgccagtcatgtcctggtaccactcggggcaggccatctgcccccttcacttcatctcttccccctcacccacagcagcactggctccttggtgtgtgtatggccgaagagggcctggacacagggtaccctgggtgaaagatggggctgaggctccaaggctcctgctgtacttttcttctttttgagcaggagctggagggtgcctcaggaatacaggagggacatgggaggagggctgttgggctgagggctccctgtctggctgccatctcttcttcctgctaccctgttcacaaactgggggtgcttaactccctctgtgaatcaacatgaagtcactgctggcaacctagagcctgcgagacatctggccctgatggagggggagggaaaggtgtctggaacccaaactttctgcattatgatccccacccccaacctctctcacgtacacctgcgtgttcatgtacacatacatgtacatagcatcccttgagctgtcctcacctgacctactgaactctgaggtggtccgggtcccccagagatggctgggtagctggttttggcagcctctacctgtgaggtgtgaagttgggggctggggtggcaggtgagtgggggggatggtccttggagctggctggggctgggcttaccagctccacctcctgcaggctctgaagcggaagccagatttgttcctgtgtgaacgattggatgtcaaagctgtgttccagtgtggtaagtggggcgagatggacaggtgggcctggggctcccctagaaggatcgttaaactgatctgcctctgcctttcccacagctgtgctggccctcaagttccctgaggcacctactgtcaaggcctcctgtggcttctttgtgagtcccatgctgaaccctgacccactgccaccccagtgccctcccctgcccaggacttcagacagtagggctggggtgtacaggtcttgtcctcagggagagctgggaaggagctgggctgatgggcctctccatcctctgcagacagagctgctgcctcggtgtggggaagtagagtctgtgggaaaggtggtacaggaagacggtcgtatgctgctcatagcagtgctggaggtgagacggagcaaaggggggtttgatgggggtgagggcccctcactgctgaggcagctggccttctgggaggcttgagcctttggtcccctaagctctcagattctgtttcttcttcaattaaatgcctgaaagttgttaggattgctgtggggatcagctggctctcaaaaagcagcgctcactgtgatgtgcagtttggcttaggaactgtccagagggcagttaggcattcttgctgcagaagcggcggaaggggcaacaccctggtgtgctgagaacccctctccctcaggccattgggggccaggcctcccgcagcctcatggactgctttgccgatatcctgttcgccctgaacaagcactgcttcagcctcctgagcatgtggatcaaggaggccctgcagccacctggtttcccctctgcccgcctcagccctgaacagaaggataccttcagccagcagatccttcggtgagcagagctggggtgggcctggggtcaggcagagagggggcagtggtggtggctggtgctaacctgctctcccttttctccttcagcgagcgagtgaacaagaggcgggtgaaggagatggtgaaggagttcacactgctgtgccggggtctccatggcacagattacacagctgactactgaggggtgcccccatcccatccaccccttctcttcatccttccctattcccaaagagtaaacctggaccctcactgctgtctctgcctcctttctgctgtcaccaccacctaactgaaagcctgggtccagaaggcctgggggaaggatgggaggatgcttggacccaggccttgggagggaatggtgggaacatcctctagctcccaggttggaagagatactactgtagccaagccacctaggctggagcccttcagaatactgtcattgtccttggggcggggtggttgcagtagtgtcatcaacccccccatccccattaaattaatcccaacatgcatgtatgcatacatttatttaatcaacaccgccgaatattaggcccctagctctgtcctgcgtcgttctgccctgaacaaaggttgatctagtccatagctaccatggagaatggtaggaagtgagggaaggctgcatggagaaagtttttgacaggaatagtaggctttctaggtagaggacttgagactttgggctgcaagtggggtagggctgggtccgtttaggaaggaagaaatggagtggagttttgacttccgggaggggtttctggtgtggagttatacaacatcgaacttgcatatggttgaggagggctatagaaaggggctgagtgtgtgtgtattggggggtgggtgggtggcagggaggtgaaggagagaagatatctcagccgcagaggagaaaagaggaaagtaggacctaaggttgtccatatgtccgctgctccccgcttacacaggacctccagcacaggatggtcagggatcaatcagcaccagggacagctcctgacctattcttgcttttctcccttagcagtgttgcctccctttctgtctcctcagctatagtttcacctaggctgcctctcaggtaccccaggcttctcctcagtaagatctgaagagcagaatgagttctccccacttttacccttgagctttcaatctccttgtgggtgatggggaactcgttactcccacattcatcccactccttccctgttcaatagatccgggtttgatgctggttgtgccacagaattagtgtcttattacacaagtagtctctttgaacctcagtttccgtatctgacagaggtatgtaaggagggcatttcaagtgatgttgcatgtgggggtgtttgcatataagtaaacatggggagtagaggggatgtgaggggctggagggtagaggtctatgtggtatgcactgggggtattgctgggaagcagcagtgtttgaggatggctggagctgtgcagagcatctcctgtgacttgaggatgtgccagtcatgtccttggtaccactcgggataattcttactccaaagactgtaaacactaaaaatgaagtgcctaatgtacagtaagtgctcagtatttggctgattaaatagcaaatgctttcactgcatgcgatatccaaagaactactttgtaaagttttgtatataaattaattagaccctcacaacaatcttattaagaggtactattgtcacaactccccattcttcagataaggaaatgggcatagggacattcctaagatactcagtagcaagtgaccaagcacaatattcaaacccgagccggtcggcaccaagtttaaaattatgcagtgtagccgggcacggtggctcacgtctgtactctcagcattttgggaggccgagatgagtggattgcttgagttcaggagtttgtgaccagtctgagcaacatggcaaaaacctgtctctacaaaaaatacaaaaattagctggatgtggtggtgcgcctgtagccccaactactcaagaggcagaggtgggaggatggcttcagtccaggaggtgaaggttgtggagatcgcgccactgcactccagtccaagcaacatagcgagaccttgtcaaaaaaaaaaaaaaaatgaatgaatgaaagaattatgcagtgatactgcccagaggatagagtgcacgtgaaatgcttaacagtgaagtcggtgttcctgatggccgcgggtcggctgaaccggactcccagcgcccgagaggaggccaggggaactacaatgcccacaaggctccgcgccttcctcgatgtacttccggctggcctgggactcaggctgaacattggttctctgtgcggggcggtggcggggattggagggcgggagctgtgctgacttaggattggcaaaatcgctatcagccacgcctctaaaacccggaagtaacctccccggtagtcccacgtgtagcggagaaacagtagttaggatggctgaaggggatactcaccggctgaaggccgactgtgattccycctacccccacaaggcgattttgaccccctgagggctgctctagaggactcaggccccgaagctgtcccagggaggtccccgytgcatcccaccacccaagctgtgcctcatggagtcgatgtttagcagccctgccgaggcggcgctgcagcgagagaccggggtgccaggactgcttactcctcttccggacctggacggagtgtacgagctggagcgagtcgctggatttgtccgcgacctggggtgtgaacgagtgaggacagacttagggaagggtggctcgcctctgtcgggatgggtcgcccagaggatccggatcttgggggattttgtgagggcgagagggtgggggaatcagtctgtccgcagcgcgttgaccatccctcccttccacctactacgtggggcagagtgcccctctgggaccaggggctttgaaggttgagtgggagctcctggaagattgctttaaagaagccctcagtgggagagaggctgtccctgactccatggtttatgcttataggttgccttgcagttccctgaccagctattgggagatgctgtggctgtggctgcacgactggaggagacgacagggtcaaagatgttcattctgggtgacacagcctacggcaggtgtgaacttggccttaggtgggccaggcctggggatccggggctcayggggttttacgtctatgacagtgattgccttcaatggtggtgtttctccttgatgataatggtaatgactccccttctgatgctagctcctttcattgacaatgtcttcctttaatgaaaccattttattcactgaccacatttcccagtgatgacagcaactcgcctccagaagagaacccatttctctgatgctatcttccctgcagctgctgcgtggatgtgctgggtgctgagcaagctggagctcaggctctcatacattttggccctgcctgcttaagccctccagcccgcccactgcccgttgccttcgtgcttcgtcaacgttctgtggccttggagctctgtgtcaaggcctttgaggcccagaacccagaccccaaagcgcctgtggtgctgctgagtgagccggcctgtgcccatgccctgggtaaggggttttgcctgtgtatgcacaaagggtgagccaactgctttatgccttaatttccccatttccatataccatccatagaactcttgatatgggcttggccccagcctactgggtcatatttagtctyctggggatgagggagctcctgctttgccaggctccaacctcaacactacctccttctcttccagaggctttggctactctcctgcgcccacggkacctggacctgctagtctccagcccagcttttccccaaccagtgggktccctgagtccagagcctatgcccctagagcgttttgggcgccgcttcccccttgccccagggaggcgtctagaagagtatggtgccttctatgtagggggctctaaggccagccctgacccagaccttgacccagacctgagtcggctgctcttggggtgggcaccaggtcaacccttctcctcctgctgtccagatacagggaagactcaggatgagggtgcccgggctggacggctaagggcacgaagacgatatctggtagagagggccagagatgcccgcgtggtagggctgctggcaggcacactgggtgtagcccaacaccgtgaggcactggcccacttgcggaacctgactcaggctgctggcaagcgtagctatgtgttggccctggggcggcccacccctgccaagcttgccaacttccctgaggtggatgtctttgtgctattagcctgtcctctgggtgctctagccccccagctttctggtagcttcttccagcctatactggcaccatgtgagctggaagctgcctgcaaccctgcctggccacctccaggcctggctccccacctcacacattatgcggacttattgcctggtgagtagtgggggcattgcctaagctggaaacctggggcacggagtcagggggtgagtatggattttctttcctcctccctttcaggctctcccttccacgtggctctcccaccacctgagtcagagctgtgggaaaccccagacgtgtcactcattactggagatctccgacccccacctgcctggaagtcatcaaatgatcatggaagcttggctctgaccccacggccccagctggagctggctgagagcagtcctgcaggtaaatgtacaagtctccactcccagctgagctttttctccagatgcagygcactcagactgagccccctccctctacagyctcattccttagttcccggagctggcaagggctggagccccgcctgggtcagacgccagtgacagaagctgtgagtggaagacgagggattgccatcgcctatgaggatgagggaagcggctgataccatgtggggctggagacatagatggacttatgaatggctgctaggacctttagtgctccctgcaccaacctcccatccccctgccaagatccttgaaggaccctggaaggagggagagcaggcagcccttcacaggataggatccgtctctgtcctgtcctggcactggcacaagctcagcmcatgcccagtaatgcgtgttgtttggctgatggaataaagggcttagggacttccctgaggcctctggacccatctgtcttcctgagggcagcccaggacctttggccaatcccagttcccaggctgcagttgagggtctgtccttgtcaaaaggcaggtgctagacagtctagaccagggtttctcaaactcgtacttgacatttggggccagataattctttgttgtggggctgtctggtgtatggtagggtgctcagcagcatccctggcctctgcccactagacatcagaagcactcccccagttgtgacaaccaaaaatatctccagaccttggcaaatgttatctgtgggggaaaattgccctcaattgagaaccactggtctagctagacctgcactgtccagtacagtagccactaaatacatgtggctaaacttaaatttaagttaattaagattaaaagctcagtttctcagtcacattagtcattcaagtgttcagacagccacatgaggggacagtgcagctacaggatatgccatcatggcagaaagttctrttggttggacagygttggtctatactgactcttatttctcagggagatcacagcaacctaaataaaccagataccttttctctttgtgtttctttttaattcatgaaatactgcaggtcctgcactggtcctgggatgtagatgttaactgtatttaaccagattcctttccagtgtacctggaaagagagttaaatacgcagtcagtacacagtgaaacagctctatctgggaggagggaagccccagggacagctggatcccacaggagatacctgacaaggactaagaggaggcttcccagagggcataacacctatgctggatcttttggaggaaaaaataattgtcaggagaaaaggagtgaaaaagacctttgggcttaaacatgaaccaacatggcggatgcttcaagcaagtggggttgctgggccctaaaggtggagaggggtgaaatgaaaagactcgcctcttcttccccacatttgttgagaatctggtcacagtggcattgtcgagggtattgaaggtgaacaaaggagatgtggtccctgccctcagggaatgcctagtctaatggtggaggcagagctgtaagctaacaaggtaacccagacaaagtgggcatcagtcatgtgttctacaaatatgtactgaggacacactctgtgccaggtactggaaatacagcagtgagcgacacaaaagccatggtgcttccactcttccaggggagttggacaaataaaatacttagtatgccaaatggtgatcagtaagtaccgtgagaaatgtaaagctgggaagcagaggagcgtttaagcggggtggaatattaaacagaatggtcagagaaggccttttcaagaaggtgagcaaaaactgaaaggaagttacaggatgagccgcatgtatagttaggagaagcagagagagcaagtgcaagggcagtgaggtcgcggtatggttggcacgttcaaagaaatagcaaggagggcagtgcagccagaggagggagttagtgggggaatattagaaggtgaagtcagctgaggggcgtggggagcctagcaggctattgtgagaactttggcttttctcctgaatgaaatgggagccatcagggcatttcgacagggtagtgacatcttactgaagcttaataagcatcaccaggacatcgcgggagcccagcaaacgcgcttccctgccactgggttagggaaggcttgccggaaggacgatttcggaggacagcaggtgttagccaggcagcggagcgagcgccaacaggcgcactggggcggagagacgccgtgagcaaggtgaggcagagggcacgcgcggcgccacccgccacaggctaggacgcacggctgccagagaggacgccttaggggcccgcgagcaggctcgggaataaaacagggctggcagggcgaggtggagagactcgagaaggaccggccagatgtcgaagttcctagagaggagggcgcccaagcctccgccgagacgcgtgactacaactaccacaatccccagcgcctgcggttccagcgtcgccttgctctagacgggcggcggcgctgcgcggggaaccggcgtggggtcacgtggtaccggcgcatcacgtgggcgagttaggtgacgctgcggggcgggcggacagactgcgggacggacggtggacgctgggacgcgtttgtagctccggccccgccgttccgacccccgccgccgtcgccgccatgacggggctagcactgctctactccggggtcttcgtggccttctgggcctgcgcgctggccgtgggtgaggccgggtcctggcgggcgggagcagcatcgcggccgagctggccgggtcggaactcggcggggaagtggcctgcggggaatactggccccccgcgcgctctgcacccgaggctctggggacttgcgcctgcgagggcctctgactccgacaaaggagacccggatttccagctgcttgaggaggggtgcgggcgggtaggggccgcgagggcagcactcccccgtcctgccactatcgctgtctcccctcgctcccacgtctcactgctgtcccccctttcttgctcctgaccggcccgctcggtcacaagccggctgctccggttcctcttttcccagtcgctttgccctcccccacccacagcttgttgggtaaacagcggaacggactgggccggcgggatctggctggagcgcttgctccctcggtcccgcctcggattcgggcttgcgggtggcgaccctgcctgcgcaggtgcttggtctgggaggtggttttagcgagggaatggcagaaaatggaggcctaagcagaggaatctgtctacacagctgtactgtcacctgggggcagcctgaggacgccccttcagggaggtggcccttcagctcggcagctactttaggttgaagaacttctctctaccgagcagcccgtaaccccctttttctccctcactgctgcaggagtctgctacaccatttttgatttgggcttccgctttgatgtggcatggtaagggagggcagggggaggattccccttgaagcttcttccctgcagcctctcttcttttctctggtctgagtccctcccccacaccactgcctgcctgggacatggacctttgggaaatacgcggtcagttgttgcctgtagaactggtggtggggttgaagggggtttgaggggttaagattttgtgctccgcttccctgctagagctgaactgctttcttctctgcttccacaacaggttcctgacggagacttcgcccttcatgtggtccaacctgggcattggcctagctatctccctgtctgtggttggggcagcctggtgagtattggggtggtgggactgggggcaggggctgagtcatggcaggtggtgtcactggggtcttaggcatgctgagggcagtgacagcttgggctctgctcatcagttttttatccttccaccaggggcatctatattaccggctcctccatcattggtggaggagtgaaggcccccaggatcaagaccaagaacctggtcaggtaagtgtcagggtccttggacttttgtcagaaccagctgtgttggcgctgcctgtgtgtttgatctgacatactgtttctgacaagccaccttgtgggatgggatgttataggggaaagattgctggggacttactgggcaggaaggacggtttctttctcatttctttctcctttccactccttacccctaatctctaccactaccagcatcatcttctgtgaggctgtggccatctacggcatcatcatggcaattgtcattagcaacatggctgaggtatggaaggccagggtggtggcgggaatccattccagtgtgttctacacattccttagagattggatggggtgcatcaggatggtttctgattacttttcttcttccctcagcctttcagtgccacagaccccaaggccatcggccatcggaactaccatgcaggtgggtggatgggcgtatgaatgccaaatgctgggacttcatgcctgcttccactctcccccatcccagcttgggccatcattttgatattctctcacctactttttctgctttgcagagtggggatggtgattggccccattagcccatatctcccccattcctggcttagcctcactgcacccctctctatcctcccaggctactccatgtttggggctggcctcaccgtaggcctgtctaacctcttctgtggagtctgcgtgggcatcgtgggcagtggggctgccctggccgatgctcagaaccccagcctctttgtaaagattctcatcgtggagatctttggcagcgccattggcctctttggggtcatcgtcgcaattcttcaggtgatgaatccccttgggaagcctctgtgtccttgtccccaacctagccttaccctccttctggagaagctgaagtgctctccttctctacctataactatagattcccccaaacagcttccacctcctcatttccatcttctggttttctcctacaggggctctctatttttgtctctgatttggtgtcactgacaacagccctgttctttttcccccctttctaatgcgttgtatctgtatagcacttagtcctccctctttctgttctctcattttatctgccatgcttttcatgtctccagtctgtatttgtgatctagactagaatggaattttgtctgtctatatcagtctgtcatggtgtgtttgactgtctctcggagctatgtgtatctccctctcacatgcctgtcagtaggacaccattgtctaaattgtgtgtgtctagtctgtctgacagtgtgtgagtttgtgactaaggatcagcctgagggtctgagtgtgactgtgggtgcttgactgagttgattcttagtgactagctttatccatatgccacttctctccgtctgtcccacagcgtaactctgtggttgtctgtccctgtctgccttgtctgtcacagtgtgtccatcctggttagtcatatatctcttgtggtctgtccatccaaccatgtgctagatgtcatcttctatcatttgtcactgccttacctattcctctgtccctgcctgatttctcctgttctttttttgcagacctccagagtgaagatgggtgactagatgatatgtgtgggtggggccgtgcctcacttttatttattgctggttttcctgggacagctggagctgtgtcccttagcctttcagaggcttggtgttcagggccctccctgcactcccctcttgctgcgtgttgatttggaggcactgcagtccaggccgagtcctcagtgcggggagcaggctgctgctgctgactctgtgcagctgcgcacctgtgtcccccacctccaccctcaacccatcttcctagtgtttgtgaaataaacttggtatttgtctgggtcagtgcagcttctgttgccctcttgcgtcaccgttcacagaggaagggtaaagaggcctgtacgcctcagcctcatgccaatcccttgtcagctttctgactgcacacttctgatctgcacagagcttgctcctaggtggggaggcacgggtgctgggtggactctaacccccaaacagacttgtttggggatgagggagtgtgcagataggggcccctgggtgtgtttgtgcctgtagtccttctaggcccgtttgctcagggctctgactgaccaccatgcccgaattgtctgacagcatctacttacctggttgtacagtcgggcaccatcatctccgtccttgtgaggcctggagcctaggcagtggtctctgcctccagtgatggtcctgtccttctagcagcagcccctcccagaaacctctactctgatccttgttcccagggcccagggcagctcctcccaccccatccaatctcgttttctccttccctgaccctgtttcctgttaccccagaagccccagccacctccagcccacgcctttaagggtcctgccccctctctgctggccgaccttgaatcttggtccaattaaagagttgacaaatccctagccccgcagcctgagtccgcccaacctccaggtccccttcctggggagttcgcgctccaatgcaatccccactccccgctaagggactccacggtctgcacccgctcgccggtccgacctctaagcccaccctttggacgagcctgacccatttcctcccgcgctcccaggtccgtgcctcctgggtgcccgggttcggccgccggcagggcgggctcgcagcggcgcgcggcgggtgcgggcgtgctggaggcgggggccgcgggggcgcgcgcgcgggcgcgcgggccgggcctgcccctccgaggcgccgtagcgcgggagggaggcggcggcgctgtggtccgtgggtccgccggtccgtgggtctgcccggccgcccggccccgccctgccccccggggcggctcggctccatggccccgcggcggcggcggcggcggcggcggcgggag

SEQ ID NO: 97828 - DNA, 15925 bp, Homo sapiens
catctcaaaaacaaaaaccaaaccaaaacaaaaaacttcattcattttctctaaaagataaggactattttttaaattattacacctaaaaacatgaacagtaattccttaatatcatcaaatgtccagtcctctgctgaccttttaaccctcaatgactcctagtgggtgctgttgaccctgacccatcaaattcgttactacttctccagaggagtgatgaggacgagggataagtaaagaggcaaacgagtttccacatctgcttgaatcctggccttgtcattcctccaagtctctgttttccctgtaaaacctaatttcattcaacaaatattgaggcacctactctgtgcctaacagtccctaccctcaaagagagacagtgagccagatgcttaagtcttcaaagaatggggatgagtcgcccagggatctgcaatgaggaggggcaagtgcagatggcagagtataatgacaggagccttgaaggggccggagggctttagggagtctgagggacaacggggtgtaaggaagatgcttcccgccttcagaggctgtggagtgtggaatgtgagggaagaaacggtcaccacttgagagggggtatgggggcactctccttcagggcagctgggtttgtgattagcacaagaggttgaagggaatgctcagagaagaggaatattgggaatttggctgatgactgcgggaatttggctgatgactacctgagtttcagatgtaaaagatttggaaggtggagaaggttgactggatcagaataagggctagacagagcaagccataagttctttgtaaaaaattcatttatttattatttttcaaaagatggggtttctatatgttgcccaggtggactaagctcaagtgatcctcctgcctcagcctcccaagtagttgggactacaggcacagggcactgcatccagctcacttctcagcaccactaaatagtggctgttaacagttattggccgggcacgatggctcacacctgtaatcccaacactttgggaggctgaggctggtggatcacaaggtcaggagatagagaccatcctggccaacatggtgaaaccccatctctactacaaatacaaaaaattagccaggtgtggtggcaggcacctgtagttccagctactcagatgactgaggcaggagaatcccttgaacccggggggcggaggttgcagtgagccaagatcgtgccactgcactccagcctgggcaacagagcaagacaccatctgaaaaaaaaaacaaaaacatttatggtggtccgggcacggtggctcatgcctgtaatcccagcactttgggaggctgaggcaggtggatcacctgaggtcaggagttcaaaaccagcctgaccaacatggtgaaacccccatctctactaaaaatacaaaattagctgggtgtggtggtgcactcctgtagtcccagctactcaggtggctgaggcaggagaatcgcttgaacctgggaggcagaggttgcagtgagctgagatcacaccactgcacaccagcctgggcaacaagagcgaaactctgtctcaaaaataaataaatagataaaaaataaacagttatggtgaagctcaatgctgacaaacgcaacagagaggtcacttggggacaaactctgataaggctgctgtcattcagcccttcattcattaaatcaagcctttttcatcaaagttttctggtgagagtcctggggttaggaaaggaccctatcccaggtacagtcttccccagaagcctcttctagtaattttgaaatatatgacattattattaactatagtcaaatgtgctcaccataaaaaattggtaagtaggtgaggttggcttgatttaattattccacaatgtatacatctatcaaaacatcacattctaccccaaaaatatgtacaattctttcaattaaaaaattagttttaattattatttttttttttttgagacagaatctctctctgttgcccaggctggagtgcagtggcgcgatctcggctcactgcaacctctgcctcccgggttcaagcgattctcctgcctcagcctcctgagtagctgggattataggcgctaccatcacacccagctaatttttgtatttttagtagaaacagggtttcaccatgttggtcaggctggtttgaactcctgacctcgtgatccacccgcctcggcctcccaaagtgctgggattacaggcgtgagccaccgcgcctggcctatttttaattttctaaaaaagatttgccatctctccgcaggccccatagctcctctgatctgggaggcaggatttcatccgccgcccccaggcctggagagtagattgcatcaggccagggagtgactcagccaccccttgctgttggacttcagtgactcacactgcctgcccgcagggtgtctataacctaggtgcttcatgacaagaagtggcttgaagtctgtgggaacaaggtccttccgccagcactgaggagggaggttgggaagcttaacggttttcctgggacgaggaaaggggtatgaaggttcttttttccctgtcttgggaagggaggaggatgagctgtggcactcctagagcagggtcatcattaccgtgtagacacaactgattaccagtatctgccttcaggtttccacagtcacggagtattggagagtggtgacgaagaaggcaccgagccctggaaggggcagtaaaggtttgagcaaaggcccaactgatcacttcatctctcctttcagtcctggacgcacaatatccagcgagagaaagagtttctgcggaagctggtgaaagctcgcgtcatcactgatctaagcagtggcatctgagtgggcccagcacatggccatagaggcccaggcaccaccaggagcagcagccagcaccacctacacaggagtcttcagacccagagaaggacggtgccaagggccccaggggcagcaaggccttggtggagcagccagagctgtgcctgctcagcagccagtctcagagaccagcactcagcctcattcagcatgggtccttgatgccagagggccagcaggctcctggctgtgcccagcaggcccagcatgcaggtggtgggacactgggcagcaaggctgctgccggaatcacttctccaatcagtgtttggtgtattatcattttgtgaatttgggtaggggggagggtagggataatttatttttaaataaggttggagatgtcaagttgggttcacttgccatgcaggaagaggcccactagagggcccatcaggcagtgttacctgttagctccctgtggggcaggagtgccaggaccagcctgtaccttgctgtggggctacaggatggtgggcaggatctcaagccagccccctccagctcatgacactgtttggcctttcttggggagaaggcggggtattcccactcaccagccctagctgtcccatggggaaaccctggagccatcccttcggagccaacaagaccgccccagggctatagcagaaagaactttaaagctcaggagggtgacgcccagctccgcctgctgggaagagctcccctccacagctgcagctgatccataggactaccgcaggcccggactcaccaacttgccacatgttctaggtttcagcaacaagactgccaggtggttgggttctgcctttagcctggaccaaagggaagtgaggcccaaggagcttacccaagctgtggcagccgtcccaggccacccccatggaagcaataaagctcttccctgagcctggcctctttttgccttctctgactttcctggaagaaacaggaacctaaagccttagcaactatgccaaaccctcgggccctctctccagtccacagagtcctgggtccctttcacttcttgtgtcaatgcaggacctaggtagccatccagaggcctctggagcatctcctgtatcctctttgctttgagaccagaggtttcagggcacactcttagaggagacagaggcacaggactggagccctaggacattgccttggggtgccacagccccacctctggaaggacagatattcctgcaagcacaggaaagatatactgctgagcccctgcagcaagcagaggctcacagacctaccctactactgacactcccgtccctctgggaaggacatgccccagccccaatcattagcacagaggcacaccctctcccttcagccctgctctaggtatcctctgtcatactttagaaaagatatcacgtcgccttcttaagagtcctagagtctgatccctctcttccccagcatccccaggcaggcctgagaatggacagaccagactgtcgcctgcacttgaggccatgaagtgagctttctgtcacacactgccactgtggcaggcagtaagtggggtggccggctcctgctcctctctcctgcccaccccaatccaagactccaggcagccctgggctgccctcccactggtgagccctaaggctggagtcccggccatcccagggaccagcagcctcccacatgctccttcccactgtggccggccttaggcagaagcctcctgggctaggggggtaagggaggccctgactgagggacaggtcaacccagaaaccccctccatttctaccggaaataaggccactaccatgcacatgttcctgcctggatggtgccccgtggagttgtacagggcataggctgaatggccataagtggtgtccctggctgaaaaagccccaaggcaggtgccccaactgagcagccggttgtgggaggtgacagagcagactgctccctgcttggcctcctatcccagggggctcctggcacgcctgcagcagccccaccacctccagcagcagttctctgtggtctgacttctagtcctcaccaccgcggaaaactactttcacaccagctatggttctgagccctggccatgcaccagaatcacctgtgcaatttgaaaactgcacatgtccaccctgaaagtctgatttgggtctgggttgaggcccggatgtgggtagtttttaaaggtccctagtggttcagaagcatagccagggtacagctggtccacacacatccccagcactctcatccctgaccacagcttccaattgccagttggttgacaattcccaaattgcctttgccagcgcagctctctctgcttccttccaggctacaaattcaccggcttcctgaacatttccacttggataatccacaggcccttccaactcaacatgtccaacaccgaactcatgagcccctgcctttcctcccaggagccgggatgtacccctcccccaggtcaccccgccaaaggcacacttttgcagggtctacctacctcctcaccctatccagtcaggcactaatgaattttcaaaattgcgtgttccagattggggcctggcagccccacgctcccctcatgccctgcatcagacctcatcctctttccacagcagcctccacctttctctccaaccccatcctctttactacagccagagtcatccacaaaaaatgcctgtctgattacaccattctgctcaaaaccctcccatggtccccagtgttaggatctttccatccatgttactcacccagccctcaacccacctgccaaattgccataattaggcatctgaaatgctgccctccagctacctacttcaagactcagctcagatgttcctcctctgtgacccctgccttcagccctcagtacccacttctgccaacactgcccctgctgtgccccagtgactcccgtgtttgcaagtgtgtccgtactccaagccctaagcagcacaggaggtgagctgtggggagactagagcagagtcagatcctgaaagctgcgcagaggctaagcaacccaacaaggcaggtgaactggccgctgagagaagaatcgggtggagcagagagcagctgctgcagggcagacagccggacccccaaatctgcacgtaccagcagtcagccgccccacgcagggaccggcttacccctcgctccccgccctcactcactttctcccgccctcggcccggcctcccagctctctacttcgcgwgtctacaaactcaactcccggtttccgtgcctctccaccgctcgagttctctactctccatatccgaggggcccctcccagcatctacccccctcccaacctcgggggacctagccaagctaggggggactggatccgacgggtggagcagccaggtgagccccgaaaggtggggcggggcaggggcgctcccagccccaccccgggatctggtgacgctggggctggaatttgacaccggacggctgcggcggcgggcaggaggctgctgagggatggagttgggcccggcccccagacaaggcccgggggctccgccagcagcaggtccctcgggccccagccctcgctgccacccgggcctggagccccacacccgaggtaagccagcccacttgcctgtttctggtcccagccctggatggacgctcytgggctgggggagaggacaggaccacccccctcctctcctttcttgcatcctccctctcttgggccctcggcacagttctccgcccctcccagcccctcagtccctcttgtcgcttgttggactgtgctggccttgccggcccactgtaatgtgaggctcccgctgccgctacagggtgcagactggctgccaaggccacacttttggctaaaagaggcactgccaggtgtacagtcctgggcatgcgctgtttgagcttcgggggagagcccagcactggtccccggaaaggtgcctagaagaacaaggtgcaggaccccgtggtgagtagcrggctggtggatggggaggcaagggccagagaaccaaatggccctagaccmcaaggaggtaggaggcagggcctgagctgccctcaagagacctgctcccgggctccccctagcgcagagggctcctaaggctgccctgcctgcctttccctccatcacggacaacagtcactggcctggctcggaggccttgattccacttagccaagaggcacacaccaggacctggaggacaaccccgggaaggcctgggggtctgttccacaggtgtgcaggcattctgtgtgctaaaggatggggatgagggtggtagctgggacccaagaggaggctggctaatgaggacttacgaaggctctagggccccaaaagggtgtttgggagtgctagcagtgggagctcaggaaggctggctgggatcaggaacgatggctcaagggggaaacttctaggagcatgactaggctgccagatccataggaggctgggagggggacagacctagaccagctcccagggtggctcagctctcagagaccaggctggtatggaagcctagctggccctcctgggagtggctcaggcctgagwgtagctgaggggatggaaaagcccaccctgcttggaatctgcaggcttggcagaytctgcccccttgtggccacaggaagccatgacccaggccccatgttttcagagggcccattagctcccaccatcccccggctctgtggtcatcgagggacacctatagtcagaggagakaactcaggtggctctgggtccagaacacagttcacagaggggcgaggtgaagcagctctgggtgggcagcacaggctgaggcttggggctcactatcattagataactcttagagtgaccagctagcaccctaattcttctccagccctcagcttcctctccggcagcctggggtgaaggcctctgtaggaccaagtgtgtccagctataactccttccagccacttctggcatctccagacctacaacgcagagcaggaaggttctgggaaaagaggacccctctctcccctccagctgtgtgaccttgtaaccttagacaacctctgagcttctctgagccttgtttgctcatctggaaaaaggggattaaaccatttacctcatggagttgtgaaagaatagctgcaaagcacctaacacatagtaaggttcccagtgcagctacttctgctgggttgagtctagctgtgtaggccccttgttcctcacctggagaaactggggtggcaggccggtcccccacaaaagataactcatctcttaatttgcaagctgcctcaacaggagggtgggggaacagctcaacaatggctgatgggcgctcctggtgttgatagagatggaacttggacttggaggcctctccacgctgtcccactgcccctggcctaggcrgcaggtgagtggttctcccagtgactcctacctggtactgaggaaaggcggcttgactggtgagggagagcagggcttggcttgggcagcggttaggtgtgggagggaaaatggtcagggagggaccaggtgaatgggaggaggagcgggacttctctgaatggtcggtgcactcaggtgattcctcccctgggctcccagaggcagcaaacccattatactggaacctaggcccttcctgagtttcccctccacacagctaggagcccatgcccggcctgatctcagcccgaggacagcccctccttgaggtccttcctccccaagcccacctgggtgccctctttctccctgaggctccacttggtctctccgcgcagcctgccctgtggcccaccctggccgctctggctctgctgagcagcgtcgcagaggcctccctgggctccgcgccccgcagccctgccccccgcgaaggccccccgcctgtcctggcgtcccccgccggccacctgccgggtaggtgagagggcgagggggcggggcggggctggcccgggacaccgcgcgtgactgggtctcattccagggggacgcacggcccgctggtgcagtggaagagcccggcggccgccgccgcagccttctcggcccgcgcccccgccgcctgcacccccatctgctcttccccgcgggggccgcgcggcgcgggctgggggcccgggcagccgcgctcgggcagcgggggcgcggggctgccgcctgcgctcgcagctggtgccggtgcgcgcgctcggcctgggccaccgctccgacgagctggtgcgtttccgcttctgcagcggctcctgccgccgcgcgcgctctccacacgacctcagcctggccagcctactgggcgccggggccctgcgaccgcccccgggctcccggcccgtcagccagccctgctgccgacccacgcgctacgaagcggtctccttcatggacgtcaacagcacctggagaaccgtggaccgcctctccgccaccgcctgcggctgcctgggctgagggctcgctccagggctttgcagactggacccttaccggtggctcttcctgcctgggaccctcccgcagagtcccactagccagcggcctcagccagggacgaaggcctcaaagctgagaggcccctgccggtgggtgatggatatcatccccgaacaggtgaagggacaactgactagcagccccagagccctcaccctgcggatcccagcctaaaagacaccagagacctcagctatggagcccttcggacccacttctcacagactctggcactggccaggcctcgaacctgggacccctcctctgatgaacactacagtggctgaggcatcagcccccgcccaggccctgtagggacagcatttgaaggacacatattgcagttgcttggttgaaagtgcctgtgctggaactggcctgtactcactcatgggagctggcccctatttattatttctaagttatttatttacttctgtggcttgtcagatcctttcctgggcagcagggggttgggaagaagaggctggatggagatcatgccttgctgatcgcactcacacacctcaggctgactcagcaatcacagacctggcctggatcttcggcccccacccagcagctccgggatgggaggcatggaacacaggcaggggcagggcgggcagcaagggtgcagtcactagtcctggcaggctgctcacttgggcctgggcttacctctggggaaagagactacagaggcttctgtggagaaagccctgtctctgtgacctctggcatctttgtggcccccgcttagtgggtaaagacacagagaagcacccattgccccaccccactgtcattgatcagtgtcttaccatccagggaattgtcttgagggtgccttgtcagatatacacatgcctctgcttgcagacaggccagcatggttaactcactatccacattccatgaagcagcccagggcatgagggcatctgaaaaaaaccgagggttggtagagggtgcggtggggtgctggctccggtgagcaaagcacagatctccatgtggataaggaggcaggaaaagataagggccccagcaggatctgcatcttgggtgatgaacaaggatattcattaattcaaacaaatatttattaagcacctattatatgtcagatactgattatatgacagatgccaaggatacagaagtgaaacagacatgatccctgcccttgagaagcttcaaccaggagagacagacaataagtaagcaattacagtaataattatttaaattcaatttggcaaatggtacgaaaaggacaggaagctaagaagtccacaccttcgtggggaagaaaggagaagttactgctgactctggcctctcataccacccccaagtcacctccaaaaggccagggctatccctaagcttttctggatatcctttcaaaccttgtttcccatgtcctatgcatttgtattggggaggcctctatgatttttcttttttggaaatgagatgggggcatggatttggaaaggatgctaagtctgaggaactgtgggacatccagaggggttgtcaggaggcagtgggatctgctggtctagagctgccgagggaggtctgggctggattgatgtgacagctgtcagcacagaggcaggagctgcagccgggggtgaatgagagtaccatgagagatggagagggtcgagggcgagatccctcaggcatttgacgctgctgagagaaattccttccaatccgcctgtgtgccttcctgctttggcacagatgcccccttcacccaggctagagtgaggagctggcaagagctctctgaaggctgtgcccattctgggtcaaggaggagaaacgtgtgtgtgctcccactcttctgcattcactgccccagttctagatgctccaaaaatttcgatgcctttgctcccttcaaacaccctgttggcccctctctgcctccaaacggattcgggatccttagttccaccttccctcctgcaaagaaaatggccccagggccatacagtttacagagggctggctgcaggcagagaaggacattctgtcaattccagggttattggggccaggcagccccctgctagtgagactttaaagcctagcctagtccccaaaccctgccactcagtagacacggctgctccagagccagtaaaggagactgactgaagccatctctgacaatgctcacagtgagagggccacagcccaagccaaaggtgctggctgtcaacattccccaggctgccagcttttgagggaacagggctcaccccagctggaggctgcattctgggccccagacagcttgtgctcaacatctcagagtccggaacaagacagcaacagctccaagaacacattcccatatgaattagcctcagtttgcaactcaggacaacccaaatcaaaaggaagacagtgaaggagggaaggaggggagggaaggaaggaggggagggagggagggaggggagggagggaaggaggggagggagggagggggagggagggagagagggaaggaaggaaggggaaagagagagagaaagcaagaagcaagcaagaaagaaaaggttgttttccccaaaggaaacaggctgcagagctgtacctctgtttaccacatagtagctataacctgtcaccaggtggcacattgtagctcctggggccacaggtgactctggtcaatactaaagccaaaggccatttagtcctttgaagtctcagaagcattcgatagtgtcagtcctccttgaaaacctgtcttcccgtgactctcttggtccaatactctccgggttctccttccactcctccagaggcttgttctcagacgacttctgagttcctcttcctctctctgcctctcatgttcctcagagctctgataccgactctctctcctcttcccattctactctctccctgagcagcactgtctactcccgtggtttcagttaccacctccatgctaaccatgctcacattttatctccagcctagaacattcacctgagccccaagtctgtaattccaatacctctatctgtatatcctgggagacaccaagcttaacatatccatactggatgtcttccgtttcctccttcagatctgctgtccacccttctccagcctgctctgctcctcacatcaatgagcttccctgctgtccagcttccagaccctccccagtgttccctgctcagtgagtgcaccaacctcatccagtgacacagccagaaacttgggcaatctcctaggctccttaagctctgtcatgtcccttaagcattggtcaccaaatccttagatcctgcagatccatcccctttccctatccccagtgctattctgctgaagccttcataattttttggatggtttattcctcatcctcctacctggtctcactgtctccagtcacaactccctccaaccattctcagcgctgcagccagataagttgccttctcttcatattaaccgagcatgaactgtcgtgcactgggctagtttcagggattcagagaccagtgagaaacatgttttgccatcaaggaaactatacttggagatggaagtaggggtagggtagcaaataaaagtaaaagacatcctgttaaatttggatttcaggccctgcgtggtgactcatgcctgtaatcccagcactttgggaggctgaggtgggcggatcatgaggtcaagagagtgagaccaccctagccaacatggtaaaacccggtctctactaaaaatataaaaattagctgggcgtggtggcacgcacctgtagtcccagctacttgggaggctgaggcaggagaatcgcttgaacccgggaggcagaggttgcagtgagccaagattgtgccactgcactctagcctggcgacaaagtgagactctgtctcaaaaaaaaaaatggatttaaggtaaacaataaatacaccttttttttttttagatagggtcttgctgtgtccctcgggctggagtgcagtggtgtgatctcagttcactgcaacctccacctcctgggctcaagcgatcctctcaccttagcctcctaactagctaagactacaggtgcattctaccacgactggctaatttttaaatttttttaatttttatttttttggtagagatgggctcttgctatgttacccaggctggtctcgaactcctgagttcaagagatcctcccacattggcctcccaaagtgctcggattacaggtgcgagtcaccatgcctggcctaaatacttgttttcagtatgtccaatgcaataattgagacatacttatacaaaaaaattggctgggcgtggtggctcacccctgtaatcccagcactttgggaggctgaaacaggtggatcgctagcgctcaggaattcaagaccagcctgggcaacatagtgaaaccctgtctctaccaaaaatacaaaaacttagccaggtgtggtgacgtgcatctgtggtccagctacttgggaggctgaggtggaaggattgcttgagcccaaaatcgtaccactgcactccaacctgggtgacagaataagactctatctcaaaaaaaaaaaaaaaaaaaaaaaaggctgggagcagtggctcacgcctgtaatcccagcactttaggaggccgaggagggcagatcacgaggtcagaagatcgagaccatcctggctaacatggtgaaaccctgtctctactaaaaatacaaaaaattagctgggcgtggtggtgggcgcctgtagtcccagctactcaggagaatggtgtgaacctgggaggcagagcttgcagtgagctgagatcgtgccactgcactccagcctaggcgacagagtgagactccatctcaaaaaaaaaaaaattgttgtttatctgatattcaaaattaaatagatggccaggtgcggtggctcatgcctgtaatcccagcactttgggaggccgaggtgggcggatcacgaggtcaagagtttgagaccagcctggccaatatggtgaaaccctgtctctactaaaaatacaaaattagccggggatggtggtgcacacctgtagtcccagttactcaggaggcagaagaattgcttgaacctgggaggcagaggttgcagtgagccgtgacactgaactctagcctgggtgacagagcaagactccatctcaaaaaaaaaaaaaataaataagtgtcctgatttttttctggcaaccctaggtaggggtaaacaagtaccccagtagaagtatgactgaggttataggtatgtgtgtcaaggagggggcagattctacaatcacaaaggaagaggaatcagttttttcctggatagacgcagaagaggaaaagtctttgtggaaaaggtggtatttgaactgagtcttgaaaaatgagtttgtttgcacagggtggattatagggtggatgagaggcatggaacccgaactggttattgctgattgcctttatttcctctcacttctaaatgtacactgttcattgtggccatgtcctgtcctgcacggtgtggttctcagccctggacaggaatggagtggagaggtgagggcctcttccttgggctctccatctcagcctgaagactctgctagtcctatattctttagatttttatttgtttatttatttatttatttacttcttactagccagttcatcacagcttcaattccctgttacacttcaaaatgcttatgttgaactttccctgcctgctgactgtgtgatgtctctctcctgatggcatccagaatgacacagagccttctcaacagaggaagtagcatgaacaaagacagggaagtgtgaaacagcctggtgcgctcccaggattgccagcaacttcaggtggacttggggagggtcctcatcaagacaaaagactggagaggtcacaaagggctttgaatgttataccgagaagctcagccttcgctctgaaaggagccactaaagggttttaagtgggcttggttagagatgtgtttcagatggatcacttgctactgtgtctagtatggatggaagaggcaaggtgggtgccagctagagctgccatagttagagccgttcaggcaacaagcacaggtaccttgagttagggcagaagcaaatgtgcaaggacagaagagatgtgagggacaataagagaggtgagggctggatgagagatggtttccaggtgtctagcttgggggactggtacagaacacaggggatgtagtattttagcatgtgataggggtaagatgtggggaaaatgtgagttcagttttgtacatgttcaactttgggtgcctgtggcaacttcagagggccaggaggcagctaaatatgcaggtttgaaacccaggacagtctgggctggagaaatc

SEQ ID NO: 97829 - DNA, 17580 bp, Homo sapiens
taaccctcagaggtgaccccagcaccctcaccccttactccccagaggcaacttcccaatatccccaactcttgaccccaagtggcccaatccctgatcccccagtgggggacctccaagcatccttgactccaaaaaggtgactcccagtgccactgattccctgatgtgatccaaggcccctcaggactgctggcacccctgatcgttgtcccccaacccccagcccagcctcagcccaatatctctgacctctggcctgattcctagaggtgaccagaatttaatgtcagggcctaaatagtcattgagtagattgcattcctattggtgccctcgaagacctcacttgtgcacctgtgggacccctgccggggcagataggacacgagctaatgggtgctgggcacagctcctgtggacctgacaaaggggacctgagcagtatgggaagggggtgtggaaagacagtgcccacccctctgaaattgaaggaggtggatgtatctcttaggaggtagccacatttggtatcaggctggctgggagaagggcctaaagggtgtgtgaaatgtaaacaagggcttcctgacactgctctgacttgtgctaaactttctgggggtgggagacccagagtagtcacacccaatccgtgctttcccttacgaagttcattccaggcagggagatagtcatggaaaaaggcagttatagcacaaggtcatcaaggcaaggtgttgtcttggcagaagagggactggtgatggaagccttcctggaggaggtgatggtaacctggagtttgaaatagttactcatttaacaaatatttgcctcacacctaccttgggcacagtgctacattccccaggctaatagaggaagccagcctggataaggagaatcatatctggaagattctggaatgtgaacatgtatgatacataccgagagtctgaaactatttggttttaagatctctgaaggctgatagtgacagtggggcgggggaaagtcacgtctggatgttaggggtttttcttctgttgccctttcaccatgtacatgtcaggggtcttgaatacctgatgggaggttaacttttgtcccagaggactggggagtcatggaagaacctgaagaagggagaggcggggtggggtttgtgtttagaaggcacactgtttgagcttcaggaaggcgaaagcctggcatagccgctgggtggagcaggagagaaagtcagcccggcctgaaggaatcgatggagtccaagggagcatagtggtacagggcctggggatggaggtgctgtgtccccagcttgagcaggagggtttttctactctgaacacggggtaggagtgggggaggtggtttgtagccctggtgtggggttggtgcctgggagaagcatgaggcactggggaggcacagggagctgatgaaaaagtggttctgatgaaaactatggtcagcaggaaacaggtaagagaccaagaggagaggggcttcagggcatctggggaggagtggagctccacagtacacgccaggagccttggtcctgtttcaggagtagcctgcctgagtgccaccatcaattacacatgtctggcttggttgtagatgtggcaagatagcaagaagtttctggcttaaagaactctgtgaatgttggattcatggattgggtatgactactctgggtctgccacccccagaaagtttagcacaagtcacagagcagcgtcaggaagcccttgtttacatttcacacaccctttaggcccttctcccagccagcctgataccagattcacagagttcacaaactgtgaactctctctacctagttgctgttgcctaaaatctgggagttctggattcttcttttcctcaccctacatatccaaacccatcagcgagtaatatcactgccacccctaaaacatatttgagtccatttgctttccccctttactacctttaccttagtccaacctctgggatcctgcctggactactgcagtggcctccaactggtttccctgtttatggcttggcccccaactgggttaaacatttctcagagcctttacacatttcattctgtgagaatgaaaacatgagctgctcgctctgacttagagccctgcccttgcacggtgtacttgaacctccaagctaatattctgcttttccacgtgccccattcaggtttagccactcagctgtgcaaaatcttattcccaatttagggtcaccatgtgctctgacctctacctggagtgctttgcccctgcccttagctcagtgtcacatatgccctcttgtctctcttagcactccgatgttttctctgttacctgcctcccctagagaagccaacttgccctgagatgaaggaccccacctgtcatggccatggcagtagccttggtgcttagagcacagcctggcacatggtggtgctcaataaatagctggcaagagagtcactaaagaacgaggaacagagaaaatggcacaggcgtggggagtaaaaatgatgcatctgattgcgcttgaagtgcctgtgggatgcctggtctcaggcttagaaaggtctgagctgacctcacaccgtggctcatgtctgtaatcccagcactttgggagactgaggcaggcagatcacttgaggttaggagctcgagaccagcctggccgacatagtgaaaccttgtctctaccaaaaatacaaaaaaaaaaaaaaaaaaagacggggcacggtggctcatgcctgtaatccctgcactttgggaggccaatgtgggcagatcacctgaggtcagtagttcgagaccagcctggccaaaatggtgaaccccatctctactaaaaataccaaaaaaattagctgggtgtggtggtgggcgcctgtaatcccacctactcgggaggctgaggcaggaggttgggaggcaacctcttgaacccaggaggcagaggttgcagtgagctgagactgcactactgtactccatcctgggcaacagagcaagactctcaaaaaagagagcgtctcaaaaaaccaaaacaaaaagccggacgtggtggtgtgcacctgtagtctcagctactcaggaggctaaggcaggagaatcgcttgaacccaggaggcagaggttgcagtgagccgagaccgcgccactatattccagcctaggcaacagagcaagactctgtctcaaaaaaaaaaaaaaaaaaaaagtctgagctgagagatttgtgagggtgtcagacgtctgttttctgactggagcagctgacatctctgttttgagggccaatgcaggagcagaagggctcctgccaaatcaaccctggaaggagccagattggcttaagcctaggccccagagatcccatattgggtttggtggtgttaacttaaaaatcactagatcagctggatgaggtggctcatgcctataatcccagcactttgggtagtcaaggcgggtggatcacctgaggttaggagttcgagaccagcctgaccaacatggtgaaaccccatctctactaaaaatacaaaaatcagctggcgcagtggcaggcatctgtaatcccagctactcagaaggctgaggcaggagaatcgcttgaacctgggaagtggagggtgcagtgagccgaggtggtgccattgtactctgtctcaaaaaaaaaaaaaaaaaaaaaatcactagatcaataaatttgaaaaggagactttatttctcttttataaagggttacaacctgcaggctggccatcccactggctaggaagcagagcctccagccaaagccttaacaggcactttgagggagggaggagtgagataggaattttagttgaatggattggtcaacaggttactggaggagctacgaatatttacggaaggggtcctgacatatgcatatcgaacaaacatgcatgttatataccatccatgttcaccttggggtggagacttaatatttaaatatatcgcagttaggccccatacgtcaaaaagacaaaagcactcaagtgcgcagcctctgtaagctggctagaaccagtccatggccgatggtcttatcaggagaaagttactgagatcagtctcttgtcccaccaaagctataattatggcttgtggaacaggggcgtaggggtcagcatctggcagtgggtgagctgcaaatttttttctattatttatattaccacattatacaaattgttttaatattggttatctcaagtcctgtacttgtttagctgctacagaaaaagaaaatcctcgcggcagttagagcatagtctcttctttaagtgcagaggtgcaagacttaacccttgcctggcatggccttagatcctatttataattaggtatcttattgacacaaacaatgcattctgtcagtcttgtgatctctgctttgacgttaatgctggtcatttgttgtgtctaagctgcaaaagggcgtgggcataacatggcatgtttgacgtcccttcccatcatagctggaaaccctgtttttaaggttccctggggtccccttggccaaaagggggtccatttagttggttggggggtgtaggattttatttttagtttacagttgttagccctgatgtggaccatttccatcctatctaggtttaccaagattcaaaacacgaagctgaccatgaagcgggacggcattgggtcagtgcggtaccaggtcttggaggtgtctcggcaaccactcttcaccaatatcacagtggacattgggcggcctccgtcgtggccccctcggggctgacactaatggacagaggctctcggtgccgaagattgcctgccagaggactgaccacagcctggctggcagctgctctgtggaggacctccaggactgagactgggctctgttttccaagggtcttcactaggccccctagctacacctggaagtttcagaacccactttggggggcctcctgcctgggcaggctcttcaagtgtggccctctttggagtcaaccctccttcccgaccccctccccctagcccagccccagtcactgtcagggtcgggccagcccctgcactgcctcgcagagtggcctgggctaggtcactccacctctctgtgcctcagtttcccccccttgagtcccctagggcctggaagggtgggaggtatgtctagggggcagtgtctcttccagggggaattctcagctcttgggaacccccttgctcccaggggaggggaaacctttttcattcaacattgtagggggcaagctttggtgcgccccctgctgaggagcagccccaggaggggaccagaggggatgctgtgtcgctgcctgggatcttggggttggcctttgcatgggaggcaggtggggcttggatcagtaagtctggttcccgcctccctgtctgagagaggaggcaggagccccagggccggcttgtgtttgtacattgcacagaaacttgtgtgggtgctttagtaaaaaacgtgaatggagcagctcccttgtctgtttgggggtgggggtcgggtccctgaacgtggttaccctgagtgtgttgtggtggaagggcacttggggaacctggcccaacaagtaaacctgacccgggccatcctggttctccaagcgctgccactccctaggctttcactggccttaaggggaagtttgtccttgcactgcttccgggacagtggaggcgacgaagtaataaacccgtggacccagatttctcaggtcttaacacgttccctgaggcctaaaggtgcccagggccgagcccaaagtgcttgggtcagggctcggtggagcgccgaggtgagtctgaactcccagccggcacgcgccgcccgccggaccaaacacgagagggggcggggccctagagtcgcggcgtggtttcccgggtgatggccacgcggaagaggtggggctagggccctggttcccactgcctagtttctgggcccccggcatccgagtcggccaaaagccgggcagaagagagcgccaaggactggcagttccggaacgggcaatcccagccgaggggaccagcggcagagcacgggtggggcttgggagagggcggggcccatagaggggcggggtttggtgagcgttgccggcgggcccgcggtacctcccgcactctgacctgcggcccgtaggtccgagccggggacggcggcgtcggtgggtcatgctccggcactccccctcgctgtgggagctggtggaggagcacgttccgctccgggagcgacgcgaagtgaagaggattctgggggaggcggcggtggacctgagcctggagctgcgggcggaggtggggagagggaaggtgggccacgcccctggcctgccccacgactcgggtgatttcccacctctgcgggtccctggccctgccgggtaactcccgagatcctatcctggtctcccctttgactccgccctctccctcactcccccagcccccaccattccggacactcccctccccagtcgcaaggtatcccagctctccttgcaggtggcgatgttacgggcactgctccaagaggctcgatcctctcaagcccccagctcccgccccatctctgacccctcttctcttctggcaccaccgcctctcctaaaggacctcttgcgccaggagctccggcagttgctccagggtctccgccacaaagccatctgtgagggcaggtgggagcctcaggcctgggccctttccctagataccaggtgggctagcgctgcccctaacaaggagccagggttgccttttctgtggtttccagaaaggagcctctcagcttccttcctgtgcaccttctgcagggaccaggcccaagcttgggtccagtatagccccagggtcctgcactttgccttggaggagcccaggtgtgatttgccagaacaggagatattccagatgagaggtggtgggcccaggtaaggtgatggtaggagagagggatctgtccctgcttggcagagggccctagcccactggtgggttgcacctggctccatgcaggagattccagtcacgggctgggcacttccaccgccacttgtgatagagattatcagcccatgagggctactgaaacccagaggaaacacctgcctagcctggggacaggcaaagcttcctggagaaagtggtttgatctgcgtgttgtagtatgaggagcagttttcagggagatgaaagagaagagctttgtaggaagagggaagaaaggaagccatgtccagcaggcggttgttcctctggcctagagaacaggagtgagggctgggctagggaggcagggagagctgaagaggatggtcacaaatggtatttacagctgggactgaatgagataaaatattcataagtggatggcagcaacttcttattctaatcctcacacagcctgaggaggtgggcaaaatctccattttgcacaagaggaaattaaaggccgggcatagtggctcatgcctgtaatcccagcactttgggaggctgaggcgggaggatggcttgaggccaggagtttgagatcagcctgggcaayacagggagaccccatctttacaaaaagtgaaaaaaaaaaaatagtcaggtgaggtggcgcatgcctgtattcccagctacttgggaggctgaggtgggataattgcttgagctcaggaattcggggctgcagtgagctatgattgcacctgtgcactccaacctgggtgacaaagaccctgtctctaagaaaaaaaaaaagaagcctgggcaacatagtgagaccccatctgtgcaaaaaaattgaacaggcgtggtggcacgcacctgtagtcccagctactcaggaggctgatgtgggaagagcacttgagcccgggatgtcaaggctgcagtgagccaagatggtgctactgcactccagcctgggcaacagagcacaatcttgtctcaaaaaaaaaaaaaaaaaaggaaaagaaactaaagctcagaagcgataagtgatttgcctgaagtcacacacaatgaagggtggcagagctcatttgcaaacctaggctcccaaactcttactctttgcactatattatattgcctttgtgagaaaagaaacagttgcctagaagtgatatttgggtcctgaaggcctggggtgagcaacatgcggagagtgatagtgacttcattgccagcagcggtcacagagatctcagcatcatcaaggaccaactgaacgtgtccaacattgaccaggtggccagacacctgaggtgaggcccaggggcacctgcatgtgtataggcaggggtggagacaaggatggatcttgaggtgctgggattgtgagacaggaggtgggtagtatacttggcggggaggcccatgtgcgtaaggctgagaggtggaaagagctggctgctatagagctagtgaggttgctttcaggaagcagccaagtacagatgccacggccgagcatgatggtgcatgcctataatcccagcaatttgggaggccgaggcaagagggtcatttgggcccaggaattcgaaaccagcttggccaacatgggaaaaccccatctctaccaaaacaaatacaaaaattagctgggcgtggtggtgcacgcctgtaccagttacttgggaggctgaggtgagaagggattgattgagccctggaaggtaaggctacagtgagtcatgatgggtggcagagcaagaccctgtttctttctttctttctttcttttttttttttttttgagatggagtcttgttctggcgcccaggctggagtgcagtggcgtgatcttggctcactgcaagctccacctcccgggttcacaccattctcctgcctaagcctcccgagtagctgggactacagatgcccaccaccatgcccagctaatttttttgtatttttagtagaggcggggtttcactgtgttagccaggatggtctcgatctcttgatctcatgatccgcccatctcakcctcccaaagtgctgggattacaggcatgagccacctcgcctggccgaccctgtttcaaaaataaataccttgacacaggggtagcctgtgtcagaggattttaagcagcggaagggctgtgatgtgggggaagatggaggcaagaagaatcacagtgcagaagtgtgggagagagaaggatgcctgccagggtgaggcaggcgaggggaagatacttcctgcccagaaagagcctcacaggggccagacgtctatgctgggtcagcccccaagcagcagagggcagtgtgggctgaggaaggacaggttgggtggggctcctgctgaggctggaggttggggccatgtggtggactcagctgagccctggtcctgtgtctcgggttctggctgctgctccctcatgtcccaggggccttctggaggaggagtgtcacaccttggagagggagatcctcatcctgcaggtgagccgcagccctgggccctyccccragcctcactgctgagcgtagactctcacctgggtgagacccatgtacctgtgtgcatacataggtgcatgtacaggctatgtgagtcctgcatccatttctcaggggtgcatgcttgtgtgcacctgcaaaatcctggaggcccaggattctagttgagcccttaaggccasggccaaccgttttaggtcttttgcctccttcctttacctaagtctgggtacaggccccaccactatcttgccaaactcagctcttccgcaaggctggtattccctggggaacgtggctgccctcacggtggatgggctgaaggggctgcacgggcctgccctggggrtcttggcctctgtatcctgccttgccccacccctgccttgagtctgggcactgacgcagctctccctgcagcgctgcctggaagaggagtatttgaggccttgccacccctctgaggcagccctggagcccaccctggcaggtgaggacacggagcagggcccagaacacccagcctcctgctcccaccccacacttgtacacaccctagaagagctgggcactgtctcagcccaatctctccttcagagctaaaggaacagaagaaggccatggagcaggagctgcaggcatctgtggggccttcttgtgtctctcccaaccacaggtaaaccacaacagtagacacagggcagggtggactgaaggatcagaccaccacccctcacagttactctttcttgtccaggcagcggcccttggggtcctccacacagggcctcagacccccgcttcccctctgcggggttgcacctctccagtgctgcctgcctgcacctcctctggagccctaccttcgacctcgaggccagtcggctacccaccgctggggacggcagcttcagtgcagccccagggaagggccagcttccacacccatgtccagtgcagcaccccaagycccagcctgaagggctggtcaccgagtaggctctggcttctgccacagcgcacctgtctgccgctgccgcctcagctgctttggcccagccagcttcagatctggtcttggcgagctctcgccaggaccccaaggctgttggtctgtctggcccttgccccacccccttgccagatccctggtgtctggagctgagtggccgggcrtcggtcccaagcatcaaagcctttggcctttctcctcccaggcctccacaaaggcctggcagacagaggtctcattccagcctgactcttgtcccctgggggacccagacaaagcacagcagccgctcagagacaggaatagaaatttcattaaaatctatggactttaaaatcctagtggtgcacaatgggcagggatgggcggcgcaccgttattgctacagaggattagaggtggcttggccggggctgtcactgcacagaggacggacaaatgaacacttcagggattcagacacttcagaaggggctcccactccagagaggggaggggcatgtgggctggggccatttggcacatgaacgagggcagcacatttgggaagactgggcctttagcctcatggagggagggcaagggggtgtcgtgcagggtccccttccccagggtgctgggctcaaacctcctgtggagcagcccccaccccatcccccagaaacaaatgctttgggcaggctgctgggtcacgggcccctgctggctgggcctgacagccaggcctggaatgaggggcagagaccccggagcagcccagtgaggtgcaagcaggcctggaagacagactgaacccgaggctgggggcgaggaggtggcgaccacagagaatacaatgtttacaaaaataattacacagataaacagggctgggcagcacagcctgacaagtaacactgggcagtcccccagcccttcatcctgcccctagggaggaatagccaaatgtgcctggcagaggctggggtcggctctgagggcaggagcactagtcatggggctggaggcccacccagaacctcagctcagggcagggtataagggtatcggaggccacgtaaagccatccaggctgctggggacctggcccgagacccctccaaagtgctttggacctcccagcaaccctccactcccacccctccccccagctgctatcttggcatccaaaggacatgtaaacactggggacatgagcatgaatgactgcactagcagtggtgaccaaggtgacagcagccgtcctggccagggcgtggcagggggcaggcagagacacctggcctctgcctcaccagtctctgcggtgggagcacggggtgggggtggggccactcccctggcagctgtgctcatatccgggagtcctggaggcggctggagccattactgcccacaatggggatctgcgccttgtccgggtgcagtggctggacctcgaagccgtcctcaggagagggggctatggtgggggcgtagcgccctgtccggtgctccaggagggcagggccccagtctctgcttggctttgtggcatttttcaaacgctgcatgaggtaggcatggggcacaggggcagggcacgtcaggagggagcccttaagccccttccagctggcccctcccattttgcctggctacccagcctgtccctgccctcacctggaggagggtgtccccgtctgtgcggcagagccggaacatggcgtagagggggatgcagaggacggaggacagagccatgaggaagccaatggccacggcccagcctgggtactggtagtggttgtaggtgatcggctggtactggatcacagtgaaaactagaataaactgcacggggcaggtgtgggagtgggcgtgaggccgacccagagcccagaccccaggccatccctctaccagcaccctttcctctctggtttcccaaactagaaaagggcatttggggcagaacagggacagctgtcaacatctgggccgtggaagaagcaggcagggccgggggccggagcgcggtgagtgggaaggctctgcggaagggagaagtctgtctttgccacagtcctgaactggccaagcacagtagagctgctgccgcctttggaatcagtcagttctgctcgctatggctccccatggctaactgaagtaaggccacatcctgggcctttaggctgtcacctggcagtgtgacctcaaattgtcttgccggccacactactccgccctcagtgtttcagtcacacccagtgtttcccacccactcttcatttattctggggaatcatcctctgcatcttcctctgtcaaaccctatgtcagtgccctctccttcaagaagccatcccagatttcctccatttccttctgcagggcctccccacggcgttttccacctgcttcccttagagtgacttggtttaacgttcccatagacctgagagctcctggaattgcatcaactctgggggtgcagtgcccagtacagtgcctgccacagtctcttgtgttgatttgaactgatttgtgcagagaggcagaggaggatggaaagagggtagggcaaagccctgcctgtctatggccgtggagacagggacattcagcctggggaagctccatgggctagaaatggtgagtgtcaggctgcggtgctctagggaacctccttggaaagagatgagtgagattggaaataaaacttgtggctgcagtaacaaaaggagtgaaaggaggcagaaacacaggcagtggctggcgggccacccagagggcctggcgggggaagggggggggcagtcccagcaccctcctcctgagcctccagccacatcctggagcacagggccatattctagaatgcaagacccacatccaaattgggggaccctccggagacactgcacacgatgggagcttataacaggtttcctgaatggaacagatcctgacctacgtgtggacaaatccctcatttgagctgacagaagggtggagtttgtcaaaaagagcttttcagaaatatgaaaaaggaaagcccccagagaaaacacaacagcccagaaagccaggctggagttaccccaaggagaggactctaggctcccctaaaggtaactccagcctggcttcctgggcacaggaagagccccgcccgctgtgcctcaatcttgtggagacaccagatcccagccaaggttgcccctacagatccttcttgtgcttgtctccttcctccccactgcccttggcaggtgccccctggtctctccccaggacatcaatctagtctgaatgctgggagaccctctgagccgcagaggctgagctccccttgggccatagccccagaaggcatggcactctggggtggtggtgcctgccctcccctgcctcccaccactgagacttccgttcctcctgtttcaaagctgggccagtggccagagcggggagcctgtgccaggctcgggaacatcccacaacctaccgggtagaggcctcagccctccacgggcctttattcagaaacatgagccacaggggaagtccggtgctgagccccctgtgccaccgaggcattaaacatgacaagagtgtggctctgaacactggccgggccactgggccagccctctgactatcactcagaggtggccttgcctgtcctctgtggagtgaccattacactgtcaatacctgccttccccgaatcccaccccaaacaggaaggagccaagtcatacggttttggcccctggaccattcctccctcctgcagaggtgtttctagtgtggcgctggcccaggcttggaattggacaacctgatttgaattgtggctctgcctcttattagctgtgtgaccatgggccaattacttaacatccccatgcctcagtttcctcatctgtaaagtggggacaacaatgacaccttggagagctctatcacgggttacatgggaatggtgtgtggaaagtgcctgcttccttgccatggtggattccttccaccaattcagctccctgatgggaatttctcagctgttgaatattcataaaacctggaactccccttcccaagccacccacctcactgcctggaaggcttgcaaagttgcccccatgcagagctgacctctgactccacagtctggtctaccagccttgggctgctgctggaacactggttcccaccacatagccaaggccctggaacaccctccctggagggatgggagataaggccagcaggcagaggctgacacgctatcgatattgactcctgagtccccgggggtgccaggcaggaatgcctgagcaacgtctgcagtcaaataaaggctgtggcactcccctcctaacctgaggccagggcccaggcagctctgagtcgccacacgcctctctgactctctccaacctccctcagcctcccaaaggccagagtcatgggtatggagctccggccaggtgcgggagctcccactgtccctccgctgggtcccaagagatggacacatggccaaggggcagcgggggaagggaggggccggccagggaactcacgaagatgatggcgggagagacgaagcgccagcagatctgaaagaagaggggtggtgggaatcccagcatcatctggatgtcctggaagtagttccggtgccctggagagatggggggtcagcagacccgcaggacagagtgggcgggccaagggccgggtcgcgggaggccggaggctcgagtgctcaccgtagatgtacatgatggccacacacatgatgcaggagatgaccaccaaggagaagctggccgcatagttgtccatcagcagcagccaatagatgcctgcctggggaacagcgggcagctgtgggaggcgcctgcagcccgggctccccaacccttccctgcacgtcctggcaactctgggccagcccttcccttacgcagctcttacctggctggtgagggggatgcccagcaggaagccagccacagccacgcccaaggtcacataggtctttttctgcaggatccactcattccccacctcatccacaatggctgtgaccagcgtctccaggaggcagaactgcaggatgtggctgtcagatcggagacctgccccttgttcctgtcccctcccttccccaagcctccggtccacgtcctgcacctcgtacctgagtgcccagccccagcaggataagcatgaagaagaagagcagagaccacagcggggagatgggaagtagtgtgagggcctcggggtaagccacgaaggccaggccagggccgtggtctgccacacgggacacatccacgcccaggtgattggccatgaagccgaggatggagaagatgacgaagccagcatagacgctggtggcacagttggtgatgctgatgatgacactgtccctgatggggaggaaaacagagttcagcttccctctccccaatttgggccaagaggagacatggagacacggaaagttctaggtacaaaggcacccccaactctttttttttggagtgggagacagggtctcactctgttgtccaggatggagtgcaatggcgctatcacagctaactgtagccttgacctcttggtctcaagcaatcctcccacctcagcctcctaagtagctgggactacaggtgtgtgccaccacacccagctaattttcttttttatgttttataaagaaagatggggtctcactatgctgcccaggcttgtcttgaattcctgggctcaagtgatcctcccgccttggcctctcaaagtgctgggattacggcgtgaagcactgagcctggcccccaactccttttctggtctgttctgggcatttttaaggagcctgagctgcctgagtcctcacagacccctgggacatcactgtccctatctctcttctctctcctgcctaaacctctctcctcattctccaacaactttatccagaaccagtattcccagaacctcaagatcatgaggggaaaggaggcctcgtgggcccatggctgcactggagctgagatcaggctgcagagagtgcaggaagggggcagcctcagcccagcagggagcactcaccggtaacagttattgtggaacttgttgtaggaagccatggtgatgaggcctccccacgcgcagcccagtgagtagaagatctgggaggcagcatcaccccacacctgcagggaaggaccggtgggtgaggagctgtgggcagaggcaggcacctccctggcccctccccagcccccttccggtttccctcacttcccaccttggcctccaggatcttgtcccactgcggggttaggtagtacatgatgccgtcaaaggctccctccagggtcactccgcggacaaacagaatggtcagcaccacgtaggggaacgtggccgtgaagtacaccacctggcacaagagggctccatggactcttctgggctctcccctcccctgggcaccaccaccctggctccctaatcaccaccagccccctggtccctctccggctccggagtcccttcagcatcccctccctgcaatacacacataacccaggtagggggcagggtctttctgggtgggcacagaccctgctggggaggggtacttgctttccctgaagacttgacccctcggatgaggcagaggaagacgaccaaccaggagacaccgaggcagccaaggaggggcagccgcacctccccaaagttcccaatgtcatctgacagcttcagcacgtacagcctgggaaggggagactctgtcactgagggccagccgccgctgcccagcaacaaattcccaaggcccagggcccacccgggctgtaccctcctttgtcatgaggtcccagcagccaccttgtgtgacatgggagctacttcaggggcccagccctggccggcccagtcccctccacctgctgcagcccctggggagcccaa

SEQ ID NO: 97830 - DNA, 63884 bp, Homo sapiens
tacttgtaaaaactaccaaattccaaaaagcagtctcaaccttggccctggaattagttgtttagtctagtagagttttaagaacataatgactaacattaattctcaccaatggatgattacataatccattctcaattattttccccatgtaaaagattattcctaatgtgctcataaatccatatagagatgtaagaatacagtcaacaaatattatttacaatgctaaaaccctatagaaaataaagttaccaagcacatagttctatcacttatgtgagaaaatatttcactgcactgttcgaccagtcaatattagcaacaagtgcgctcttgaaattcgggaagaactactttttaccagccacaaattctgacattttatagtaacgagtcacagttaaatagttttcatttggattccctgtccttttccatttctcactagaaaattaagtctacattttaatacaatgaagtattaacttcatttgaagttgaaaaacttctctttttcacaggtaataagcttatctcctaaatttaactcacaatctgcacgttatgttactaaaaacaaaaaaaagtccactaaatatgaaacatctactataaatctgtgatccttgccattaaaggaatcacatactcctttgcaaatctgatgaaagttatgtatataatttcagggaattcactgataccttgaagcctatttatgggtccccgaggtttaaagaatctctgattaatggaaaatagcatccaaaattgatccaagaacatatgaaaacttagtatgtgattaaaagaaggaatgttaacatacagttggaaaaaatgatttactgagaaaatcatgataaatctctgtaaacatacaaatggtttaaagagccaaatgtaataaactataaaatactataataaaatacagaaaatgtacacaatcctggctctgggtaagtcttcctaagcaaaatatgaaaacgacttccctaaattgatagatttaactgtgtgtattttaaaacttctatatgagcaaaacacaccataaagtcaagaaacaaatggcaaacttggacaaaaacaaataagaggccgggtgcagtggctcatgcctgtaatcccagcattttggaaggcagaggggggcagatcacttgaggtcaggagttcaagaccagcctggccaacatggtgaaaccctgtctctactaaaaatacaaaaattacctgggcgtggtggcacgtacctgcaatccccgctacttgggaggctgaggcaggagtgagccgaaatcgtgccactgcactccagcctgggtgacagcaaggctcatctcaaaaaaataaataaataaataaataaataaaaataaaaaaaatttaaaaaagacataggacagataaaggattactaattctaatatttaaaaaaaaaagtaaaccacccaatagaaaaatagaaaaaagtaacaaataaaagggcaataaacatgtaaagatgttcaacctacctagaaattagaaggtaaattaattgaatatatcatttcacagcttcacactggcaaaaattaaaagctgattatcttctagtgctaatgaatgtgtgctggcagtgtagattactacatcttttgaaaaacaaaaaaatgttgaaaagtagatttttaaatctgttaaattataaaatatgtatattctttgtcccagcaatctcacatacagaattcatcctagcacaaaatgacatcaacatgagttaaacggacacataaggatgtttcctataattgtttataataccaagaaagaaaagaaacactcaaaaaaattatatatatatgtatatatacacacgcacacacacgacagatgggggacaaactgaatgtccgttactagaataatggcttaataatttatgatacatgcatactttggaatattatacagctattattaatagaatgagtaagtcacatctatatgtactgacctggaaagatgtgtataacattcaaggcaaaaaaagcaagccgcattgtaatatgtggactacaatgccatatttgttttttaaaaaataaaaataaaaagctgtattactgaatttttttttttaggaattcctaattagtgaatttcccaagtagtcaatgagtacacctcagttttgaatacatctattgctctattagaagtctcaccatcaaaatactgtactctcaaatcaaggtatattaaagccactatcagacaatactatcctttggaatcttctacaatgaaaatgataataactacttttaaggacaaaatgtttaataggttttttatgccaaaataaaaatgcttttttaacattgtgattttgcacgtatggaaaacagctagatttttctttcctatagtaaaaataagctatctaattcagttgtttcattgggtaacataattatgttcattacatgaatctaaacaaggggcagacgttacattaaaccaattcctttgtatcagaaattcaattttctctgaatgatattcattcttagcaataaatgcaattaaacactgatattacaattttaaaactctattcaaatacctaaatctcagcgtaatgtcaatataaagtcttaagcagccggacataattaaaggagcacttgatttggaatcatacatacctgggttgcaatcctggctctgccacttaaatgcgatgtggtcttgggcaagttatataacctctctaagcctgttcctgcatctgcaaaaatggctttctgttgttctttggttttttttttttttgagactgagtctcactctattgcccaggctggagtgcagtggtgtgatcttggcttactgcaatctctgcctcccaggttcaagcggttctcatgccttagcctcctgagtaggtgggattacaggcgcccgccaccccgcccgactaatttttgtatttttagtagagatagggtttcaccatgttggcgaggctggtctcgaactcctgacctcaaatgatccgccggcctcggcctcccaaagtgctgggattacaggcgtgagccaccgtgtctggtcaaaaatggctttaaatggtgttcttactttaaacacgagtatctacgatgaaaagtgcctagtacagaatatggttgtcaaaatatggtttcctctgctaggcatggtaacacccacctgtactcccaggtatacccatctgtagtcccaggaggattttgatgcatatttactactttttatgaaattttctttcttgtatcacaagaaagcactttatattttaactgtggcattatacatcttcagataactttcttttaaaaatcattcagattgtgtctatggaagcaattttcaagtatatggggaaagaaatgttaggaaaggaggaaaatcaaaaatttaagtcattctaacccactgtaacgtgtctaagaaatcaactccagacaattccaaatagtaacaaaacaaaaaataagtacaaattttaattttaatataactttccacttcaagaggagtctttttttctgtagagctggatcattaataacgccagaatatgaccctgaatgtcgctaaatggatccaaaagaaaagaaaaaccagactggataaccttcaatatttaaagtggacatttttttccaccacacaagatacatattaataaaggaattcgtaaataaactgagtatctcttcaaattttactctagaattgagggctggaagtaactctagttttcctccaactttagttgcacttcactcagatttacttgatggtttttctttcaaggctctttaaaatgtcaaggcttttgcaaagccttgtaccaaaatagctactatacataatattacaattattttctggtacatttttcctaaaaattaatcatccactcacagtaacatctatttcttagtctaaattacactgctgagggttttttgtttttgtttttgctggcttctcaaaaggtatttaaaatgattttgaggtgagagtatgcaaaaaacacttcacattacttttccatattcaaattacatcctcttgagctgatttttaagtgccatgtacatttttaaatcaaaatttatcactgtcattcttttaactctcgctctccatgctgagctcttccaaatgccaaagtgccctattaatccgaaagtacctattatctgtgcttttttctggcctgtctttcacaacttcacaccaactttttgtactttagaccccctcatccattaaagcacctgttaaccctttaaggtatttaaccatatggttagctttccgcataatcctacttttcctttaacaaacacaaacttcactacataattccccttcagcgttccctcctcttcgaaattcacatcaacactgccgtgaagcaacatacataggcatccctattctcaagccccaattcatcagtttagcgccactaaagaagaatttaaatctccggaccctcatttccgtactccgatgaagctttgcactcgcgttcccgcactacccggccagcctccctcagctggcaattacaaggtcctttgctgcccggagcacaagagtgcaactcgctacagtgttcacatgttgctctccgtcatcccagcatctcctcccatttctgcgcacctatcccttcatgagcccccaaaagaattcgtatccagatgcccatagctcaaattagaatacccctcatctgacattgccagggcttcctgtacgacttccaagagaacacgcgatgctaagcgcttctgtctccggagaccagcaacacacgctccccactgagttcggtcttctctctcgctctctctccgcggaatgcctacttcggggctaccctttggctagggaagcccaaccttgcaacctctgccccgtgacctcgcgagcccagcacgccgctcaagcttaattcaacccattcttggagctcgtgctctcgctgccccttgttcccggttctctttgaaaccgctttcagcccccgagccagaccccaggttagatgaacgcccacttgctccggcggcagcgcctcctcggccccttccacagcactcagcccggggcagttcagttcctcacctagcttcgagcgggactcctccagtttctggatctggttttccaagaagagcatcgccaccgcgaaggccaccaccgccagcagctgcaacttgggcggcatcataatcctgaggagccccatgaaacccgctgctcgggatcaagacataccgcggggggcggggagcgggaccccggaggcgagagagacgccgggaggagcccgccgagccgggagcgaggcaaagagagagcgacagcgagagaaccaccgcagcgaccccccttctcgcctctccagtccccctcccccaggcgctatcaccaacgccgctggtgtccgcttctcctcagccgactaaacggccgccccctccaaaagcccgcgcagcaaacagcgcgaagcggctgccgggctctcgcctccctctactgcctcagtccccgacccccgcgcccgcctgcttgcccgcctccctctcttccttccttccctccctcctttgctcgcggccgcgcgcccctccaccggcgctgcggctgcgccgccctcatccccgcccccgcccatccccctccgccaccacgcgcacgcatccgcgtacgctgctcggcaaccagaagccccgcccctccccccgttcgggtccgcttattggacggaagagcccctgcgcttcgctcttggttcggtttacggttggtttcctctgccacagagctcaatcaagacgacattcaattgggtaaacttggagaagaaggcggggctaaaactggcgaaggcgtggcttcttggctgcttgacgaagtgtcgtgaataaaagaaaggagaccgcagaagtaaagaagtggggagtttaggmaagtgcctgrtttgggtaatcgaaagcacccagtgattgtatttgatgacttttaagctttcatatgccgttatttaatacctgtcacttccaaatgagagatgtaagggcaacggccgttagcgttctgttttggatcaggctctggagtggacgcccctagcttaggggtccttctaggcagccagaaacctgcggaaaatggtagcgatggcggctgggccgrgtgggtgtctggtgccggcgtttgggctacggttgttgttggcgactgtgcttcaagcggtgagtgtagatcaccttcgcagctgccacagggagagtaggagtgattgcagctgagaaagacgcaacattcrgtcctggttgaaaagggtggggaggactgcgcttccttaatgactgctgcggccagaatgcaacgtggcttaatttctcggttgatccttctccttccccgccttgggtttctagcagcagttttctcttgatttcagattgtcttgggtacgtagcttctcttatacggctcttgctaaaaacaatctgtaaaccacaccaggtgggaggggggaataataaagcttggcaagaagtggaggttgtttttaaatggacagaaatgcaagagactcatgacgagacttccaactcttagaggcaagtcttcaagtcgttggtccaggcgaacagtttgtgtttacctctctcgcgcgcgtgctctctcattttcactacttctgttagtctcttaacttccgttctcctctgctattcatatacggctggctgcgcttgagtgcgatttgtgcttttaaacaatgttgttggagtaaaaggagttatctataccaaagtataattcatttttgaagttagttttttaaatgatgttcgttgtcttctttaaggcagcgttttttatttcatttttctctattggcagaatagatgggtgacctttgaatgggaaaagtgtacttttaacttatttcttctcatatccatgttctgctgtgtgaatagtaaaattttaggcacagtgctgaaagcttttacgtttttttatcctagcttaattcttcgggtagtctctaataaggagacctggtttaatttacttatccaaggttgagggtgttaagggactacaccggagtcctctatgaacacctgtacttacctttctcaaagagcttgaaagcatcctggctgtttgctttggctactttaaccaaaaggtagattcttaacttctgtaattaacattccaattatcttgttattcaggcatttggtgctaggaattactggatcacctctccctaaactttctactgtttaagggtttttgcacatctttaggtcrttcgagataacatttcaggttgtctttttttgatctccctctgtctttgactgtcagttgtctatagctgtgtaaccgccctaaaacctagtagcttaaaacagcaatgatttctcataattctgggtcagtggagtagaactactccacctatgttggttttcccctggcctcatttatgctttttgttgacctagtaggtcagctaaaccgaaaggttccaggattaccactgtttatagttggtgctgtcagctcgaggacttggttctgttccgtgtgacctctcatcctccagtcggctagaccaacttcttttcatggcactctcagggcagcactccaaaagagcaaaagctacaatgccttctaaagccttgccttggaaatcacatatattacttccatcacatatttctcaaagcaagtcacaagactagttcacattcagggatggagaaatagatttcatctctacatgggaggaatgacagagtcactttgcaaagtgtgcataccaggataggaggtatttatggaattaactaattccatatgtaataatgrtaggaattaattaaacagcgtaccacagtgactgtgcacagaatccaaactagaaatttggatgtcatgtttgactcctttccttacatatatcatatccagggaattactgaaacttactgattttaattcctaagtatctcaaatccatccacttattgttaatcactcaggccataaacatctctctcctcagaaataacagcgtcttggttcaccgtttgaattatccctggctgtattcagaatctaaatggttggctttgcctttgtcagcttcccaattgcccaagccaaaaattagtcatttttggccagttgtggtggctcattccagtgcactttgggaggctgaggtgggcaaatcacctgaggtcaggagttcaagactagtctggccaacacggtgaaaccccgtctctagtaaaamtataaaaattagctgggcgtggtggcgcatgcctactcgggaggctgaggcaggagaatcacttgaacccaggaggcggaggttgcactgagccgagattgcaccattgcactccagtctgggtaacagagcaggactctgtctcaaaaaaaaaaaaaaaaatagtcattttaaatcctctttcctttcactgtctgaattcaattagtcgttaaagccttaaaaatctctaagccagtccrcttaataattttgtttccacagttagtatttatattcaggctactatctttgcctagaattacaacagcttccttaactagtctcccatctcattatttcatttccaatctctacagtgcatcaagtgatctgcctaaaatttaaatctgtcatgattaaaactcttcagtggctgcttattgttttttaaggtgaagtctgtcttcctcaatgttccttaaggaggcacttgtttgtctatccaggcttattccccaacatttacttctattaggagagcagaaaggtacaagtggagaattggcatcacttgtttagcttatttcacatactgtattctccctcaccagacctttgagcatggtgttttcattacctasaagccgcttcccagcgtctcatcctttcctccctttctcctaccctacaacaaaaatggctgtcttctacttactctctttctgttcttagtagagaaatcacttcctccaacaaagcttcgctatccctcaagtttggattaagagtctttctrtgtgctccagtggtgatcaatatttattctctgagatacgttccatagttttctttaataatttcttgttctttggcattctcctacccactcccaaagggaagtaccctgtctttcctgttgactgttttatctctagtgacacatatacagagtagtactatacttgatgtataagtgaaatgtttgatgaatgaattagagaatccacaagcaaaggtctgaaaacctggaagtatgaaatctgtttggaaactattaaaatcagcttcagttaccttcatagagctctattatcagtgatcccaactggaggtgtgtagatgaaaattgttgggaggaggagagattaaaaaatacatgtgcttggactctgccttagatatgattcaaaaatttgtggtagctgtgcaactctagctggtaagtacatgttagactgaaacctttttttttttttttttttgatatggagtcttgctctgttgccaggctggagtgcggtggcatcatctcggctcactgcaacctctgcctcccgggatcaagccagtctcctgcctcagcctcccaagtagctgggattacaggtgcacgccaccacgcacagctaatttttgtatttttagtagagacggggtttcaccatgttggccaggatggtcttgatctcttgacctcatgatctgcctgcctcagcctcccaaagtgctgggattacaggcgtgagccaccgcgcccagccagactgaaaccttttgaggcaggaatcaacttactcatttttttgtgaatgtgacccccacaggatggaacatcctaacttaccatcaaataaaactactgggtgatcagccacagccacaccattccaccaaatattcccaaagacagccatcatacacagcctttttctctcaaactctgcctattgaattcatactcatgacgtataatttagtgggaagtacactactttaacgmaatgtattttttagttttaacttctaataactgactaaggcaaattaatttactcttggcctttgtttctttatctctttctccctgaactaagatgtttcaatagaatgcaaagcttaactcacattccacttccagacttgcaaagttagatgtaatttctcccttgcatattgtatcatcatactttttttttgagacgaagtctcgcattgtcacccgggatgaagtgcagtggtgcaatctccgcctctcgggttcaagcgactctcctgcatcagcctcccgagtagctatgattacaggcacgcgcccccacgcccagctaattttttgtatctttagtggagacggggtttcaccatgttggccaggctggtctcgaactcctgaccctgtgatccacccgcctcagcctcccaaggtgctgggattacagrcttgagccaccacccctggccttgtatcatcatactttatactgtattacacaaatccacatggtcttaaccaaatcatagctctgtgtgtgtgtgtgttagtatccctccactcctcctgtccccgtgccaattagaatgtagccaaagagaatacagggaccatttttattttatattcccttcgttgtgtctcatatgtatttgtacatttaaatccctctgaagcgtaaatggccccagttcatttgtgttgttgctccatgccrtcaaagtcatcaggatatttgcaatttgtgtagagcagtgaggaagcccaaccactctcaaaaatacaaaaatgactcagaaaagagagagtgctggacaattcacccttattgaactgttataacttccctaaggtttattcatgtctcttctgtagtaactagtgcttttaagaaaagaaagcaagaaaaaccttgaaaatgaaaaggagtatagataattgttgaaaaaacagtaagaagttggaaactgcatatgtcacagttagcccaaggggaaaaaaagatcaggtggcataagtagttggcagtagtgaaatctttggaaacttccataggaattaaagggggatgagggaacaatttcttgacactttgagattgagatactgctatggataaaactgtcattgggactgcactcgtgttttgttaattgatacctctgagtttcttatacttgacaagttgagtttttatcactgtctactcctctgaatagctttaatttcaagttaataactgcatatttgtcaatatttcagtgaggtaacaactggatataaagtgatttaatctgaaaatacatcgagtatgcttaaataagcaatagaaaagtgatattttagtacagtcttagggagctgtttattaacgctccccagaactaagtgatgatattcaatccttcattcagatcatgtgtaatattttctcattcaaaaaggcactacactaaaaagcagtatagaatgataattgtgtatcattctttctgagatgccccccactccatttcttcacaggttaatatctcgctgggccttacggatcacacagttaaaatcgttggtgcttttgttattagtggtacatacgataatggtgtatcatggattctgtgaaatatggtagtcagtaacagtggttaggggcatagagagcaggccagaattagaatcttgttgctgtcatctcttgtttcctgtgtggtcttagacaaattaccttaactatcctaaacctgtttctttctttataaaatggtgataacaatacctttttcacaagatggtttagattagatggaataataatgtaaagtacttaacaaaatatctgctggtttataaaagcttgctgtaatggccatgtttctggtattcattttcatggagttcattctgtaatcccatctatttgcttttgtctcagatttggagtttgctcagaattacatgagaaacctctgagtttcctgaaagttataaagaccagtgaagagacaacgaatatgtaggtgtaagtgtaacaaaatatatagctagatcagatttttaaggtaatggtatagtacagttaacccagtttctctgctgccaactctctcatctagaaggaactcattaatactggaaaaataaaacagtgagtaatgcatggagaaggagggaatagagccttggtttttttttttgtttttttttttgagatggcgattcacacttaccgcccaggctggagtgcaatggtgcaatctcagcttactgcaatctccgcctcccgggttcaagcgattctcctgcctcagcctcctgagtaactcagattacaggtgtgcgccaccaccccagctaattttttttgtattattagtagagacggggtttcaccatgttggccaggctggtctcaaactcctgaccttaggtgatccacccaccttggcctaccaaagcactgagattatagatgtgagccaccgcatccagctgaacctcttaatttgtcaattctgctttgaaatagagaaagctaaatggttatcctagccaggaaccctgtccttagaatctttgtctttcttacaagtgtggctaattaatctaaaatttaatatttgatcttaatgtgcaaatttaaatgccaatcagttacttttggcaataaaaggatggcaggaataatatcaaactctcatatattagcatttatctgtcaggtacttaaaaatastttctgatgtccttaaattcaaagccttaagtctgcaaaaccagtgatagaacagctagaaaaaagtagtttacctaagaaactcgatactttgtatctcccctatacttatcttttatcccatgtctagtatagtgataaaaacatttatatagtgttttgtaatttttaagtgtgctttcacagtggaaggtgagcctaataccaacatgtattcagtacctactgtgtactgggcgggatgctagatgctttctgtgcacttgcttctttaatcctcagaattccacgagataaatgataatactccctgtttagaaataaggtagctctgtgatggcatttgaatctagatgtgtgttaagactttgaaatacatgatgttttgcatagtcatgctacctgtcagtaggtgctccataaatgccagaataaaaccaaatagtataattgcatgattattcatttgaggttcttattttgttgtttaaaaggttttggtaacagttttatacrtttgttaacgagttcacagtttccaaagtgatttcactcttattgcctctttcagtaactatggctgcaaaacagaattaccctaaaatttagtgacgtaaaacaattgattattttgctttcaaatcttgtgagttagcaattctgacagggcacagcagggatggcttgtctgttctatgatgtctcagacctcagttgaaacactagggcctgaaatctgaaggtggtttactcacatgtctagtagctgatactggttgtcagctggagttttcagttgctctctacatgggcccttccatgttgtctctcttgtatagacttctttacagcaggttggctaagttccaaagttgatgttcctagaaagaaagaatactagccaggcagaggctgtttgctcttttacgacctaccctcagaatcacataacttcctttaaactctgttgttcagaacagtcatggcccgtgcccagattcaaggggagggaacatagaccccacttctcagtggaggactaacattgtaagaacatgtgaaatgatatgtacacattgatgcagcctttgatacatattgattgtcttgtctttggaaaacacaatctgctcattgttacatttgattttcaaattatcctgtgaaataaatgaggcagatcactttactgatggagaaattacccaaagtactagtatggtagcaagtgtcttatagttaaactagagagatcaaacacacaaattaaccaataaagtcacagttccctcccactaggctgggatgtctcatctgttttgaaaaattatacatatgacattattacagagataagattaaagatgtataaaatatcacrtcagcattttgggtgaatatgccaacaagtacttaaattttcttttcattgggaaatgccactggatattaatctacctggtgagtttagaaaaggattgacacactgcagctggtgggccaaattcagtcaacccagtttttgtagaacaaattaacataacaaaatgaagcaaagtttcattggaacacagacahaytcattcattcatgtgttatctgtgactagtttttgcactgccatggctgagttagatagttgtacagaaaccatatggccacaaaagcctaacaaaattatctggcccttcacataaagtttgcatacccttagtctagaagatcagtcagttgcagtcaatctgaaatttcccctacctgacgctatggctttgtscgatttatttatccaacagatatatgaaaactgtcacaagtgagggaaagacagagaaacaacttaatgcttgccttcagaagagttcatagtattgttgaggagtcagatttacatagtacagtgtcacgaacggtactgttttacaactgtgcacaagtttctcggagaagaaaagtactctggctaatgattgagatctgatttttttggtcagtgaaagcttcctaaaagactaatactgattagattcttgaaaataagtaagatgttacaaggtgaagaagtggaaacagaaccttaaatataggggagactgtgagcaaaagtgtgtttgagtagggcttttatacttcaagatactataggaattccttatagcaggaggaattgaggaagtaatgagaagtagccttggcagtgagcatttaagccactgaggcaggaaaagacttgagagctttttaagagaattataaaaatatattaattggttgtgagaatggtgaagaatatggagtgtaggtcagtaggatgactgatctgggcaactagcttgtcagagaaatgatgccattttactaagatactgaataccttaggaagaatagatttaagaaaaayataagtttcagtgttgcagattttgaacttgcaatgcatattcaacacctaaatgtgatattgagtggactgttggctttggaagcctgacattcaagaaaaatacttgagagttttcaataaatgcatatctgaagccatggataaatatgcagtaataaatagaaggcatgtaaagctaagagagagccaaaaacagaactgtgggaaacaatagcatttaagagatgcatagaagagaaaagtaaaggaggacaggcctttggacggggtagttgaagcagaacagttttgaatgcctttgcatttggtaattttgggcaaattttgtggagtagtaggagcagaaaccaggctatattaatgagtttggggtgttaggaaaaaataaagataatagaaaccaagttatagtaacaattcagaaatgacagaacgtgggaagagcagttaggaccatagggcttaaatatagctaaaggttgaagtattgatgaaatgaagtatctgttaagatagaatccaaagaggaagtagagggattggccttagacaaatggaggtataccacattcactgataggtaaaaaagaatggatgagggaagggaatattgttgaaagcctgcttttgtcagccattctgattgattaaatcatctctgattwaatgtaacgatttatgtaaggtaaccatagcaatctgttttatgtaggaagtattgccccttaatttatgagtgaggaaattaaagcttagggaggatagtttgcccagggtcacgaatcttgtaactggtggcactattacctaaaaccaaaagtttgaattctggcgtgctcttgcctgcaccatcccctttcccgtccttcttctgctggatgtgactgtagataaaccctacagctaatcttactccatagacccatatgaacagatgttgagttcttaaaatgaaacaaaaattattttttcttataagaaaattcctttttaaaacaataaatctttaagaaaatatttatgtgataaacatcatgaacaatgatatgccttttcttcttaatccatattttagctaagctgaaagatgatggatgtttaagaaaaaaagcttgtaggggaggtgggagaaaccagactattacataaggttacagagtttaagaaagaatttattgctgggcgaggtggctcatgcctgtaatcccaacactttgggaagccaaggtgggcggatcacgaggtcaggagatcaagaccatcgtggcccccgtctctattaaaaatacaaaaattagctgggcgtggtggcatgcgcctgtaatcccagctactagggaggctgaggcaggagaatcacttgaacccaggtggcagaggttgcagtgagccgaggttgcaccactgccctccagcctggcgacagcaagactccgtctcaaaaaaaaataaaattaaattaaaatttaaaagaatttatctccaaatgaaacatttcagtaacttgtcttcaatgtgttagtttttgacaaccccgtgttctctttttggaaagctttgtartataaatatggaattgtgttttatttcccattttttattttcaggtgtctgcttttggggcagagttttcatcggaggcatgcagagagttaggcttttctagcaacttgctttgcagctcttgtgatcttctcggacagttcaacctgcttcagctggatcctgattgcagaggatgctgtcaggaggaagcacaatttgaaaccaaaaaggtactgttttstagtatattccttccattggatggtttagttgagayaaggtaaaaatgtaagttgcttaatcaatttaagtgtaaaaaagcctctaagcttttacattttttagtaaaactcaactgatttcttgtctggcctattagttcaatcaaagcaaatatgaaggagaagtatggttgcataccaggatcccattccaccatgattgtcaagcaaaggggaagtagaatccctataacatgctttgatcctgtagttctccagtcttcctaacttctggccaaatgaagccaaaaaataataggtgcttttgttcatttatagtaagaacccagtgttggatgaaacttgaaatgaaagtaaagcacataatacctggcacttaattgtctacaataaattgtaacatgaaatstggttaaaaagaatatggactgttagtttacacacctattgctagtaatttgagacacctaacctcacctttaacatctgaaaacagagccaaggataggtagttcagtctctccaggtaaacctactatgttttaaaacctgctgttcaaacaaattaatagtgaacttgctcatcttttaaatattttcatcaaaactcttagatttatttaaattataaagtagactggaaagatcatttgagttrtccagttaaaactaaattggtaagatacctgtgtttgtagtgagaaaaaaatgttagcrtatttctgttgtttccttccagtactgtctttgacttgtacatgctgaattctgtttgaagtattatggtttgtaaagctttcaggcataatgatgtgttattattattggtagtaaaggtttgtttttaacagtaagtrcattttcggagttctaaaagaaaaacaagcaggcaagctttgaaatgttagtattcagccaaaatttaacccttgatttctctgtatctgaacctgaaattccaagtatctcaaaaatggcttgcaaagccttacatgtttttcactttactggttcacatataccagtaaaacattttaatgtttagaagatttctttacatataagttattctttttcttgcatgtaaataaaatctaaacaagtttttaaaacttgattttaaatagatttaagacatacaacttaactagtttagtagaccttttgctgcccctctgttctttttgctgaggtattcacatgggacaaattgctgaataaatctgtatgagccatcctctccttatctttaagctgttctatgggctgtactactactcaaccaacatcctttttcactgaaacaccaaactcagaaggactgaagaacaaggggcattttataataaacagtgtttaccacacacacccccttgtgattagggtaaattgagaggtctgctatttgacaacagatatgccaaaactgtaaaccaaatgcatgtaaaagctatttttacttactgccttttcttagtagttcttcataataccccagttttttggtataattttagtagaaccaaacttgcaccacaaacctctaaaattaattatattyctattcaattttcattattaatggagctatatgttgtatcttgacacatttcagcagttgcagctcagcaataaaagtagatctgccaattaatatatgcccagctaattacaagctggagtgattatcgtatctaagtacaagtaaacctgtcttaatgcatcttttacactgaatccagtgtttttaactttgctcctagcccctaatctctaagatgtactttttattagcattgactagcactctttgcacaaaactggtgaattttttttttttttttagtaagactagtgaaaccaaaacatagcaaaaaacacttaaaaaatattactggaaatataaaagtatggtatgttgggcaatcctcccatttagatgcaaaccacatgcaagtatagaaatagtgctagatttaatctatgcaatattgttctctggatttttggtacatgatcatggataacacaatatatataatatacttttctgtgtcactcaactctggcttaaggcttaatttaaaatcacagtttaatttagttgtcaataaaagtaaaagtctaatatgtagactagtgccttacattaaaaatatttaagtctgggcaacgtggtgaaaccccgtctctacaaaaaatacaaaaattagccaagtgtggtggtttacgcctatagtaccagctactcaggagcctgaggtggaaggatagcttragcctgggaggcagaggttgcastgagctgagatcatgccactgcactccagcctgagcagcagagagagaccctgtctcaaaaaagatacatatatttaaacatagctcwgtgtgtgtggaatcatcgtgagcataaattctttaaaagtcaactcgggtgtgatggctcacccctgtaatcccagcactttgggaggccgaggcgggcagatcacaaggtcaggagatcgagaccatcctggctaatatggtgaaaccccatctctactaaaaatacaaaaaattgctctccccacggtctccgtctccgtctctgtctccgtctccctctccctctccctttccccacggtctccctctccccctccccacggtctccctctccccacggtctccctctccctctctttccacggtctccctctgatgccgagccgaagctggactgtactgctgccatctcggctcactgcaacctccctgcctgattttcctgcctcagcctgccgagtgcctgcgattgcaggcgcgtgccgccacgcctgactggttttcgtatttttttggtggagacggggtttcgctgtgttggccgggctggtctccagctcctaaccgcgagtgatccgccagcctcggcctccagaggtgccgggattgcagacggtgtctggttcactcagtgctcaatggtgcccaggctggagtgcagtggcgtgatctcggctcgctacaacctccacctcccagccgcctgccttggcctcccaaagtgcccagagtgcagcctctgcccagccgccaccccgtctaggaagtgaggagcgtctccgcctggccgcccatcgtctgggatgtgaggagcccctctgcctggctgcccagtctggaaagtgaggagcgtctctgcccggccgccatcccatctaggaagtgaggagcgcctcttcccggccgccatcccatctaggaagtgaggagtgtctctgcccggccgcccatcgtctgagatgtggggagcacctttgccccgccgccccgtgtgggatgtgaggagcgcctctgcccggccgcgaccccatctgggaggtgaggagcgtctctgcccagccgccccatctgagaacggaggagaccctccgcccggcaaccgccccgtctgagaagtgaggagcccctccgcccggcagccgccccgtctgagaagtgaggagcccctctgcccggcagccaccccgtctgggaagtgaggagcgtctccgcccagcagccgccctgtccgggagggaggtgggggtcagcccccgccaggccagccgccccatccgggagggagatgggggggtcagccccccgccaggccagccgccccctctggggagggaggttggggggtcagccccctgcccggccagcccgccccgtccgggagggaggtggggggtcagccccccgcccggccagccgccccgtccgggaggtgagggacgcctctgcccggccgcccctactgggaagtgaggagcccctctgcccggccagccgccccgtccgggagggaggtggggggggtcggccccctgcccggccagccgtcccgtccgggaggtgaggggcgcctctgcccggccgcccctactgggaagtgaggagcccctctgcccggccaccaccccatctgggaggtatgcccaacagctcattgagaacgggccatgatgacaatggtggttttgtggaatagaaagcggggaaaggtggggaaaagattgagaaatcggatggttgccgtgtctgtgtggaaagaagtagacatgggagacttttcattttgttctgtactaagaaaaattcttctgccttgggatcctgttgatctgtgaccttaccccacaaccttgtgctctctgaaacatgtgctgtgtccactcagggttaaatggattaagggcggtgcaagatgtgctttgttaaacagatgcttgaaggcggcatgctccttaagagtcatcaccactccctaatctcaagtacccagggacacaaacactgcggaaggcctcagggtcctctgcctaggaaaaccagagacctttgttcacttgtttatctgctgaccttccctccactattgtcctatgaccctgccaaatccccctctgtgagaaacacccaagaatgatcaataaaaataaaaatgaaaattaaaaaaaacaaacaaacaaaaaaaaaatacaaaaaattagctgggtgtggtggcacacacctgtagtcccagctacttgggaggctgaggcaggagaatcgcttgaacccgtgaagcagaggttgctgtgagccgagatcgcaccactgcactccaacctgggcgacagagcaagattctgtctcaaaaaaaaaaaaaaaaaaagaagaagagaaagtcagagtttatatagaatgctttagctatttgtacataataaaaaaatgttaccaggacattcatttttggttcttaattagttggatgctttatataggtctatctaaggatgagactcatttttagtaatggtcactttttcaacaaactgaatttagactttgatagccagaggcataaaatttttgttagaaattattcccaaaraagcagaaaatgtctttgaaaccccttgtcattctgctgattgatattccactatttttatttggtctccctcccttccagttttgatcataaaagacctactcagcgtctcaaatacaagctagaatgagatttttgatcagttattttactactgttttaaatggctttgctcacaacccgggtataatttacagacattattggtaaggatgttgacttattgtaaaaatcataactaatttgtagctygaagaaaatgtaaactaatgaaacaaaacgtacttaaattttagtactgtttttgtacagttagtatttactaaggaatataagtgacttcagctttatatattgaatctttagaagggtaaagatacccagtccagttgagtataactcttcccattgatcttgtttatgaacttccttgtccaaccattttagctggtttaaggaaagtagttaatcttttgactcatggactccacagttgagcagcaacctgggaggaaggagcagctaaaaattggagactgacaggctcttgcagcctcttttttgctttggcatattctttgtctcactactgactggctttcaaaaaatttttttgaaatttttgacaaggattgttgtttgtcctagttggatcactaaccacttattagctagggttgtggaataatgcaagaacctgttagctgcatagtagctatgtagaatggtgtattggaaagcagacagatgaagcagttctcaggtaaagagcagagctaggtactaggtaagcagtcccctagatattttrtatctttattcctcaattactagagtaaaccacttctactttagatgatttagaagatttagctcagcttcccatcttcttagacttctccccaaccttacacaccaccagtatcactcccaggttatgttagctacacttttgtattcccaaaacacttagggatactttgatttacactatattatatctattgttttgcttttctttctctcccaaaaaataatgctgttggatttttttccacccctccctgcaccaagacggagtttcactcttgttgcccaggctggagtgcaatggtgccatctcggctcaccgcaacctccaccttctgggttcaagagattctcctgcctcagcctcccacccgccaccacgcccagctaattttttgtatttttagtagagacagggttccatcatgttggccaggctggtctcaaactcctgacctcaggtgatccacccaactcggcctcccaaagtgctagaattacaggcgtgagccaccgtgcccggcctgctctttgattttttttttaaatgtttatgaatctccagcctttagcacacagtatttcataagttcttgcccttgaataaggctgtttttactaagaacaagttggaaaaggtgatttttttaaaagctatgttgaaaatatacataacttcatagctacttgataaatatctttttcatatatttcacttatatcctgaaatatatttttaaaaactgaaagaataaggaaacttgtctccatgttggcagttagccattggtaacactctttggttataattatctaactacaaatatagatctcccgtttctacattttacttacaaggatgccataagcatcccaaatctatctaaaaagagataatgttaattatttagcacaactttttagtgattccaatttgaccactcaccttaataggtattttttcaaagtatacatgaccatcagattaaaattgtttcctgggattttcttgggatacatataaatattttttctgttagaatttttgaactattcactattttctaagatctgtaagattaagtgtagtattttagtgggttaaataagtgggttatttttctcatctttttataatcttgcaaattctgtgcacttgaacttgcttatggctgctggatgctttttttcattatttccttaatcaaggttcttaataatgatttcagctgctttgagatgttattttagaacttttttttccctaactatatccgcccctccccctccccccctctttgttttgagacaaagttttgctcttgttgcccaggctggagtgcaatggcaggatctcagctcactgcaacctcccaggttcaagcaattctcctgcaggttcaagcgattctcctgcctcagcctcgcaagcagctgggattccaggcacctgccaacacacccggctagtttttgtatttttagtagagatggggtttcaccatgttggacaggctggtctcaaactactgacctcaggtgttccactcccctcggcctcccaaagtgctgggattacaggcgtgagccaccgcgcctggcctatatcccactatttctttagttagtaccttttcttttttagatcttggtttcccaaggtccttgtagtttctttcttcctccttcaaaatattttgatataattggttttagcatttttagtcttttgcatttacacttgccttatttctgaactactattctgaaggtcaagctggtaccaaaccagagcacctctggagataagaattcayttagctgaattgcttatctgtgtgaaataataaacaaattatttcagcctaatttattgttcagttttgattaaaaacaaagaagtttagactaatggttaagatagactatagaaccagactgtctagattcagatattctctgctactcagcgagtgttcttggacaaattacctgattactgtgtgtctgtttttataactataaattggggataattatagttcctgtctcatagggygattatgaggattaaataagttaatatgcatgcactgcttaaaattgtgtctagcatataacaagtagtaggtaaatacttgctgcaggtggcgatgacagcagcagcagtaatagtagtagtagtaatctggtttgctgatgataaaagccagaaagaacagaaaatttggagaactcagaatagcatgataataattgctattgacaaagtagggtaaaagaaaatagatatgaaatataaactatcagatttgccagtgttaaaatttggagcagtatcttttattccactttcaagttcctggattagtcgaatcaagaggaaatatattcttacagaattagtatgaaaatttttactatttataactacttgtatgaaacctaatacagaaataaattatgtcaaacacaatcctactttcaaatttttaagtcctttcaactgacacattttaaaaaggaaaatactacaaattttccactttataaatgtgtgccgttttgatcacttgaaaatgtatgaaagattgcatttggaggaaaaaaggttgtgctaataaaaaatgtctcaagaccaatgttaaagtggagcttaattttctttggtttttttgkttgtttgttgttgttgttgktgttgttgttttagagatagggtttccctctgtcmcccaagctagaatgtagtggtgcagtcatagctyacagcagcctccaactccagggctcaggtgatgcttctgcctcagcctcccaggtagctgggattattgacatgcgtcatcacccccagctaattttctatttttgtagagacaaggtctcaccatgttgcccaaactggtcttgaactcctggcctcaagctatcctctccctgggactcccaagtcactgggattacaagcataaaccaacacacccagttgtccaggtagagctcaattttctatgacaaacctagtcagaaaattgaaggagactcatattttaaagtcagtttagaataaaatatattatttattggtttttactattcagatgacagatcaggaggaaaccatgatatttttaaaattagaagtaacattatagcagaaaataaattgagctatatgtttgtaatataaaaataattatttcataaaaaaacaaagcaagctatcaaacaaatcgcaattatttcaratttttctactaatattcttctcttatttatatgtgtaacctatcacctggtaacagatttcaaaggcttaagaaaaattgggaagagaaaagcttaaaagtaatacttaaaaaaaaaaaaaaaaaacctccaggttgagaagagatttatctgagttttagaacatcttggtccccttcacaaaataccagtagaagcataggctgcagatcaccaaatcatgccattactttttctggcaaataattcagcaggtcagggatttgataaaagccttttgttttcacttaaagatctactttccagataataggaaaataataaaaacacttatcttcaatattaatcttattatactagaattgaataagtggacctaagcagtgtataacataaatttatgaatataattggatgccctccacttcccactcccatttcctagttggaactagactaatttaagtcacctgctttatatagtagcattatcatttttttatatgtattacactctgccttgatatttgcatgcactccaacaggccagagacagtacagaagtaatattaattaacatgtatacctcattagaagcttacctctttctctctttttataagaattgttgagagagtttaattttctatttatttgtttgtttatttatttatttatttatgagacagtcttgctctgtcaccaggctggagtacagtggtgcaatcttggcttactgcaacctctgcctcccggtttcaagcaattccccagcctcagcctcctgagtagctgggactaccggtgtgcaccaccacgcccggctatttttttttttttttttttgtattttagtagagatggggtttcaccatgttggccaggatggtctagacgatctcctgacttcgtgatccacccaccttggcctcccaaagtgctgggattacaggcgtgagccaccataccctagccgagagtttaattttcatctcarcttcttactgactttgtgattgagctagcacattactccaggatcttcaattttgtcataattacattaccttacattagtgtttattttacactggttatacgctaagtgttttacctacattatctatttaatcctcacaacaaccctataatgtaaatactattatccctatttaatagaagaggaaactagggtataatctgcctaccgttaactggcgattagatgccaaaacctggttttatctcaggtctatttgattctagagcccccaggtttttaaacctctgtgctattttaccttttattttgaaaatgttaatagtaagacctgcttcggagttactttaagaagttgaatgagttcaatataaaacactgggctgtctttytgaaggccccttttgccatttgtacttaacaatattaataatagaatttcgttactagtttttatttaaaattaccaaatccttatttytcagtttaccacagactttaatggctcctgtcacttggtgtttttcaagaatatgttcccaaattgggctttatttaaggcccagccagataatattttatataaatcatgtaatttttcttaattcggtaaaagagcatcaaaacatttagttgttttcaatttgcgtggctattgtgtagccagttgcagttactcataagtcagcttaaacagcattatttaagacaatggcaaattttaggcttcaggctgtcagaaagagaatgctactgatgtgtaaaacatagaaggatgaaatggaggttaagctaactgcgtgaaattgtagtcactaaagaaatttcacagttgcttaaaatagcttcacttttgtcgtgtgtctgtaagcatcagtacatggactggtatcttcaaagcaaaaatctaaatgtctttaacatattctaattataatataaaagcattattcacaaagaaggttttttaaaacatatgaataatgtttggcaacagttcacattcaatgtaagaatcactaagactcctgagtagcagtaatamtaaataataacataggccgggggtggtggctcacacctgtaatcccagcactttgggaggcaacgtgccgggggggtggatcatgcggtcaggagatcgagaccatcctggctaacatggtgaaaccccgtctctactaaaaatacaaaagaaattaactgggcatggtggcgggctcctgtaatctcagctactccagaggctgaggcaggagaatcgcttgaacctgggaggcagaggttgcattgaaccgagatcacgccactgcactccatcctgggcaacagagcgagacttcatctctagaaaaaaaaaaaaactaaataataacataaatgtttatttaataataaccactaacattcattaagttgttatctgaaggtactgttccaaccactttaaatgaatttatagaacctcacaacaactcggtaaattccattattatctttatttcgtagttgagtcttaggcatagagatcttacctaagatcatagagtgaattaagtatcaatatatgtttcatgtatttgtataacagaattttaagtttattttatgaagttatttaattgaacccaaaatattatttaaaatttttttatatctgcttttaatatgaaatataaatgcagtcagttcttttacataattacaaattaggatcagattctatctaaacatattacaactttctgccacatttgcagactgcaatgctcaaaacgaaaataaacccttaaagtaattcaaactgccttacaactgcatttcctagacatacccacctcagaatcaaaataaactttccatttatacactaaatatttcttcctgggttaagatcaaagaaaaataagactccttgtcttcaaggagtagaaaaaataggcatggaagccaggtgtggtgactcacacctgtaatcccaccactttgggaggctgaggtaggcagatcacctgaggtcgggagtttgagaccagcctgaccaacatggagaaacyccatctctactaaaaatacaaaattagccaggcgtggtggcacatgcctgtaacctcagctactcgggaggctgaagcaggagaatcgcttgaacccagggggtagaggttgcagtgagctgagatcttgccattgcactccagcctgggcaacaagaatgaaactccatctaaaaaaaaaaaaaagaaaaaataggcatggaagctggactgccagaatactgttgatatgrtattctgtttgttggacgaaaacataatatctaatgttacgaaggtaaccactaaaagaattaaattaaataaaagttggaaggaaaggggaactaagagctcttaaagctggtatctcatgagctatagatacaaccatattaatctttatggaagtgaccaacagaactaaaaacagtttaaatattaatgcgtaggccaggcatgatggctcacgcctgtaatcccatccaacactttggaagacgaaggcgagaggatcacttgaggccaggagtttgagaccagcctgggcaaaatggcaagaccaagacytccatctctacaaaaaattaaaaaaaaaaaaaaagctgggtgtgatgacacacacctgtggtcctagctatttgggaggctgaggctaccggaggatcactcgagcctaggaggtcgaggctayagtgatccatggtcacaccacttcactccagcttgggtaacagagcgagctctgtctccaaattaaaaaagaaaaaaagagttattaagtagagggtagaaggtagaggaaatgtttacttcttattttataacccttttatactttttttattatgtccacatgcattgatttttttaaaagaattcaatgagatatgtgctataaacaaaacatacatgtatgcaatgaaagctcttagaaggagggcataaccacttggcaggtcaggtaaatatcaccacttgcttatgtaggagttaatgcttatagtaagtaggcaaatggttgagagaaggccttttctctcgcaaaaggaaaagttagtggaaaggcacagaggcatgagagtatggccatctaagataaatcagatagctgggttatgatgagagaagatgatgattaggtaagcaggggccaaataatagagggccttatataccttcataagaagttgaactttattctgtatgcaggggacaaaattaaaggattataaagagtaaactggtatcagatttgtattttaataacttttgttggtgtgaacaatagttgataaggcrgaggggaatacttatgccagaaaaatagtttgccgttttccagaggcaagatacaagggcttaaaccaacacattggctgtgaaaatgaaaaaggacagatttgaaatcaatttaggcaataaatttatttatttggatttattagactgaattggagagaaaaggggtaagtggggatgcttcccagtgttcttgctggagaaactggtaaccctaacacaggagagagaccagctagttacaagatggcccattaaggcaataatggatgggagaaggggcagcaacagaataacttttaataaagcataccccttagstgtaaatagtttttttgttgttgttgttttgtttgtttgtttttgagatggagtcttgctctgtcgcccagactggagtgcagtgacgcgatctcagctcactactacctccacctcctaggttcaagtgattctcctgtctcagcctccccagtggctgggattacaggcatgtgccaccacacccagctgattttcatatttttagtagaaacagggtttcaccatcttggccaggcttgtcttgaactcctgacctcatgatccacccagctccgcctcccaaaatgctgggattacagacctgagccaccgcgcccagccaacagttttatttttgaagaaaaawttattttgaagaaaaccttttttcttcaaaaaagttttaatttaaaaggccatgaattttatttggctgccataatgaattctaaaatagtatattgacagagtaaagcaaaaattttaaatgtgtggaatggcctcgtttcttttttttctagttttatattgctgctcttaaattttgtataatattgaaactcttggattattatagctttatttttgtatctttttaaagttcaaatgtattaggtgattactatctatagggagataccayaatttaatttgttttagtagctttgtttcttattgttttcagatatttataatctttcttaaagatgatcataactggccaggcacgcctgtaatcctagcactttgggaggccaaggcgggtggatcacctgaggtcaggatttcaagactagcctggccaacatggcaaaaatacaaaaattagccaggcgtggtggcgcacgcctgtaatcccagctacttgggaggctaaggaaggagaatcgcttgaacctgggaggtgggggttgcagtgagccgagatcgcaccactgcactctagcttgcgcaatgggagcgagactccgtctcaaaaaaatatatatatgttgatcataactattctttttatgacaaatagtggttgttcagtattggagggataatatcagcagtgatgcaaagaaattatttcttctgccagggcacggtggctcacacctgtaatcctaacacttcgggagaacaaggcaggaagatcactttgtccaggagtttgagaccaacctgggcaacatagcaagaccccatctctacaaaaatttttaaaaaaaagatttcttctgaaaggcatccttgcttccatatattattaggaccttcattttcagttttccattttctaaaatacttttagtattaccaaggggctagttggtttcatttaaaaacacttactatggtattcaagctttgagtctgttttggttttgttgttttttttttttttgagatggagtctcactctgttgcccaggctggaggaatgtagtggggtgatctcagctcactgcaacctccacctcccaggtccaagtgattctcccacctcagcctgcccagtagctgggattacaggcacccgccatcatgcctggctaatttttgtatttttatggagacagggtttcaccatgttggccaggctggtctggaactcctgacctcaggtgatcagcccacctcggcctcccaaagtgctgggattacaagtgtgagccaccgcgcctggcckctttgagtcatttttaccaattctttggatattggatctcagaaaatatagtggtcacattctcacttcctcaagttactttttttttcatcatgtgatatttcctaagtattggcagaactgaatgcactgttcccaagtgatgaccctggatcattcatacttgtagctaaagtatacataggggtggggactggggatgtattttttttcctaatgagagtctcatcattacagtcttaccccttattttaggtgtatatgtaaattctataggtgtatatagaactcctgtttgtcatcacagtattgaaagaaacctaatccttttttctttcaggtttcatagttagaatggtctaacctagaatgcactgatatcattttcatttttaggggtttttttgtatattttcattgagctttttagttcaacattgtatctttatggaaagattcctccaatgtattcttagcatctgtagagcctagtttaaatcaaggtagatgttacttgcttgtttyataacttttcttctcagtttcaaggcagaaactaaagatacaaaaaggaataacactttaatggtatagtaaaataagttttaaacttagtgagtttccttaggcataaactcattgctttgtattttttcagaatttagtaaaaagcactccaagatgagtagtaatttaatctcagatatagtattggagaattatatttgccagctttgtttgttaaaattayaacgctgattttttttcccctaatcctcagtattcatccattgtttctaagcaagaatgccatcactcaaagtgagtatgaaagtgtcattaatcagaaagtatggggaagacttgaagatgaacagcaaatttaaaacaccagtagatcactaaacatggtttaggtgataatattttccctgagaattcgctgaccaaattttgctaaaaatagtttctgtgtgatgtatttttctgctgtatgaaaggaataaagttgattttttaaaattatactggatattattagtgtttggaaaagtgactcatttatatttgagtgtatcataattgatttttcattggaatrtctaaataatacagtgctcagcttttatcatactatagccatgcttccttattttaaaatcccttcattttatttaaaggcaaaccttcaatagacctataaaatacagttattcctcagatatgaattctcttcagcagtaaaaatttttgcttttgttcacctaacagcattttcttcatattgctacatagcatttataattattatgctaatggttatattaacttggtttgaaaaacttcttttaatataaacaaaactagcactttaggaggataaaaaccaagtttaattacaggttttaaaatatcttagtttttttctgttggtactgtggaattgctttaatactaacctttcgattttaaataaaatagtttccaaaatgagaatctatagctacaagcagtacctcataaggaaagggaaaaaaaaaaaagtactgtaacatttgtcttgcttcagtcgatgtttatggtttaccttttcagattaatgcagttaatctgttgaacaaaragcctactgttttaccattttgcaatttttgccctattaatataacatagtataaggcagtattcctcatccctgcctgcccattacaatcatttgagtagtaattaaaaatactgatgcatggatctcacccytagatatcctaatttagtttatctggggtaggttttagggatcagtaatgttcaaaatatttccaggtgattctagtgtactgtcagggttgagaactcygctctaaggtagtttgaatttgaaagcttgagaaaatttggagtggccattttcattacagacgaacaatgagtaatatccctgaatagtccctgaactgaaaattctattaagtagacatgataatggcctcacgtacacaacttgaacttaaccaatactgtggaagtattaatcttataataaaagatgttatatattgagcatctaaaaaatccaggcttttcactttttttggtgacttcttatagcaattctggaagtaaataacccttttgttgagacagtaaactgaagctcagtgaatgacttacccaagggggcatactgcttgtaagtggcagagccagaactggaccacatacaactttgatttgacagcttggactcttttcactataccatgccgtatgaaaatttgatatttagtttgactcaacttaaataattagtttatcaaggttttcttaaggtcatgtttctttagagccgtggttattgttaccaacaaaaatactttaagtgcttcgtattggaaagtagagtatttctgacttggacaggtttataaatgtgtaatggtgctggtggtggtggtagtggtatgatgatggcacaagagttaacaaatactgcactttttaaaaaattcagaaaatgtgtgtaattctcaagtgtcayctttgttcagtgttataaatgaacttattttggaatctagctatctggtgagaaacagcatagaccagctttttgaacatttttgtggcaactagttggaccttaattataacaaagatagctacaaaaatagtgtggcctttttctacatgtgaaacctcacttaaccccttactaatctcagtacagtttgagtagctsttatctggaattattgggactagaagtgttttggatttcagatttttttcagatttgagatgctcaacctgtagtacctgtagtagttaaaatatttaaactgggaaaacatcaactaaccacaaagctggaatttatccgaagactaatgaataaaaatcacctttttaaatgggaaattcgcatattttaaaatcctgttacaactaaggcacattagtgatagagctgaggtagttagatatttctacttcccccacccagagaaccatatcagaagtttagaaaaatctgacggtcataagttacatggaaatagagactccaaagggaaaagatgcagtttgtgtatcgttctcatattttcctaatgatttcttacatttccctagtcctaatacaataatgggctagagttagattgtctgtacaagtaagactcctctaattcgtayttttaaaaaggcctaccaacttgctgttagaagttatatgactttcttctttgatttttctcttgtaatggtatttttccctaaatgtttgaagattaaaaattttgtatgctagtcactttaaaaagtaaaaatactgaggttggaacttggttaaatcagggaattaactttatttgtcatttctttatgcactagagaatttctactatttataagtagcatatatttcattgtgtgtgaatttgtatgtagtgccaaagatacttaggattatatggcattttaaatttactacaatctgtagttaagttatttattcgccatgaaaaacaaatattttccagtgaacaccacaaatcatatatatatatgtgtgtgcgtgtatatatatgtgtgtgwrtgtgtgtgtgtgtgtgtgtgtgtgtgtgtgtgtatgtatgtgcgcccgctaacaacacagattaatgcttttagagtttgacttttaataatgctctgcaactttgagttccatccattttcttttgtttaccctggactggaactactctacaaactttgtcaaaggaacttgaaatatttttgaagttttgtcatgaaaaaagaggcatttaattttgttatatgaatagttctctcccttcggcacacctatattgagaagctttgtgtctgattctgggggaaattaagacatttcctgtctgctgtcaagttacaggctatttgatgcacattatgatgagaacaaagttctgtgaaagtttactaggaaaatccttacctgagacgaggaaatcaacaaaagtttttttgaaaaaggtcacatctgagctgcctgctcattaaaggatatgtttctaatatttttggttaatcagttgatattttgtggtgcagagacaagcttcccatgagtgggttatgggtgtggtaagatactgagtccttgagcccttgagacaaccaagtggggcctgaggtaagcagggctcccaggctagtcttgcccatttaaaagctgcttcatccttttactgcagtgctccgtacaatcattatcatttcccacatgtatcatgatataaagaaacagtggtatagagaaatattattaggtaaggtagtggaatctccaccaagagtttctaaaggcttataaacaaaagataaatctaataaccaaatctaaatatggccttawatgcttttaattatagtaaaatgtacactattcactattttaactatacactatgtatgtacactatacactatttagtgtacgtacactatacactagtgtacatacactatacactatttagtgtaaaatatacactaaaattcactattttaaccatttttaagtgtagagtgctatggcattaagtacattcgcattgttgtacaactgtgttaaccatctttctccggagtcttcccaaactgaaacttacacccatgaaacaataactccctattccttgcccccactgacaactaccattgtgaatttttggctactctagttacctcatttaaacatttgtccttttgtgactgccttatttcacttagcaagatgtcattaatgttgtaataagattcgtttatattgtaatatgtgtccgaattttttttttttttttttgagacaagtctcgctcttgtcccccaggtttgagtgcagtagctttatctcagctcactgcaacctctgcttcctgggttcaaacaattctcctgcctctgcctcccaagcagctgggattaaggcgcctgccaccacacccagcyaatttttgtattttttagtagagacagggtttcaccatgttggccaggctggtctcgaactcctgacctcagatgatccgcccacctcggcgtcccaaagtgctggaattacaggcgtgagccactgcacccagtcagaatctgcttccttttaaaagctggataatgctctgttgtatgtatataccatattttgtttttccattcatctgttaatgaacacatgagttttttcccaccttttggctattgtgaataatgttgctgtgaacatgggtgtataaatatctgtttgaggccttgctttcacttcttttgagtatatacccagaagtagaattgcagatcatatggtaattctatttttaattttttgmaaaactgcaattccattttctgtagccactggaccacttctcattcccaacagcagtgtacaagggttccaatttctccacatcctcatctcttttttttttttttttaataatagctatcccagtgatgtgaagtgggatctcattgtggttttgatatgcatttccctaatctctagtaatattgaccatcccttcattagcttattggtaatatggccttatatttttcaagattttttttctggagttgtctaaccaagattagccatatctttttgaaaagcaacttattgcataaaattaagttaacctattctttctttctttcttttttttttttttttttttttttgagacagagtcttgctctgctgccaggctggagtgcagtggcgtgatctcggstcactgcaaccttcggctcactgcaacctccgcctcctgggttcaagcaattcttctgcctcagccccacgagtagctgggattacaggcatgcgccaccacgcccagctaatttttgtatttttagtagtgacggggtttcaccatgttggccaggatggtctctatctcttgacctcgtgatccgcccacctcagcctccctaagagcggcaattacaggcatgagccaccatgcctggccaaattaacctattcttaaagttttattgctgcagtgacccttagagatcatcagaattcttaatctgaaatccatcattggtttcagagtccatgaacagcctgcattaaagcgaaattctatcagattctcagaagggtcagtgactccccaaaaacgtaagaattgatccagcccaaagtcatcaaactgttaagaatcattgtctttttaggtcacattaaggtagttttttaatcactactttatgsctttctgtattttccaaactattttaaataaacatgcatagggcatgtgttgttgttgttgttgttgtttttaattaagtaaatgctgttttagaacctgaaaaaataaagtccatctttcttgaacctccataaaaaacaaatctaaaaaccaagaagaaatgaaatggatatgatacgttcttaaaattgccagccttctcttatggtcacagcatttccaagtatattcctgccctataaaaagaatagtcaggctctgcaactacaaaaaaagtggtgtttaccattgaatccatttcagctgaattcattgcaataaaatatttgcatttgagttttttataatgagcttttactataaagagaatgtgcaggttctatagctagaaaagagatacttaccattgaatccatttcagctaaatttcattaaaggaaaatatttgcatttgagttctttataatgagattttactgcttttcttataatatctccacatagtactttctataacgattgttttaattttaaaactttgatcacttaatattaaaagccaccagaaagaatttttattaagtaactatcttggatagatgatatatacctatattcagtttatcaccctaaaaaaaaggtaggaaacctttaatattttgtagmgcttcctaggacatcttacctatttaaagtttattgtcaaatctccttatctccttcggtctttttggctaggtttaagaataattgaagtaggttggaagtttctctaccatttattatacttgggcctccatcttctcttccattagactggaactacatggtcctgtctggctaaccagctttgacatttctttgatctatatatctgctaactgtaatgtttatactgtgaaaatttatatttattttataagtacatttttaatttataccagttttttaaattcctgtttttccttttgtagctgtatgcaggagctattcttgaagtttgtggatgaaaattgggaaggttccctcaagtccaaggtatataaaatttactccagtaaactgttcagtcatttaaaatcaacattttatgtgaatcgttttcactatatattcccaggaataagaatttttaggattatactttcttaacaatatatgcttttttttcratttgttttcatggaagtggtttgttaaagtaattggtgaatgctatgttactttaaaaaaaacacaatatatgaaatttagaggccaggcgtggtgggtcacactcagctcatgcctgtaatcccagcactttgggaggccaaggtgggtggatcacgaggtcaggagttcgagaccagcctggccaagatggtgaaaccccatctctactaaaaatacaaaaattagctgggcgcggtggcgggtgcctataatcccagctactcgggaggcggaggcgggagaatcacttgaacccgggaggcagaggttgcagtgagccgagatcacgccactgcactccagcctgggcgacagaacgagactctgtctcaaaaaaaaaaaaaagaaattcagatttaaaatacaacacatgaaggggttattttcttaaaagaagagcctttcctttgccgggtgggaattttgcaggagcctttccaagatgtaagtgtaatttctttaagtagcacaccgctgtagtttattttaaatgtgaattgatttatgtggaacaattgcattaagagtagacctgtacaaaataacaaatcaccaaggaaagaagtaattgccaaagaatttgaaatmcaaaagagagaaagtcatatgtatatatcttcacagggaattttgggtaaacatgttaaaggataattgtgaaggtatattctttgrgttgacatccaatagtaatgaggagctttgcattgccaagaaaggcttgaactaaggcttttgtcttgcatgtcactttgaaaatcagttttatgaaactgaacttgtctgaaggtaataacgctttctctcttttttttaactgaaatacataagtattcaatttacatacctcattctacctcgatttttgctgacattcccgtgatttcttgccttatttagttaatggcaagagaattttttggatttaatattttataacattgcctgtattagcacatgctttttattgctgacctagaattgtttataataaaatattgatcatttggcacagaaatgtaatatagtagtttgacttgggatacttaatgaggcccaaagcagatacatatctaatcaaaaacagtctttgttagaataacacattctgatgtagcaaagaagatatttacttttgcttgggaaaaaaatttcttactctgatttatttatttatttattttgcctcaaacacttaaactcagaattgtaccacagttgttttggcttttttatatccattctctgaatgatagtgtgagcattcttatttctagaaagttttagcaattgatttttagctgcattgattatttatacttacttgttttattaaaaacaacattttataacttagattttcatgagaatcaagagtagcttagatactgtgattggccttcctagttatgatatcagattttattatctaccgtaatatatatttcttatgtaaattatcaaaccttgggtatatatatcatactgtcttttccttttgaaaacaattgaattttaatgctttgtgtaaatatttaattatctacttgcttaaaataaaaattattaattccataatgtgtaactgtatttaatattgttatgtataataccagtattttctgagcccrtgaaaagttgttataattgtgataaaaccattattaaattcccaccctcagaatttccatcttaaagatattctgaaatagaacatggagagttgttgatttatacagtaattacaaataccaaactaactttcatgtcttcactgcttcatattcttttctctctttttttttgagacagagtctcactgtcgcccacactggagtgcagtggcgcaayttcagctcaccgcaacctctgcctcccaggttcaagtgattctcctgcctcagtctcctgagtagctgggactacaggcgcacgccaccacacccagctaatttatttttatttttagtagaggcggggttttgccatgttggccaggctggtctcgaactcctgacatcaggtgatccgcctgccttggcctcccaatgctgggattacaggcatgagccaccacacccagccactgcttcatattctttatcttcaacatcaagtagcttctgggattatcatgataacctacattatactctagcttataatacattgtcagtttttaaggtcacttaatttaaattaaccatttcatgaaacaagagtaaattaatgttaaattatttcaggaggaaggatttaaattttggtatgttttacctayattaaaccactcacagttgtgtaaaaaaaaatctcagatcatatttcttagtcaattccaaatatgccttctaaaatacctttttttccttattctagttgtttaaatatagaaggctgtctataataatttctcatagtagattttgtctagtattctgtcacttcacttgtgacatcctaagtaatcatgttttttttctctcgcttgagtcttctgtgttaagaatgtggctgtctctcagaaagtaatgtggtttgtccctaattttgtatgggcttggcaaactttctataaaggactagatagtaaaagttttcagctttataggcaccatgggctctgtcataactatcgaactctgctattatagcatggaagcagccatagacagttcttaaacgaatgcacgtcactgtgttcctgtagaactttattaaaaaaagcaagcaggacagatttggcccgtgggcctccgtttggcaacctctgtattagaatcataaacgttcagacgcaaaaaggagttttgaaataatgtagtacaaattgagcatcctcataattcaaaaatcttaaatctagaatgctccgaagtctgaaactttaaaaatactgcataaaattaccttcaggctttatgtataaggtatatatgaaacataagtgaatttcaggtttatatttgggtcctatccccaagatatgtcattctatgtatgcaagtatttccaaatccaaaaaataaaacatttatggtcccatgcatttcagttaaggatactcaacctgctgctcatgccaactatgattgattggtagacatgcttaaggttacagtgcttcattggagttttgttggaaagaatactgatccattagcattatcttcattgattttcttgtttataaaatgggttacagatgaggtataataggttaaatatctaccttatagggctgttctgaggattaatgagataacatgtaagtcacttagtatgtgtctggcaccaccaaaaacagagtaaatcattccataattctataaatatttattgatgcttactgtatgamaatcactattccagtaatgaagatgttaaatggtaagtattgttattgtatcttatatttgctccttggttaataataagtttcaattatgaaccatcaaacatttatatactcatatattggccatctttaaaaaacattcaagtcaatatgtattataactgcagcctttctcatatgcaatattctgaatattgacctctagccatttttcaaagtaccctaatagggcttctctttctactgttttacctcctgactactaaatcttacttggccctagcctttgaaactgtcttcacttgtgtgacttcattatctcctagctttctgctacttytaacatttctttctcttctgttctggcatctcttctactgcctgcacttcaaacgttgttgttagtcagggtctattatcttgagattttcttctcttctgactctaccgaatggtgtcccactccctcagtttcaattacagtacttatctgatgactmccaatctatatctttacataaagttttgttagaaattgtatttcttatatttttttacttccatgggacatttccatttagatgatttcataggtaccttaaaccaatatacatataagaatcacctggagatcttcttaaaatacagagtayaattctataaatttgggatgggtcctgagagtctatatttcttacagtcctacagactgtggtccacatttttaatacaaaggctttaaacacagcatgtccaaaaactgtattaatcctcttctctgttaaaagtataccatcttccctgtttctataaatggcattatgatcaggcaaaggcataagcatgaaacacaagaatcatgattgatctttcacacgttatatccagttagtcaccatgttgtgtctcttctccctcagtaataaccttcatagtccctttctcttttctgtattttcaatcaggaccttaacatctttatccaaaaggattaggtacttgttatctagtctgcctcttttcccttttcttacttcattacctcttcaacacaacaaccaaaagagacccttctcataaaacaaatctgattgtgtctctctcttgcttaaaatcctttatagttctctgtcacatacaaaatcaaatacaagacccgccatgacatggtttctcttctagattcacatctctagtttatgcaaaactatgtgcaactctctgagctctgacttctgtgtgtttgcacacactgaatattcttgctaacttgtgctgcttcctaattcttgtggcaaattccagttcattcaaaatttagctccagcattgtttttgggtggtgtttaaacagtgttttacttttctctttatgttccataacacctcctacataagattatatttggcgtactggtcttttgcctctatcaaactagaagtctttagaactcaaagtttgtgttctgttttttgttttttaatcattgatatacccaaaatctatgtaacattgcacctggtattaagaggaattgaaatatttatggaatgaatgcactgatttattaaatttatctaattcaagggatgcccccacttttgacaagtgagaatctggtgaaaagcctgtgtttccatttgttatatgcccttgatgaatttacaggattcaaacgtttataaaaagttctcatcttttcctaaaagtcataattttttagtttgtcttgtcttcattttgtacctccagtcttcctacattctcttaagttgcccttctctgttttcaagtgcttctaaattgtcctaatgggatgacacaattttgcagtccagatgtatataatagtaaattttcttttcttttttgtttttttttttcgagacggagtctcactttgtctcccaggctggagtgcagtggcgtgatctcggctcactgcaacctccacctcccaggttccagcaattctcctgcctcagcctcccaagtagctgggattacaggcatgcgccaccacacccagctaacttttttgtgtgtgtattttggtagagatggagtttcaccatgttggccatgctggtctggaactcctgacctcgggtgatctgcccatcttggcctcccagagtgctggcattacaggcatgagccaccatgcccagccaattttctgttttagaaatacttttttgattactgaatagcttttgttgaacacagttgagaattaggttgtctattgttgccattctctatattgatgtttctggatatggtatgacattgttatttagagtatgttctaattcaaatatacttatttctaatcaacaggattatattttgtccgagtatattttgtctcttttttcatttatattttcacgtgtttgtgattttgaaaataacataattcaaacatttttctttaacctcagaacatatacttctttgttatccccccatttccacatataccctctttctagaacaaggaggaggacagatgtgggtttgggttttggggttttttttttaatactccttaatactttttwaaaaaatactcctttttaatactccttaaagttagctctaaatcccttgacattctgagcagtgtgtatagcaaaacttagctcttctagggggcagcatgaatgacttgctaagtcctaagggaaaaactgaaacatttaatctgtctttaaatcacttctgtttgtttgatcactctgagtgttatttacaaaattgcctttattagtgacaaataattaaattgacataggaacattttctggaaattagagtgattggattttctttagaaatctccaaattggtggctgggcaaggtggcttacgcctgtattcccaccacttygggaggccgaggcaggcagatcacgaggtcaggcgttcgagaccagcctgactagcatggtgaaaccccgtctctactaaatatacaaaaaaaaaaaattagcagggaatcattatttgatttttttattgtgtgacccacatagtatgacaccwtttctttagtctttttttttttaagctttcattgaacacatttgagaatttggaattttttgctttctgcccataatggtagagaagaaaattgagagaaacgcttctaatgattaaatggatcagaaaatgaatgcaaagagataaaataacactttagacctggagtgaccaactagccaaacatggctgttttaaataattttttttttttttttttgagacggagtttcactcctgttgttcaggctggagtgcgacagcgcaatcttggctcaccacaacttccaccttctgggttcaagtgattttcctacctcagcctcccaagtagctgggattacaggcatgcaccaccacgcccagctaattttttgtattttttgtagagatggggtttctccatggtggtcaggctggtctcgaactctcgacctcaggtgatctgcctgcctcagcctcccaaagtgctggaattataggcatgagccaccgtgcccagcctaattttttaaaattatataaaactaaacattcagttccttagacacactagctacatttcagatggtcagtaaccaccataccaaaaagaacagatgaagaatatttcctttatctcagaaagttctattagaaagtcctattctagactctaatgatggtaaaattgatcatatgagcagaagctcagactctgaaacctcatttgacaatatcctgaatgaattttctcagaaatcaagagtgagtaaacaatatattaccaaggtcagaaaggaaataatagtattgtttgttttgttttgtttctttgagacggagtctcgctgtgttgtccaggctggagtgcagtggcgggatctcggctcactgcaacctctgcctcccaggttcaaacaatcctcctaccttagtctcccaagtagctgggaatacaggcatgcaccaccgtgcctggataatttattttttattttatttatttatttatttattttagacggagtcacactgtcgcccaggctggagygcagtggcgcttgcagtgattttggctcactgcaagctccgcctcccaggttcacgccattctcctgcctcagcctccggagtagccgcgctacaggcgcctgccaccacgccagctaattttttgtatttttagtagagacggggtttcaccgtgttagccaggatggtctcaatctcctgacctcgtgatcctcccacctcggcctcccaaagtgctgggattacaggcgtgagctaccacgccgggcccgtgcctggctaatttttgtattgagacggggtttccaccatgttggccaggctggtctgtaactcgacctcaggtgatctgcccgcattcgtggctcacggctataatcccagcactttggaaggccgaggcgggtggatcacctgaggttgggaattcgacaccagcctgaccaacatggagaaacctcgtctttactaaaaatacaaaaaaaaaaaaaaaacattagctgggcgttgtggcgcatgcctgtaatcccagctgctcgggaggctgaggcaggagaatcgcctgaacccgagaggcggaggttgcggtgagccaagatcgtgcaattgcattccagcctgggcaacaagagcgaaactatgcctcaaataaaaaacaaaacaaaacaaaaaaagagccagagtaaaaagttacagcctattagaaatgtatttggaatctggaatcagtatttacagcttggctgtgttcccatttcatgmatgatagtcaatgagcagttagttgcattcaaagcacattgctcattttggttatatttaccttcaaaatcaggaaaatacggaataaatatttgcgtttatgtggttaatactcactaaacttttgaatagatttgtttttcactatccctttcttttgtaaaattattcataaaatcatttaaaaatacaaaaataaacagagttcactgaacccagatggtaaatggtggtgatgactattttttcttgtataccgaaagttattaatagaatattccagctgccctcctccagaatcttttaaaagaaaaaaaaaagtctctttaaggttgccataagctccattatttcttttcttggactttatttgctatttgcatatttaatgactcatgcagctatagagcacatgaggtgattacaatgtgatcaagtcagaagaatacaacaaataatattatgtattcaaataccaatctttttatacaattttaaaattcaccatcgttattttgcttataatttgtaaaacatcttgagtttttttctcattcataaatgagccatgatgtatgtttacattgagaaattaaatacagtggtaggtttagtaataaaatagaggccaaaatctttgaacttgaggaactgtagtttttcctgactggctgaagatccaccagcacagttgcctttcttagcatacatttttattatacttyttcagtttactttcttcagtaaaacatttgaagttgactttggggctattttgactattaagaaatatcaaattttaggagtattttgaagtagtaagagaaaattcttttgaatcctttagwattatgtcaaaagaaggactgttttatgttcaagtgaacataaattctcagttcttattttgtttcttgtttctttatgactctaacatactaagatctccttgctctgaacttagagtacttattgtcaattgttaaattaacgacattgtttttattatcaccttatctttttatttgttgcagatctgtttaagcagactgtagatgtattgacattaaagaactcagtttcctcatattctcatgtagcttatcgaatgccatgtgtatataatgagtactcaaatatttgttaaaagatttatttactgcctgtaaaatgtgatttgctgctacaaggtatttaacagatattcaaaattaggaagctatggatctacgtttagcagagagagaaaaggaaagaactgatgaaaaatagtaattagtgactcatcttagtattccttttaaatttgttcacttattgcagtctgttaaaaaaaaaaaatctttttactggccgggcacagtggctcacgcctgtaatcccagcactttgggaggccgaggtgggcagatcacgaggtcaggagattgagaccatcctggctaacrcggtgaaaccccgtctctactaaaaataaaaaaaaattagctgtgcgtggtggcgggtgcctgtagtcccagctgctgggkaggctgaggcaggrgaatggcgtgaacccaggaaggcggagcttgcagtgcgccgagatcgcgccactgcactccagcctgggcgacagagcaagactccgtctcaaaaaaaaaaaatattttaataagtgaactatttattaagtatgctaagctctgttatggatccaaaaatatatgtataaaaatagtccttttaccagaaggtttcgtatgtagtagagaaggcatgtagacacagttactgcgtgttacatagtattttgcacagacatgcaaatagcatttgccagaggaacagcataaaaggcaataaaaatcataagatcatttttgtttggggattcaggagtttgcagaatatctggaaaaatcctaaaggataaagttaatagaaatgatgttttaataagccagaatagcataattggtttcattttgaaataaattttgtaggggaggattaggtgagatatttgagtcaaatgtgtgaagacgttcacaatgaagcaaatctatagtgctattgctatctaattctaaagtaaaaataagttctcaaaagcatgtgtgtcactataaaatctaagatgagaattatgcaaatgatcaataactggtattaacgatcaagtatctaaatgaaacaattgtttttattttagaaaaatgtattacagtggctcacgcctataatcccagcactttgggaggccaaggcaggcggatcacaaggtcaggagatcgagaccatcctggctaacatggtgaaaccccatctctactaaaaataaaaaaattagccaggtgtggtggcacgtgtctgtagtcmctgctgcttgggaggctgaggcaggagaatcacttgaacccgggaagcagaggttgcagtgagccgagattgcgccactgcactccagcctgggcaagaccgaggctgaccccgcgctcagccragtgagaccccgtctcaaaaaaagaaagaaagaaagaaagaaaagaaaagaaagaaagaaggaaggaaggaaggaaagaagaaagaaagatgtattacacaccttttaatttgaattaattaggcatgatcattattgaaaattggtaaagtatagattgataacaaccaaaacgggaaaatattcatttaaaactttcccaaataaatgccccatgtataggcctctattaaaataataacagtaaacattttttgaaccactttatatattttaagatttgtttagagctttttcatttgcacgggaaaatattcgcctttttaaaacaacagtaggaaacaaattgaaaaagaaaggaaaaatccttgctttttacacataaaagttttctttgtcactaaatatagatcataatttttcaatgattatgtggtacatattaatttgtttaaccaatatcgttttacacatttagattatttccaaattttcagacttggtttarcgagactttttataagttatttcctcagaataaagtcytagaagtgtacttgcaggtttacaaagtacgtacattttaagactcttggttgattttgctaaatacccttcaggaaggatgtgcctatttatattcctcccatagctcattcccagcaaaatccctgtccctgttccctctctaacctttagtattctttgtaatctttgtaattccgaatgtgagtacctcattgttatggcatttcttcaattatatgtgaagttgaacatttatttcaaatgtttattgaccatttgtatatttgtacatattgctatacatagtgttttttcttaattatttgtaagagcccttttatatattagatgttagagataattttcttcagtttatcatttttatttttaatttgcttatggtggtgttttgctgtcctgatgtttccatttttacataggcgtatctataaaacatttccttttgggtcatgcttaggagtagatttttgtgttccatatttatgtaagttctctgtgctgtaggctttggtagtatttttaacctctcctttttagcagttatcatgactcattagttctgtgattttttttttctataaacagtttggcacctttctcagaagtgtttattgagtaactcatacacactgccagacaaacatatatctctttttccctctccccttcccctctccctctctctgatttgatagctttagcacattaaaaaattcttacagacatttttatctcttttaatttcctattctattcttttatctgttctggtatcagtatcacatagtatattaataacaatggaacaaattctctctccatatctttttaaaaactgccctgactattcttacacattactcttaaaattgagctgtactgtctatcacttttgtcaaaccttaaaatcctattggaatttgggatttctattaatttgaaacaattagtgtcttaaaatattggagaatatggtatgtctctccatttatccacagatgtttaaattttcttagttttttcatataggatataatgtttgatttgttgtttatttccacttttatattaatctttttagctagcttggatttggaagtgaactactgaatctttttttctttttttataagcttttgttaggagtgataaacccaaactgttcagaggactgcaaatcaaggtaaggtgattgtagtggagatctcttttttccagccttaatttctttattttataattaaagtaaatatttgaataaatggtttcccccataaacatgtgcaaatattatgtatcaatttaaatttttaatttcactgaaaaataatttttttaaattaatagactttatttttttagagcacttttaggtttatgaaaatttgaatgcaaaggaaagagtattcccatatactccctggcccccacccccaccctcagttttcctgttgtaacatcttgcattggtgtggtacatttgttacaattgatgaatcaatattgatatattaattaaatttaatagttcgcattagcattcattctttgtgttgtataattataggagttttgccaaatgcataatattacrtatctaccattacagtatcatacagaatagtttcactgccctaagaaatctccaatcctcacacgttcaggtcatttctctccctcttccccaccccctggcaaccactgatttgttgttgttgttgttgttgttgttgttgttgttgttgagacggagtcttgctctgttgcccaggctggagtgcagtggcaccatcttggttcactgcaacctcygcctcctgggttcaagcaattctcatgtctcagcttcctgagcagctttattacaggagcacgccaccatgcccagctagtttttttgtatttttagtagagatggggtttcgccacattggtcaggctggtctcaaactcctgacctcaagtgatccacctgccccagcctcccaaagtgctgggtaatattacaggtgtgagccactgcgcctggccaccactgatttttttattatctctataattttgccttttccagaatgttatatatttggaaccatacaatatgtagccttttcagattggcttcttattactgaatattactcgttattaccagttttgtcattcacctgtggaaggacatcttgattgcttccaatttggggcaattttgagtaaagctaatataaatatttttgtgtaatttctgtgtacacataagttttcaactcattgaggtaaataactgagtgcaattgctgggtcatacagttaagattgtttaactttgtaagaaactgcaaaactgtcttccaaagtgatgacatcatgttgcatttgccctagcagtgattaagaggtcctattgctccacatcctcaccagctttaggtattgttactgttttggattttagttgttctaataagtatgtgatgatatttcattgttattttaatttgcaattccctaatgatacatgatttgaatatcttttcatktgtttatttgccatctgtgtgtctttggtgagatgtctgttcagatcttttgccctctttttttaaattgtggtaaaaaatattaaatgtacaatcttaaccaattttaagtgtactacagtccagtattaagtattttcacattgttctgtaacagttctctataactttttcatcttgtgaaactgaaactctaygcccattaaacacttaattttatctttctgtgcccaccaccacccccgccctcctgccagcccgtgacaactacctgttttctgtttctatagttttgactacttcagatacttactatgagtggaatcatatagtatttgtccttgtgactgatttacttggatcagggttcatccatgttgtattgtgtgacaggatttccttcctttttaagaatgcrtagtattccactacacmcacacacacacacacacacacacacacacacasagagacacacacttttttttttttttttttttttttggacatggtcttactctgtcacccaggctggaaggcagtgatgtgatcacagctcactgcatcctcaccctctaaggctcaagcaatcccgccacctcagcctcccaagattctgagaccacaggtacacaccaacatkaccagctaattttttttatttttttatagagatagggtcttgctatgttgcctaagctggtcttgtattcctgggctcrggcgatcctcctgcctcagccttccaaagaacggggatttacaggcatgagccactgtgcccagctcccattttctttacccatgcatccatcagtggacatttgagttgcttccatcccttggctattgtaaataatgcttttatgacatttgggtgtgcaaatacctcttcaaggcccttttcttagttcttttgagtctatattccaagaagtggaattgctggatcatatggtaattctatttttaattttttgaggaacctctatactgttttccgtaatgacttcaccattttacagtcccaccaacagggcacaagtgttccaatatctctatatccttgtcaacacttgttattttctgttttttggtagtagccatcctaataggtatgaggtactgtctcactgtggctttgatttgcatttctcttaaaataaatggtgttgaacaytttgttgaccatttgtttatcttctttagaacattgtttattcaagtcctttgcccattttataattgggatttttggttgttgttgttaagttgtggaggttccatctattctggatattaaacctttatcagatatatatgatttgcaaatattttctccccttctctgggttgtcttttcattctgttcattgtttcatttgatgcactgaagtttataagtttgagtggtcctgttactgtttttgtttttttgcctacttttaaattgaggttttttgtttgtttgtttgtttgtttgtttggtaagctgagctttaagagttctttgtatattttgaatacaagttctttatcagataggtgttttgcaactgattgtggcatataattccttatacacattgctggatttgactgctaatattttgttgaggatttttacaactatattatatctaatttcttatttccttttgggattataataagttttttaataaataaacatttttaaatattgggatctcaaatccaagcaaaaaagaaaaaaaaatccttaacttaagaagtaacctgaccggctgggtgcggtggctcccacctatgtaatcccagcactttgggaggcggaggtgggcagataacctgaggtcaggagttcgagaccaacctggccaacatggtgaaaccccatctctactaaaaatacaaaatgccgggtgtggtagcaggggcctgtaatcccagctactcgggaggctgaggcaggagaattgcttgaacccaggaggcagaggtggcagtgaascgagatcacgccattgcactctagcctggacaacaagcgaaactccatcccaaaaaaaaaaaaaaagtaacctgaccaaaaatggttaagtagtaatgttattattgattcattagcctggatggcctattttctaaactccacaaatgggttgggaatataccaagtgttaataatcacatctgagctagtctccatctttggagttcacaaccccagaataccctagataaactgaagcataattcyggaagaagttctaagaactctgtcatcactgccgaactacataactacattgttagttatccaatgctacttaatttaaaattggatatttgatctcttaatgaatggctgttgtcacatttacccagaattagaatttctcagagctctctggagaaatattggacccaactaatggatttgaagtttcaggaacccagcctaattctaaactgattacaaataaaatcattagatttgttaagccaagaaaaatgtatgatccagtatgtgattgattctgtgtctgcaaatttatatgcacagcgtattttaaaacattgctcttataccatcattttctcaactattttgaacttgtctgcctccattcaattttaagttcatttgagagtatcatgtgggcattacatacttgttaatttcaataataagctcaaatccccaataaactgtcttgctactaatagatatttttctctttaaaagtaaagtaatttcacttgcttctagtcccagggaggctgaggtgggaggatcacttgaaatcgggaggtggaggttgcagtgagctgagattgtgccactacactgcagcctgggtgacagagcaagaccctttctcatgaatgaatgaatgaatgaatgagtgatttttttaattctcctttttttccgaaatcctgtaaaactcttctccttaaagatttcctttaagacttgtttattgtcatgtctaaaagcctttttttaattactaaatttaaactggattgaattgctttgtcttagatgaggctgagaaggttgtttctgaacagaaagtaatratgacgtccctcttttttgtagtatgtccgtggttcagaccctgtattaaagcttttggacgacaatgggaacattgctgaagaactgagcattctcaaatggaacacagacagtgtagaagaattcctgagtgaaaagttggaacgcatataaatcttgcttaaattttgtcctatccttttgttaccttatcaaatgaaatattacagcacctagaaaataatttagttttgcttgcttccattgatcagtcttttacttgaggcattaaatatctaattaaatcgtgaaatggcagtatagtccatgatatctaaggagttggcaagcttaacaaaacccattttttataaatgtccatcctcctgcatttgttgataccactaacaaaatgctttgtaacagacttgcggttaattatgcaaatgatagtttgtgataattggtccagttttacgaacaacagatttytaaattagagaggttaacaagacagatgattactatgcctcatgtgctgtgtgctctttgaaaggaatgacagcagactacaaagcaaataagatatactgagcctcaacagattgcctgctyctcagagtctctcctatttttgtattacccagctttctttttaatacaaatgttatttatagtttacaatgaatgcactgcataaaaactttgtagcttcattattgtaaaacatattcaagatcctacagtaagagtgaaacattcacaaagatttgcgttaatgaagactacacagaaaacctttctarggatttgtgtggatcagatacatacttggcaaatttttgagttttacattcttacagaaaagtccatttaaaagtgatcatttgtaagaccaaaatataaataaaaagtttcaaaaatctatctgaatttggaattcttctggtttgttctttcatgtttaaaaatgatgtttttcaatgcatttttttcatgtaagccctttttttagccaaaatrtaaaaatggctgtaatatttaaaacttataacatcttattgttggtaatagtgctttatatttgtctgattttatttttcaaagttttttcatttatgaacacattttcattggtatattatttaaggaatatctcttgatatagaatttttatattaaaaatgatttttctttgcttaaccttctgtgtggttcaaagtgacttcttcataagatcaaattggtctaatattctattatgtcggctttacctcaggataaattcttcataatctagaaacttcgctgttgattttgaattaaattattttaatgaaggatagttggaaatctataaaggcagctctatcagagaatgtttataaagtatgtacgtatgtatgtatgtatttatttattgagacggagttttgttcttgtttcccaggcctggagtgcaatggcgtgatctcagctcacggcaacctctgcctcccgggttcaagcgattctcctgccttagcctcagagtagctgggattacaggcatgcgccaccacgcccagctaattttgtatttttagtatagacggggtttctccaggttggtcaggcgagtcttgaactcccgacttcaggtgatctgcccacctcaacctcccaaagtgctgggattacaggcgtgagccaccacgcctggcctataaagcatttattttgaatagagatgagttactaatatttactagcagtttgtgttatgtaatatttaaaattaagaaatatatttttaaagccagcaagataatgaatataagccctgagtaatttggctaatcaaaataaaataagaaatcctggcagactgtggtctacttttgatcacccatagcagtggagagggccatcattttgatagtacaaggccctggttaaatgtgccactaatccccactggttattactagtttagaacaagaggaagaataagctagttacagacagtggaaaaaacaacaagagaggagttgccaccacatacaaaagaatagtgggactgaagaatgaaacttcaaaacttctgcgattagcatagagaactaattggactggtttctaggcaggaagagctagttgaatgagtatctggcattgagtttgtattttttttttttttaagtgaagagatgcctaaaaagtctattgtattcaagttattatgagagatcaaagaggctgaagagccccacagtatcttagtgcttccaagttctcaagctgatgaataaaagtgtctaccaaagccccactgttttaattgggaagttcaagttaaccagccaattccaattgtatttcaccaattataatcaaagaacatctttttaaagaaacaaaactgctgattaccaataaaggggtataaatactgatccaaaaagtaccattttgtagccaaagtcagacatttgattaagcttattcataatcacaaacatgatgtgtaatagtcatttgatatttatgactgctccccctgccaaaattatgttacttataacctaatgcagttaatttatctctaaatttctgaatttggcaaaaacctcttacaaggagctatgagcaagaactgacattttctgttttaagaggagttgaggcttgaaagccattctaaaattaataaaaattttgaaaccaaatactgcaaataactttagacattaaaattggtagtagctagtatatgaaaatatgtacaaatacatgggaagtaagagtacagattccagatatgagcaacttattacagatatatatagtccagatacaagtatacttacatatcagatgtaagtatttcttttatttgaaaattaaagtgccttttaattaaatcctgttgtggcagaggactctttatggggaggataggtcctgcatttgtgatcaaaaattcaaaatagacttttgctgatgaaatacaaacaacactttaacctttgaactgtcccttgactcaggaatcagcctgaaacatggttatgaagaaatactgaaagaataaaactaaggattaaagtctctaaaacagacttttccttttaaccagtcctgaacatgtatctcaaatactgtattttatctatccagccgtatgaagaggttgaagtttagaccttgaaattcagaacttaaaaaaaaaattttttttgatagaaatggtttttatcatatattttttcgtcatttttcacagattccctttttgaattcaccagtttgctaaaatgtctttgtaaccccataatacagcacttccatagtcattcacagtatgcacagagcatccaaatatttgagtgcccaacctacatgttcccagctgaggtcgaacaaggtgacaccattgtttcaactctcatactacaaatgagtgtccttttaacagtatttagtgccacatatttcacatttttctcctttttgttggggttttactgtttaaaatgaccccaagcttagtaataaagtgctatctggcattctgagtacaagaagacctcccagaaaaaataagtgtttcagatagctttattcaggcatgagttacagtgctattggccattcaattttaatatattaatataaaataatatatctttaaacagaaacaacgtaaaaacaatgttacatgttggttgactgacggaagtcagtgatgagagtctcccaggaacctctctatttttcctggaagcagtggttcagcattcactacttcaatggctccaaggactttaccataggtaacaagagtcatctgtcactttgttaatttttttttttttttttttttgagacgaagtctcgctcttgttccccaggctggagtgcgatggcgcaatctcagctcactgtaacctccgcctcctgggttcaaacgattcccctgcctcagcctcccgaatagctgggattacagatgcctgccaccgtgcctggctaatttttgtatttttagtagagacggggtttcaccatgttggccaggctggtctccaactcctgacctcaggtgatctgcctgccttggcctcccataatgctggaattacaggcgtgagccaccgcacctggccatctttttaaacatttttattgagatataattcacataaaaagttgacccatttggagtgtacaagtcaatgactttttaagacaggttgagtatccctgatccaaaatgcttgggacagaagtgttttgaatttcagatttggaggtacgtgtattatcagttgaacattcctaatccaaaaatctgaaatgctgtagtgagcatttcccttgagtgtcatgtcgatgcccaaaaagtttcagatttaggagctttttggatttcaaattttcagattaggaatgctcaacctgatattcagaattgtggaactatcaccacaatttaaatttagaacattttatcacccccaaaaaaccctatatctattaatggtcaccctcacacctacttccccagcactgggcaaccactaatctactttctgtctctagatgtccctattatgcacagtttgtataaatgaattatcacttaggccttttgtctggcatctttcacttagcatgtcttcacagcttatccttagtatagcgtatacttcattcctttttatagttgaacaacattcccttgtatggatataccacattttatttattatttggtagacatttggggatttttttgtttttgtttttgctattatgaatgcagctgtactctttcatgtacaacttttgtgtgcaaatgttttcatttctgttagatacctaggagtggaattattgagtcatgctggttagctttttgaggaactaccaaacttgcaaagcggctacaccattttgcattcccaccagcaaggtatgagggctccaacttctgcacatcctagagcttcttgatcgctcatgaagagaagactcaatctgggaccatttagatgtaataaagcactttgccctcccccaaaaagttgtgagactgcaattctttgaaaggtgtttttaattctctcaatttgcctcttctgccttctctcactttattggattttaactcattttcctgtgcccgagcttcagtcatgaaaaaatccataatgtcctcccatctggtagaggtcacattgtaatgggagtggccaccactgaacacctaaagtgcaaatacacaattacagttacatgaaaagcaatgaagaaaagttactaggagagaattacaaagggggcataaatgcgtttagggatgtctaagggtgtaacatttaaacaggcctaaaagatgaacagaagccatccagggaaagagtaaactgaaatgccttccattcagggaaaagcctgtgcaatgacctgacttaggagaaagtctagcagttccacatacctgaaagaagggcaacatgtctggaacctagtgagccaggggcaagagtggtagggaaatgagattgaaaaggtaagcaaagaggatacagttcaacccatcttgagaatttagctgtattctaagttacttttagaataaaaccagaatggaaaaaaccttaaacaatggaatgacagaatctaataagatcaactctaaaggttttgaacaatcagcagatattcagttatgcctatgtaaacacaaagtgctttatctagtgctttcattaatgaccactaacctctttaggagcttctagtatacaatttgcttttcatttttgtaggtacacagtaggtgtatatatttatggattacatgagctattttgatacaggcatgcaattacatcagggtaaatagggtatccatcaccttaagcatttatcctttgtgatgcaaacaacccaattatgctcttagttatttctaaatgtacaataattatttttggctaggtgcagtggctcccgcctgtaatcccagcactttgggaggccgaggcaggcggatcacgaggtcaggagatcgagatcaccctggctaacacggtgaaaccccgtctctactaaaatacaaaaaattagccaggcgtggtggggggtgcctgtagtcccagctactcgggaggctgaggcaggaaaatggtgtgaacctgggaggtggagattgcagtgagccgagactggccactgcactccagcctgggcgacagagcgagactgtctcaaaaaaaaaaattattttttactatagtcaccctgctgcgctagcaaatactaggtcttattctatttttttcatacccgttaactctccccaattccccaacgaccacttccccgctaccctttccagctatgacttgcctttttattttatttttttattttttttgagatggagtcttgctctgtcgcccatgctggagtgcaatggcgtatctcggctcactgcaacctccacctcccgggttcaagcaattctcctgcctcagccgcttgagtagctgggactacaggggcgtgccaccatgcctggctagtttttgtatttttagtagagacggggtttcaccatgttggtcaggctggtctcgaactcagcatcttgtgcctcggcctcccaaagtgctgggattacaggcatgagccaccgtgcccggcctacaattttctttttaaaactacacatcagtttactttgagaacaaaaaaagacaaacctaagtataaatgttaaattttttgagatcccaatgttcattttaatattctcaaatatgcttaaaggatctttattccctagttatgttaactaatggtaagtgcctattagttcacaccatacttggtcattgattctaccactatcccccacccccatctttgagctaaatactaatctcaattctaggcccaatgaaagaccatggagctccattcttggaataatttgatccttatctaagatcttcactttatgtccccatccccactgtaactaatacaaagggttcttggggctggttttacctcctcctgcattcagactttccacctaagtccctgattcctgttgcctgatctcccagatcatgaatcctcatgtgcccatgtagactaccctatttgccataacagatttttaaaatctattctcctggcctgaatt

SEQ ID NO: 97831 - DNA, 126085 bp, Homo sapiens
tataagtggtgtccctataacaagaagaagagacaccaaatatgtgggtgcaggtgagggcacagcaagaaggcaactatctacaagccaagaagagagacttcagggaaaccaaccctactaacttcttgatcttaggcctccagcctccaaagctgtgcgaaataaatttctgttgtttaagccacccagtctgtgatattttgttatggcagccctagtagagtaatatactcctccctaccctgttttcacggaggaggtggtcatgtcacatagtggtggtggtggttgtggcgggtgcatggggtggcaggggttggggaggcaggcaggtttagggggaaaaccttgattgcctgacccctggtttctttccactagttctcactgctgctctacattcttgtctgtggaccactcacttccaatgtaatgtcctaggatgccatatcgtgaattaactttgcaggattctgaagttctctcagtatgtggtgtgctagataataagatcagcaattatgtaccaaaataatccaaattatgatttcgcctggaacatctcttaattcttccaaaatgagtctttatgatcgtcagtgatctgctatttctgagtgagatacatgaaatttcaatttctcttcatgcatatgtgccgaattttcagttacacacagtttttcatgaccaaattgattagtctgactagacatccatgaaatgaaatgtgcaaggtctgatttagccctaggaatacatcattaggtatatacagccactgtttttccttattctgttgggatttctttgaaaggcatttcattataatttatttgcacaaaatccacagaaaaatactaactcaatgaagaatataataggtgcacattatgggagagaagttagacttaaaaagttagcatgatgcccttaattcagtgtcacagtgtctacctgcaattcttctttttttttttttttttttgtgagatggagtctcgctcttgttgcccaggctagagtgcaatggcgtgatctcagctcactgcaacctccgtctcccagttcaagtgattctcttgcctcagcctcctgagtagctgggattacaggcacctggcaccatgcccggctaatttttgtatttttagtagagacagggtttcaccatgttggccaggctggtctcaacttcctgacctcaggtgatccgcctgccttggcctcccaaagtgctgggattacaggcgtgagccaccgcacccagccctacctgcaattcttaatgttaactcttgaactttcactcacttatacttttcatcatacatcaaatacaacaaaaatatgtagtttttccctttttattattcgaagcaaggaattgtttccctgcttgcattttctttgtccagtttcattgagatatactttatttatttattctgagacaggatcttgctttgtcacccagacttgagcgaagggtcaccatcatagctcactgcaacctcagcctcctgggcttctcctgctttagccttccgaatagctagggatgccaccatgcccagctcagaggtataatttagttgcaataaaaggcacagattttttttttttttttttttagatggagtctcactctgtagtccaggctggagtccagtggcatgatcttggctcactgcaacctccgcctcccaggttcaagtgattctcttgcctcagccacctgagtagctgggattacaggtgtgcgccaccacacccggctaatttttgtatttttaatagagacggggtttcaccacattggccaggctggtcttgaactcatgacttcatgtgacccacatgcctgggcctcccaaagtgctgggattaccggcatgagccaccacgcccggcaaaaggcatagattttaagtgtgcaattcaatgtgatttgacaaatgtatgtagttatgtagcccccagtacagtgatgatattgaacatttcctttacctctaaaagttcacttgcatccctttggtgtcaccccaccactactccagcctttggcaaagtctgatctgatttctatcactgtaattttgccttttctaaaatttcttagaagaggaatcatacagtaggttatttttttattttattttttagttttatttttttctgagacagagttttgctctcgtttcccaggctggagtgcaacggctcaatcttggctcaccacaacctccaccttgtgtgttcaagcaattctcctgcctcagcctcccaagtagctgggactacaggtgcgtgccaccacacccagctaattttgtgtttttagtagagacagggtttctccatgttggtcaggctggtcatgaactcccaacctcaggtgatctgcccgcctcagcctcccgaagtgctgggattacaggtgtgagccaccgtgccgtttttttttgtttgtttgctttctttttttgagataagaatctccctctgtcccccaggctggactgcagtggcatgatctcagctcactgcaacctctgcctcttgggttcaagcaattctcctgcctcagctgcctaagtaccacgcccggctaatttttgtattttatttttagtagagatagggtttccccgtgttggccaggctggtgtcgaacttctggcctcaagtggtcggcccacattgacctcccaaagtgctgggattacagatatgagccactgtgcccagtccgtgcctagctacttgaaaaaaacatacatgttgtagagagagcctgttgctcagactagtctcaaactcgtaggctcaagtgatcctcctggttcagcctcccaaaatgctgggattacaggtgtgagccactgtgcccagccttttggcttgttttaaaaaactggtttgtcatcttattactgaactgtaagagttgtttatatattagggtacaactcctttatcaagatatttgttttgcagatattttctcccaggttttggttttcctcgtcttccttctttctttttctcctcctcctcctccccccgctccctctctccctcctcctttttcttttctcctcctcctccttcttctcccttctcctccttctcctttttcttcctcctcctcctcctccccctcctcttccacccctttctcctctccttcctcctactcctgttcctcctgctcctgttcctcctcacctttaaggcatgagggataagttcttttagtgaactttacatgagccacaaatatttgtacaagtttgcactgtccactggattttggaaagatcactgtattagtccattctagcactgctataaagaactatctgagactgggtaattcataaagaaaagaggtttaattggttcctggctctgaaggctgtaccagaagcatagctgcttctgcttctgggaggcttcaggaagcttccaaaatggcaggaaggcaaaggggaagagaaatgtctcatgtggcaggaggggagcaggaggcaggcggggaggtgtcatatacatttatttcattttttagacatggtttccttctgtcacccaggctagagtgcagtgctgtgatcttggctcactgcaatctgtgccttccaggctcaagcaatcctcctacttcagcctcccaagtagctgagtctacaggtgctcactaccacacctggctaatttttcgtgttttttgtagagacgggtttttgccatgttgctcggggtggtctggaactcaagcgggagtagttcgtcatgttggtctcccattttgggagtcaagtggattctcccaccttggtctcccaaagtgctgggattacaggcacaagccactgcactgggctgtcatacacttttaaatgaccagatctcaggagaactcactcgagatcataaggagagttccaacaggatgctgcataaccattcgtgagaaatctgctccatgatccactcccgcttcccccaggtcccaactccaacattagggattacaattcaacatgagatttggcagggatgcagatccaaaccatatcaatcagtaacctaggaaacttgacggcattttcagtgcccttagctaaactccttaacctatctaagcttaaatttccttatttgataaggaaggaaaataatatttatattatctgtctctcagagttgtgagaagaaatctgacagtactttttatttgtatttatcatcatcattattattattcattcattgctcaactgcatggacagtacgttgaaaatagtaaattagtatcacctccctaatcacttccccaatgttgttgaaatgtgtcaatatttgaatatatacaaactgagtgatttctacagttaaacctcaagtagagaccaagatcaataatacattaaattttaataacttggattaagtcgtgtttgggttaacgataaatatcaaaagataactattacacctattccagataataaatgtattactttccataatatctggaataggtataatagttatcttttgatagattccttgatggagaatctggtggcaaggggaagttaacgtttttagtaggaaactgagtttttcctttcagaggtcgaagagggaaactggttccctggggccctgaataaggccccagtaaaggcaatattcaataaatacctggtgctggcaatttttaatttggttgagtgatgtttttactcctagttattttgattctaaatgactttatggagatacatgaacatatgtccaaagtctttggacaacacttttcatagctgattatatccgaagcatttaatgttcctgttgaagtgaagagcttgaaatatagggccttttgagactattccaaagcaggtgataaaaacaaaacaaaacaaaaatccaggagcaaaaaacgaaggatcagggtgggtggctcatgattgtaatcctagcagtttgggaggttgaggcagaaggattgcttgaggccaggggttcgagacgagcgagggcaacataatttgatccctgtcgctataaaaaattaaaaagctcagccaggtgtagtgaccgacgcttgtagtcccagttactctggaggctgaggcaggaggatcgcttgactttaggaggtctaggctgcagagacccatgattgtgcccctgtactccaggctgggtaacagtgagatcctgtctcaaacaagcaaacaactcccacccctaaaaaaacgtgcacatgaccttaaaagtgtaggaagattacatgataaggagagtcagagaaaagagaaattaggacaggaaagcactacaagctatgtatgtttattttataattgagtctttaagggtacggagtattcgtactcaacttgtacccccagtgtctagtacgctgcttggtaaacagctggcaatcaagaaatgtttgctaaattttaaatgaattgatgggggcggaacttcagaaagtaaagcctgactcgctttatttctaagaaggcagaggaagtaaaaatctagttttccgtactctgtcccctttttaatccttctctgaatgggtgtccttgattcactgacatttcctaattaaccaagttctgccaagtttcacatgaaacttggggaaccgatttcattcccccagtatcaccctgtggcgccaccttccggagctgtgaggaaactccggacttccccccaacaccgccccctccctccaccctcggtctccgctttctgcgctctgccgcgttggttttcggaggtgtctgggcgcatgcgctttggacgggccgcctagcctaggagagactacaattcccagaagacagtgcgaaagaaaaaaaaaatcccgcggtccgtgggggtgggagaaataaacgctcgcgagagaacgaggttcaggcggctgcacgaagggggtggaggggggctggagagagtgaggaggaaggggaggaggtgccgtcccacaatacyaggcgggagggcgggtaggcggtttgtatccgggctgtgaggtgctcggagcctcggcggaccttgctgcctctgtctctttaacgcgagaggaagcgatgcagaggggtggaaaatggcagagctgcagatgttactagaggaggagatcccgtctggcaagagggcgctgatcgagagttaccagaacctgactcgggtggcagactactgtgaaaacaactacatacaggtgaggcgctctggcggccggcgggcgctggccgggtcgaggacccgccggagtgaccagcccactgggcggggtggggaactgccctgacctcagcggctgccaccaacccgagcccctaccgcagccccaaccccagccccaaccggggacagagcgagtggccgggctgagggagtcgggctgcgatacaggaagtggctgtggtggtggaaaccgatagaaggggagagagaaaatgggcgagggagccgggagcccgccgctgccgcagcccggcgcccccctcgcgtccgcttcccccagggcccggccaccggggtcgcgcgccccccaggtagcctccagtccgcagggctggagtcccggaatacccccgagctgccgccgcgccgcctctctgcgccgggagaggaggtccaggacgggagaggggagaggagagggcagggacgaggctgaagccgcagaagggagaggaccagcggggtgtgtgttgtgtgtcggcggagggtggggtgggggcgattatgtcagtttcagcccccagagggtgtgtcttttatttatttatttatttaaaaaaaatttgtcatgagtcacattacaccgacctcccggaggagaggaggaagcgggtgtggggagtgagggagggcgtttgagagaagttcatcttaaaattcctttaattgaaggtttgtaaatctgtctgcttgtccattttcaagtcgggttttttttatttttttccccctctcatcgttttcacttccgccccaccataatgtattctaagaggttgttagggctgctatcattaattatcaaacacgaattgttcttaactccttggaaaaacggcttaccctcccttctcccaaaagttcttgagctgtaggcttcataagtaacttaaaatagactggtgtcatcgccggttgcttattttctgaggtttctctcttaacaagctaagtaaatgtatagtatgtgaatccaaatacagaaacgaacagaggtagcctctgaactacaacgtaaaaatatctgttattgtaaattagaaaactcttgggactttgtgacagatgcttgtttgttcgtttctctttggatgattggaagtgaattgtgtgtggtagtttgttttgaagatctttaactgtgtaaaccaacagtttgcgctagaaacaaagtagcacagtcctttgtataaatataaaggcaccaggaatgctcttgcttttggtaaggcaaggccaaaacgtgctttgaaaggttagggttattgcaattcagaactaaattgtttatagaaatgtctcccatgtgattataatttttaagaaccgatgtttctgtgttggcaaatgcttcccctctttatttttagagggagatgctgttttcagaatgttttgaatatttctcagttttcatgttagtaacattgtatcttcagtagcactactcggaatttatcttcacaatttttttttcaagctttcactttaggaattctcctgataagtgaacttgttgaatgcctgccacatctactgtatcactttgtgcaaactttatatttagcccttcgaaaaacttttaaaaatctagtagggatgtggatatggtttgcaaatataaaagtgatctcgtagtttatcgatattaaaaataggcaacttttattcaacttaacatgaaaagccttgaaattgaggagaaccttaatttgctgaaagttttaaagatttttgaaagccaaaaggagagcacagtaagtttaatttctcgctttccagaaaagttatgtgttctctgtagaagtcagtagataagtgcttcatacaggggtggctcctttttgttttgcatgttgggaaatctgacaagtatatagtgtggtaactatgtgttggcaactgttagtaactgtaaacgtgttttaacctgtctgtgtactattactttttcaggtagttgtatgttgtaatgctttttttttacccctctctgacccctttcctttactcctcttgctacaatcatgtaactttgaagcactttaaaacttcattgctaatatctctaattaagtcatgttatttttcatacagtctctcactttataaaatgttagtgccatggtgcacgaatagccacagtcagtggccccgttttttttttttttttttttttttttctttttttgtgggggcggggtggggtataatcctaaatctgacaccagtgaggtgttttgttcatattggaaaaaaaaaaaaagaattcacgcaaagcaatgattatctaaataccttagtagcctttatacgttgggctgcatgatccaggccactagttgcctccctaagggactcagacagggtcaggctcaraaagtgatgtggaagttgatgtggtaggtggtgctgctgactttggtgctaagaatggggaatgaataatattagaaatatccattagggtgtctgttgaggtctttctgtatccttcctgtgacctgattgggttatttataactaatactcttcctaaatatatatctcttctcagtgaaagtatgcagttcacgtgtgctttgagaatttttaaataaggtgagctaagttattgcttgggtgatttttgttctgagattcacttttcatttcgtttttctacagtttgaaagtgcagtccagtttagctaaggtgtgtagctgagaaactcttttggctgtggtgcatttaagttcttgcggcagtttattagttctttggttctgttgacttttaactagtaggttgtattattaatagcaaaacatctgaaaagattctactacattaaaaaggacagtttttttctttctttytttttttttttttgagacagacttgctctgtcacccaggctggagtgcagtggtgtgtgaacaccattcactgcagccttgacctcctgggctcaagcagtcctcccacctcagcctcccatgtagctgagaccacaggtatatgcaaggacagggttttaacagttgccatggggtaaataatactaaaaatagaaagtttttttttttttttttttgagacacagtcttgctctgttgctcaggctggagtgcagtgatgccatcatggcttactgcagcctcaacctcctgggctctggagatcctcccacctcagcccccccaggtagctgggactacaggtgcgcaccaccactcccagctaatttctgtatttgttttgtagagatggggttttgccatgttgcctaggctggtctcaaactcctggtctcaagcagtctgcctgccttggcctcccagtgtgccagtattacagacataggccactgcaccttgccagaaagtgtttttttttttttttttttttttttttttgagatggagtctcgctctattgcctgggctggagtgcaatggtgcgatcttggctcactgcaacctccacctcctgggttcaagcgattctcctgcctcagcctctcaagtagctgggattataggtgcccaccaccacgcttggctaattttttgtgtttttagcagaggcagggtttcatcatgttggccaggctggtctcgaactcctgaccttaggtgatctgccctcctcggcctcccaaagtgttgggattataggtgtgagccaccatgcctggctgaaagtgtttttatatagtcatttatgtagacatacagaagagacttttccatattcctttactatgaccagattgaatttttcatgccaaggacagtgcttaatttgaacacacatgtttagccagttctctgtgctctaccttagagttagttcatactgcctttgttatgggaactattctgggaaataggaaggaaagccgagtgaaaaggagtagaaactgcttaagaaggtttgtcaggatgcagattggtaggttgggggtaaggacagaaaagtcttcatacagcttaactttaaaatttaattttattttttgtctggatttctaccaggagctttatttgggttaacaagtatgttctaaagcctaggagtatgaaggggatatcatcccagtatgttactgtgagctactcacttcagcttgctttcctcctcctgtgacatttgcttcattagcacatttaatctcagaaggtgggtaatttttgagcaggatccgtttggagtaggtaaaagctaacatttctgatactgtacactttatgccagtttacaaactgtgtcagtttttttttttttttttttttttttttttgagtaacagatggacagttagaggttccgaggtattaaatacccaacctaaagttcagtagcttgtatgaggtggggcctggaatcaaacccagattttctcgattccaaatcccaaattccatctaattaatcctgaatgggtttttttttttttttctttagacagagccttactctgtcacccaggctggagtgcagtggcatgatctcagctcgctgcaacctccaagcaattctcctgcctcagcctcctgagtagctgggaatacaggtgcatgccactgcacccagctaatttttgcatttttagtagagacagggtctcaccatgttggccaggctgatctcgaactctggcctcaggtgatccactgtcctcagtctcccatggagttgggattacaggtgtgagccaccatgcccagcccagaatggggttctttttttttttttttttttttgagatggagtcttgctctgtcacccaggctggagtgcggtggcacgatctcagctcactgcaatctccgcctcctgggttcaagtgattttcctaccccagcctcccgagtagttgagattacaggtgcccaccaccatgcctggctaatttttgtatttttagtagagacggagtttcaccatattggccaggctggtctcaaactcctgacctcgggtgatccacccgccttggcctcccaaagtgctgggattacaggtgtgagccaccgcacccggccctaaacagggttcttatggcaacataggggataaaaacaatgtgcgcagagggtaatagagaagggtagagggtaatataattgcctctatttattgaatacgtactccattgcagtctctgctggttggttttgtattatctttaatccttacaaactcgccacgacagacagtgctgtcttacatatgaggaaattaggactcataaaagttaagttttgtttagtcatagagttagtaattggcagtcaggacttccttctgactctggcagactccataggctgtgctcttttcatrtcatactgttttcacatgaaagaatctagaactcaaaactggttcaggaataccgtggaataaacagaatagactggtattgggcaagcctgggaacctaacaactctttaccattgtttccaggttgtgaatataagaagagatatgtttgtaatttagggacttgcctatatcaccaaaagatggtaactttggcatttgaagtgttcaactacaggttaagtatcctttattcaaaatgcttgggaccagaaatgtttcagatttttttytgaattttggaatgtttgcattatatacttactggttgagcctccctaatctgaaaatctgaaatccagaatagtctaatgagcatttwtttttgtgtcatgttgatgctcaagaagttttgggttttggatttccagattagggatactgaacctgtataggaattacagsctagcttttcactgagctccctggatccttttttcttttcctgcatccttgcctgtcttttttctattgttagtctgtgttgcaattgtgctaagaaattttgaagaagcatttgtagagattaacaaaaaatatgtggaaatattctgggtagatgtgatttctatacaaaccaggtttggggaaaaacagtcaaagtgattcaggagatgaggatagactggaatggttagaattcctagaattgcactttgaagtgtgagtaaaacagtgactagcaaagttagagatgtaggttggaaatgtaaatgtatttaacagaaggttagataattttatggaagatcctcagttaattgttaaatcgacccataccatgtcattacatgtttattcatgctgttgtgtcaaggtgatacagggctgggtagagcaggatctgacctagcatatcagttctttttttttcttttctttcctttttttttttcttctttcacaccaagtctgtgaacccagcatatcagttcttatgaaagtccatatcacatatatcagttcttgctaatactctcaaggtgagaatactgcatatttttaggactatataatatttgcaaatttgtattaaaactaatgtcttctsttttttcttttgtggctttaatactaataacagctttatatgtagtacttctgactagtcctggtctgtttagaacctcaattttagcatgcttctgtcttttggagagttttcttagaaaattattgaaataatcycttaggatacttgcaaatttttcttgtgtgcttctgcgttctccagttgattctgatagctcaggaatgctaatagtccttgtggaaaggagatatttaggcaactggggatctgctgtgtgaccatttacagtaaccttatttatattcagtgaaattatgtcctaagaattaagacagttaacagtcaaaaatatgttagccagaaaggaagagtgttcatattgggacaagaggttggatcaaactctaggatattgtgcagatataaatctataaaacccatgaaaatagtgttggcatgaaaagtaaggtaaaggctgggcgtggtggctcacacctgtaatcccagcactttgggaggatgaggcgggcggatcatgaggtcagaagatcgagaccatcctggctaacatggtgaaaccccgtctctactaaaaatacagaaacaaagttagctgggtgtggtggcgggcatctgtagtcccagctacctgggaggctgaggcggctgaatggcgtgaacccggaggcggagcttgcagtgagctgagattgtgccactgaactccagcctggcagcctgggtgacagagcgagactccgtctcaaaaaaaaaaaaaaaaaaaagtaaggtaaaattgatagttaatgctaattttgaagcatttacaaagttttgattgggaggttgtatatttttcctaatatcatcttgtgttgattgtaatatttattgaaattatggtttgattgtagaagaaataatagtcaaaccccagaactacaaactttgtagatcttaatatttactaagacatcatgttagaaaaaagggattttttttaaaaaaaaaaaagggcattgttgagaaataagacaataggaaagtagcaattactggattttttttttttttttttttgagatggagtctcgctctgtcacccaggccggagtgcagtggtgtgatctcggctcactgcaagctccgcctcccgggttcacgccatcgattttgtttttaaaggaaatagttgacgtggtcattttaacagtaaatatccatcccttaraatggagacttgagatttgactactgtgtgtcaatccaaataagtacttttaactttggatctactaattttctccatytacaaaataaaactttctcagacatagttggtagtgaacccgtgtttatgaagaaaatctgttaatgagggaccacacccagctaattttttgtaatttttgtagagatgggatttyrccgtgttgcccaggtttgtcctgaactcctggactcaagtgatcctcctgccttggcctcccgaagtgttgggattacaggcgtgagccaccatrcccgaccagcaaaaacacatttttgaaaaacttcaatttacctttaattcactcatttcctgaatgctttatcattaatttttattaataatttctacattctttgacaaaattgtatttggtacattttatttttccttctatggaaaggcaagtgtggcactttttcagaacccatgggaaattaatgccctccacttaaacatcagaaatgtatatattatatcatatagaaaaagatgtttcctactacgtcaaatattagcaacttaagagttgtaacaacagatgcttattttattttatttttttgagacagagtttcgttcttgttgcccaggctagagtataatggcacaatctctgctcacctcaacttctgcctcctgggttcaatcaattctcctgcctcggcatccygagtagctgggattacagggatgcgccaccacgcctggctaattttgtatttttagtagagacagggtttctccatgttggtcaggctggtctcgaactcccaacctcaggtgatccacccayctcggcctcccaaaatgttgggattacaggcgtgagccaccgtgctcggcccagattcttattttaataaggcaatatagagaaaagagtacatgggtgccattttatttttaatttttatgagggttggggtctcctatgttccccagctgtcctcgtaattctggggtcaagcgatcctcccatctcagcctcctgagtagctgggtctacagactttccccccaagcccctcccaccatgctcagctcatgggtgtcattttaaaattgattattactcaaaagtgcgccctcaacatagttaggcaatcccactagataacctcgccagtttgttcttccacttaccacaaactattttaatttttttctccctttttgaaatctgaccctttcctttcttgtcttttggttcatagagaaaatagacttcatcatataagacctataatttcttaccactgcatctccaaacctgctatcctcgctcaccctattctactcctttttataatggaagagagacattcttcctcctagctaaagtcctaactgtgggtcatatcctgtcctgcctttttgtaaaccttatgctcctgataagtttatacctcctctctttactgaatttgtgctttcacaattgaaacatttcagatctctgtcgtacttgaaaactcttttgacttcatatactcatctagtaactgacctatctctcctttatggattaactagttttattacactattgtcagctagctgcagtggctcaagtctgtaatcccagttacttgggaggttgaggtgggaggattgcttgagcccaggagtttgagatcagcttgggtaacaaagcaagaccctgtctcaaaaaaaaaaaaaaaaaaaaaaaaaaattagcttagtctgtagtcccagctacttggcagactgaggtgggaggatcacttgagcccaggagtttgaggctgcagtgagctatggttgcgccactgcactccagcctgggcaacagtgaaaccctgtcttttaaaataaaaacaaaaaaccaagcatyttcctccatctcccacttttcattcactctttaacctgttctatttccactgctctctgaatgctaataacctccatgttgcaaaattctttcccattttagttctcatgtgctttttttctctgcatcattttgcatggttggtttttcctactttttttgagaagttaatcctttggcttctctgatagacctttctttcatgcttttcctattactctctggcccattattctctgttactattaagtattaaagtggcttcatttgggctcttttctacacatctcacctcaagctgttttatttattcccatctaaatctctagattagatctttcttctgttgaggtttagattcatatatctaataacctacttgacccctccgcttgtttgaatcacaggtgcctcagacataagatgctagcaactgaactcaacaccttcctctaaacctatcactaccaaccacccactcactgaaaacctgggcatcattcttttcttttctttttttttttttttttgagacggagtctcactctgttgcccaggctggagtgcaatagcgcggtcttggctcactgcaacctctgcctcccaggttcaggcaattctcctgccttagcctcttgagtagttgggactacaggcatgtgccaccacacctggctaatttttgtatttttagtaaggacagggtttcaccgtgttggccaggctggtcttgaactgctgacctcgtgatctgcctgccttggcctcccaaagtgctgggattacaggcgtgagccaccacacctggccgagaacgttttttaggcgggttctatctgttagcatttactgtactaaaactaaaactgagcagtttaaaacattcatttaaagggatatctaatgtgtttattattaacataaataatgttttatgaaaaatgtaaccttagttttccaaaacaaaaatgtttagggcaagagtaacattattttacattattgcatctcagtgaaaaataaatggcaacaaaattcttatatctgcttctgcagttaatctgttcattttgttttggttgaagtatatgaaggaaatctgtcctcacacagttgtgtagtggaaaaagggggactattgtaataggctgtgcacataattgtggatgattttctttgatacaacaacaaaacttggtagatggtagtttcttaaaggttagttacagtgtggactctgaaactatatcaataaatattttatactccattactttaaaatacattgcataggccatttggaaaatatttttcactgagttatgcagaccttctgaatgttgacacatttcattatacaatgtgaaaaaattgcaatcactaatattaacacagatctcactagaagaattttcaagtattgcaaagcttgcaagttcacattgatggattcaagttttccaagatcccagtttttgcttgaaagcttgaattttattattggcaacaaatattaccagttattttccttgaagtattaggcttactttattcatttttaggaaaatgtctgccaaatgctcaagtctaaataatcttagtttacctatcagttgtttttgaagtaataatggtgttccatgaacaattggcttattcagcttgcaaataaactgcacaagtgctttttcctaacaggagccatcatacttagtatgtagcagaagtactgtatgtgtacttccattttgtcgtatacaatattaaaagacattttctcaagggtcaagatttaatagaattaataaattttcctgcttcatcaagaacattttaaagtgaaaccggcttttttaaacctttttctttttttttctgtggatggttggcagtaaagaacacaatgagtactagtatcgtctgtgacattgccttgattacctctaagaggctattgtaattttatttacctttgtttttgtaccttcaattcaaatgtcaactcaggaaagaaagcaaataacattagtagtattataaaaataatttagacctcgtggaccccctgtaaaggtcttaggaatcctcaggggtctgcagaacacactagacaacatttgggatagatgattggttcagtagacttaataccttccttttgtgctaatgggagtctgaattttaaatatcattgtatactactatgtatattgagcatccctgactaatgtagttgccattaaaataaaaaatgtaaagtttcttatggagaaagtcttggccgggcgtggtggctcatgcctgtaatcccagcactttgggaggccaaggtgagtgggtcacctgaggtcaggagttcgagaccagcctggccaacatggtgaaatcccgtctctactaaaaatacaaaaattagctgggcgtggtggcacatgcctgtaatcccagctacttgggagactgaggcaggagaatcactggaacctgggaggcagaggttgcagtgagctgagatggtaccattgcactccagcctgggtgatagagcgagactctgtctcaaaaaaaaaaaaaaaaaaaaagcctcttcttatattgcatactgtgctaattattttggttcttaatatttgggtcttactgctctgtacaattcacctttcactagtactgattttgaaactgatttgctgctaaaagtttcataaatctgttatcttcaaatttcataccaaaaatttagtaatttgttgatatgaatttatttgattcataggcggttttaaaattaaatgatttttaggaagtagtgagaaataatatttttaattttaaaatgatataacaatcattcatttctaatttgagtatgttccaaattagatgtgaagaaatctcttgttattatccatggcatgtatcactttggtactaatatatttacatcttcttcttcttcttcttcttttttttttttttttttttttgagacagggtctcgctctgttgcccaggttctggagtgcagtggcacgattactgttcactacagccttgaaatcctgggctcaggtcatcctcccacctcagcctcccaaatagctggaattacaggtgtgccaccgtgcccagctaattttttgggtattttttatagagacagggttttggcatgtggtccagtctggtcttgaactcctgagctcaagcaatcctcctgactcggcctcccaacgtagcaatcctcctgactcggcctcccaacatgtgagcctcccaggtgtgagccaccaggtctggcccaacatcttaaaaaataagaataacccaactgaagtgggagaaaaggacaaaaaacagagggtacactttttgttttagttgtttctctggcattttcccccttttattatatacattttatgttttccatgaaaaaaggctttgcatttatcttttcctctgttaaataatatctcttttaaaaggtttgagaagcctattttttttcagttccatcttcccttaaaattaataataatcaaattttgcttgttttttttaaagacagggtctctctctgttgctcaggctgtagtacagtggtgcgatctcagctcactgcagcctcaacctcctgggctcaagcaatcctcccacctcacctcccaagtagctgggactacaggtgtgcaccatcacgcttggctaatttttgttatttttttgttaaggacagggtttcaccatgttttccaggctggtcttgaactcctggggtcaggggatctgcctaccttgacctcccaaagagttaagattaccggcgtgagccaccatgcctggtcctcagagtttgctttgaatagtgggaagacaaactggtgataactcttattcttttagaataatcagataataccataaagatcccaaagaaaactggcaaaattgtataggctcccaagttggaaccacaggagttccaaaaggaatgcacagtaaaatgaaatatatttataattatatgtattgtgcttcttagtatgacagagtatattagtttgtcacatactcagttattctgcgactttttacacgtattatgtgtcagactgttttgtcaatcagatacagtttctaccctcaagtgattttatagttggcctcctccattaatcaaataactcaaactataataaattacatctagggaaggtacatgtgacatgaaagtatacatcaggtgctgccacctagcttggtgtgtcatagaagtaatgttggagttgagatctgaagggtgaatatatgttaaccgagaacatttgggggaagggaaaacagtgtctctgtggaggggagagcagcatgtgtacaggctcaaaggtaagagtgaaggcagagtgattttgaacaagttacacacttgtgtacttcagagtaaacagagtcatctgtgaagaggtaggtaggtaccagataaggattttgatctttttttttgtctgaggctgatgagaaggcattgaaagttttaagcaaggctgggcgcagtggctcctgcctgtaatcccagcactttgggaggccaaggtgggcccatcgcttgaggtcaggaatttgagaccagtctggccaacatggtgaaaccccgtctctactaaaaatacaaacattagccagacatggtggtgcttgcctgtagtcccagccactcaggaggctgaggcaggagaatcacttgaacctgggaggcggaggttgcagcgagctgagagcacgccactgcactccagcctgggcaacagagtgagactctgcctcaagaaaaaaaaaaaaaaagaaaagagaaagaaagttttcagcaatgggatgatataatttttactttttatgaaggttactcttgtttagagtggagaacagattggaaggaggattgactacagattggaaggagttcagaacagattggagggtggctagtctagaggtgatggtagcaattggtgatggtttttctaaaatcttttttttttttttgagacggagtctcactctgtcgcccaractggagtgcagtggtgtgatctcagctcactgcaacctctacctcccaggttcaagcaagtctctctgcctcagcctcagtagctgggattacaggtacccaccaccgtgcctggctactttttgtatttttttgtagagacggggtttcaccatgttggccaggctggtattgaactcctgacctcaggtgctctgcctgcctcggcctcccaaagtgctgggattacaggcatgagccactgtgcttgtccattttttctaaaatcttcagtgcctgaactcatcatggtagactgtgactattatttttcttttctaaaaagaggagtatttgaggctattgggatttgttgaactgaaatagagaaagattcattcaacaaatagttaattgcctactctatggaagactgtctgttaggtattatgatgtggtggtatgatgtctatattattattattatttttgagacagagtttcgctcttgttgtccaggatggagtgcaatggcacgatcttggttcactgcaacctccacctcccgggttcaagtgattttcctgtctcagcctcccaagtagctgggattacaggcacatgccaccatacccagctagtatttgtagctttagtagagatggggtttcatcatattggtcaggctggtctcgaactcctgacctcaggtgatccgcccgcctcagcctcccaaagtgctgcgattataggtgtgagccatcatgccctgctttgtgtctatattatttataagctatgtagaaatcactgaaaagccttaaatctaagaaaaagaaaattggtctatagtatgtatagttaaatgaggaaatgttctgtatggaagaaaaataattgttatttttgaaagggttttgattttagtttgggcagtcagaagtttgcttatggaaagagaatatgtcaagcagctttttttttttttaaagcatttaggtaatatgttcctataaaagggtcaatacagttgtattaaaagtcaaacctaaaatgtctcttcttcttctccccatactgctattatcctctcccctcaaactgtatgcttgttttctgcctttccagtttttgtacaaaggatgtgctttgggaagattcatcttacattggtacgggatggattggagaagggagagactggatggacagtgaccagttagaggactgtcacatttgtctcactgtaaagagtatttcatgaattgagatagctgtagtaagattgaaaaggaagataagaatcagcaagccttggtgaaggagatatgggtggctgcgggaaaaggagaacccaaagaaggcttatttaaccggtatctattttcccctagcataaagctaatgcgcctacagaaggtaatttgcagtcacagaagtgaatctatagaccccctctttttcagctgttagtacacagttggtttctgacactttccagcttttactcctccacaattgaattgattggcagagcagtgggttggagaataggaataaagcttgactgctagctggctgcgtgggcagaacagggaagggaagagggaagaggagaggaaagggattccagtttctctggctatatactgttgtggcatgaggtgcatgtcttttgatgttaattttgatgttctatcataaccttctgcattacagattgttggtatttttatatgtgtagtctttataaatttcaaatacwtatgacgtgggttgaaaatgatctctttttgaaaggaacttttagagagaattctaaggaacagtagtgtttgggggttctcaggcaaagtttctcctaaagaatgagtttagccgagtcattaatttaaagagttgaggggaagggggattgggaggcaagggatatatataggtagtaggaacagaaagatagcaaggcatgtttgggagagctgtgagtagtgtcaagtgccagggaaggtggaggagatgaagtcttagtcaaaaacatacttgaactgctgtcactaaactgtagaagatcggatcagtgtttcccagatttgaaaatagaaaccgtgttttaaatttaacactggtaagatgaaattgtgcttttgctatgtcctgacatattctgttcatttgtctagacacgtttggcataatcaacagaaaccactggatgagtggttaaatataagataaatgagttataggtctgaatcaatcacttttgtatgagctaattgtcataacttggggactgcttgtatgagtggctttattgttagtgtttattaatgtcttgtggtatatagagctattttttttttcaactcaattgggtatttcttccacccatcctacctctcctaccttgccycactaccacaaagaagaagaagaaaggcagcatggtactatctctatgaaaatcctgccactctcatttttgctttttgggtgaggaggtacggtgctgcaaggtgggaagaatgtgtgatatattaatatttacatcactgaggagaattgcaatacattccttttatagtcacatggaagttttaggaaaagctttgcttctacatatatatatatatatatatatatatatawtttttttttttttttttttttttttttttttttgagacggagtcttgctatgtcataaaggctggagtgtggtggcatgatctcagctcactacaacctccgcctccaaggttcaagcgattctcctgcctcagcctcccaagtatctgggactacaggtgcatgccaccacaccccggctaattttgtattttttagtggagacagggtttcactgtgttggccaggctggtcttgaactcctgacctcaggtgatctgcccacctcatccttccagagtgctgggattacaggtgtaagccaccatgctggaccccaccaagatattttgacctatggatactataaatcatataatcttttttcctttatctttgtggattcatgcaaaagccagagccaaacttgtggctctaatttattatttatttatttactttttaagatggagtcttgctctgtcgcccaggctggagtgcagtggctagatcttggttcactgcagcctcctcctcccgggttcaagcagttctcctgcctcagcttcccgagtagctgggactataggtgcacaccaccatgcccggctaatttttatatttttagtagaggtgaggtttcaccatgttggccaggatggtttgatctcctgaccttgtgatccaccctcctcggcctcctaaagtgctgggattacaggcgtgagccactgcgcctagcctcttgtggctctaatttattatgtagtactctgtggtctgtatattaaygtcttgcctttatcttttatattatatggtaaaaccctgatttttgtattttgaattttcttgtttaattgtacacatttttgtactggtatatcaatagctaatggcctctccccagaccaatgaaattggcatctttttagggggagagggttagattgggtctcaggctctggaattttttaaaaagctcaccagatagtgctggtgtccagctagaattttytttttggattccacactaaaagcttaggccataaaagcaaaaataaataaatggaatgacgtcaaactgaaaagcttcttcaaaacaaaggaaacaatcaacaaaatgtaacaacctatggtctgggaaaacatatttgcaaaccatttatctgataagggattaatatctaaaattcatgaagaactcatataattcaataatagaaaaataatctgattagaaaatgggcaaaagacttgaacagatgttttttcaaagaagacataaggatggctgacaggtatatgaaaaggtactcaacagcattagccatgcagaaatgcagatcaaaaccactgtgggcgtcacctcacaccccttagggtggctgtcataaaaaagtgaagtgataacaaatgttggcgagggtgtggagaaaatggaccccttgtacactgttggtgggagtgtggattggtacagccatgatggaaaatagtatggaggttgctaaagaaatgaaaaatagaagtactrtatgacccagcaattccttatcgggcatatacstaaaggaagtgagatcaccttataaagatatctgcactcccatgttcattgcagtgttatttacattagccaagctgtggaaacaacctgaatgtccactgatagatgaatggataaagaacatgtgatatgcatatataatggaatattattcagccttaaaatgcagatactgccatttgccacaacatggatgacctggaggcagtatgctgagtgaaataagccagacacaggaagamaaatattgcatgatctcatatgtggaatcttaaaaaaaataaaaaaaaagagtcaaatatacagagtgaataaaagagtgggttaccaggagcaagtgggtggggaatgggaaatgtaggtgaggggyaagaaaatagcaagtatgtaggatgaaagagcctagagatctaatgtgtaacatgtagctaataagaggactgtagctaataaaattgtactatatttggaattcctgctaaatgaatagatttttagctgtccttgccacaaaaacaaaccaaaaaaaaaaaaaaaaaggtaactatgtgggttgatatatatgttaatttgcttcactgcagtaaccattttgctttctatatgaatcccataacatcatgttgtatgctttaaatatatacaataaaatttatttaaaaaatgaaataaaatatatggttgatataaaaagaataaaagctcaccaggtagtgctgatgtccacctagagttgagaatcacttttctagagcaagagtgggcaggtgtttcctgtaaagggccagatagtaaatattttaggctttgcatgccatatggtctgacacaattactcaactctgctattgtagtaagaaaaccatagatgatatgtaaggaatggatgtggctatgttttagtaaaatgttatttgcaaaaatggggagaagtatttggcctgagcagggacatagtttcttgatctttgttatacagcctgaattttaattactatgctagaatctaatggtagtggttgatgatggaccaaaactgtattggtgtggcccatatactgaggtgaatgcctttttaaaaatgcttttgtatcctgttaattkgtgtttagatttctaagtgattaaattacctatttgcctgggatctgatgtgataatttattaataaattattattttttgtctcttgtttctgtgtgaacagaatatccctttgttcacatctcagattttttggaatagcagtagyatagaaaattcaattgattacagtasagattaattgatacttacagttttgtaakttttatactcttccagaatagattaagaaattaggatacacgtaatttgtcaggtagtgtcatactggtcctgatttttgatttggaaaatgtgattaatgaatcactaggctggagatagctaagactattctgtgaaactgtgttgtaagctggtttaagtgagtgtcttagtctgtttgtgttgctacaaaggaatacttcaggctgggtaatttatttgacttgtggttctgcagaccgtataagaagcatggtgccaacatctgcttctgatgagtgcttcaagttgcttctacttgtagctgaagggaagggagctgacatttgcagagatcacttggcaagaagcaaggtggggaggtgctagacccttttaaacaaccagccctttggaagtagtagagcaagaatttacctgaggaccccaagccattcatgagggatcctcccccataacccagacacctcccattaggatccacctccagcattggggatcatatttcaacatgaggtttgaggggacaaacatctaaactacagcagtgaggaaatacaatcgatggaaggacaaggtacttttgctagtattcatagaatcttgaatttgttttttttgtttttgtttttgttttttttgatacaggatctctctatgtcaccccggctggagtgcagtcgtgtgatcatagctcactgtggtcccaaagtcctgggttccagcagttcccttgccttagccttccaagttgttgggactacaggcacgtgctaccatttttgccatctttaccatctttaaagtgcaaactttaaagatttatttatttttattttttctgtagagacatggttttgctgtgttgctgtgtctgctctcaaactcctggcctcaggtaatcctcctaccttgacctcccaacgcattgggattacaggtgtgagccaccaagcctggcatgtttttttttttttttaaacagaagtacttctttttctcaagtcagttaagggtggtgctgattgtgacagtgttaactaccaccctacctagtagtttgttaaaagatgcattatactgcttaagtaatttcctagtaaagttacctttttttccccttatttttgtttttgagacagggtcctgctctgtcgcccaggctggagtgcagtggcatgatctcggctcactgcagcctcaacctcctgggctcaagcagtcctcccacctcagcctccccagtagctaggactataggctcatgccaccatgcctggctaatttttatatttttgtagagatgaggttttgccatgttctccaggctagtctcgaactccttagctcaagcaatccactttcctcagcttcccaaagtgctgggattacaggtgtcagccaccatacctggctagttaaatttatttgggcatgaattaaagatgtggttttgtcacttcagtgaaggataacctagaaacgtgttaaatgtttaatttttgtttcttccatttatagaaccctatgtgtagaacatcaattgtttcatagatcaaaaacatgctcagttatcctgagaacatttactttctcagtctccgctctttaccctcccagtgaattaaaattcatgcggtatgcagagtagttaatgatgacttggagtggttcatcatagaggccacattagaattatacttygttcatttttagaattataaatggaggcagtgtggcatagtggcagaccgtggtctttgggagacgtagcggttctattcttcctagcagtgttatcttgggcaagttatttaaccactacaaatttctttttcctcattgtttgctaggctaagtgggatatttcacttaaagatgtctttcttgtttatgtgtcacagaatacatattgcaacagaatccttgtctccttttttgtggcctctgatttccacaatctagtttataaaactgcagctgaagtgatgtttctaaagcctgaaactagtcatattttttcttcctaaaaattctttagtgtttccccactagacttacaatgaaatccacattccctaaaatgctctcaagggcctatagtatttctggagccttgtggtatattcccccattgggtctactgtcgtaggcttactcacctttaaacagatactgttcatttcattctgcttggaaccctgtcctctgctccttcctcttccctttccctaaactgattctgatgtttagaacattaggtaaaatgaagttcccatacctcaggtgcatgtgaaagattaagagttggccgggtgcggtggctcatgcctgtaatcccagcacttcgggaggctgaggtgggtggatcacgaggtcaggagttccagaccagcttggccaagatggtgaaaccctgtctctactaaaaatacaaaaattagctgggtgtggtggcggtcacctgtaatcctagctactcaggaggctgaggcattagaatcgcttgaacgcaggagatggaggttgcagtgagctgagattgtgctactgtactctagcctgggtgacagagcaagactctctctcaaaaaaaaaaaaagtaataagattaagagttgtgtaaagatcagtatcagtgagctttcattagtgccttcatctgtgaaaccaagatacctgcttaggttactatgtgaaaatgctttgaaaactaagctgggtgtggtggctcatgcctctaatctcagcactttgggaggccaaggcaggtggatcacttgaggcctggaatttgagaccagcctgggcaacatgaggaaaccctgtctctactaaagatacaaaaattagctgggtgtggtggcacccacctgtaatcccagctactgaagaggccgaggcatgtgaattgcttgaaactgggaggcagaattgcagtaagctgagatggattgcaccactgcactctagcctgggcagcagagtgagactctgtttcaaaaacaaaaacaccagaaaaagaaaattaaatactaattatatgtaactgttaacagtattgccgtcaagtatttgtaagaagacatcatttcctaatgtttgaagttaaagattattctaattgtgaatagaattgtgtccccctgccatccttatgttgaagcctcaaacccgtctcccccaccatgtgactgtgttggagctagggcctttaaggaggtgaatatggttaaatgaggtcataaggctggagccctgatcccatagagctagggtacttataaaagaggaaatgacaacagagattggtctctctctgccatgtgaggacacagcgagaaggtggctgtctgcaagccaagaagaaatcccttgctagaaccagaacctactggaaccttgattgtggacttcctggccttcagaactgtgagaaaatacatttctcttgttgaagccatgcagtctgtggtattttgttaatggcagcccaagccgactgtatatttaatacagtttaaaatataattgccttgtgggaaaggcaaactagagtgatttctcaggtaacattttaatgagtaacataaccagctataaattactggactagtttagaaaacagcctcagtaatttgagaattactttagtagatcttttgtctgtgtaactagggggtattattataaattgttactttctggttcagccaagaccctttttatgaaagtactttctcctcccatataaaagttaaatcatttagggtgtatttggctataagtaatacaactcagttaacttaaacagtaaggagcatttattatttcatgtaacaaattccaaggtaggaatttagggttagagttagggttaattcttcagctcagtatcatcaaggattcacattctttacattttcaccctcagttttggtggggtggtagggaggtactattagccttattcttagtttcctggtatctgcaagatggttgcaacagaaatgttacgyggctattgtggatcatttggaaaatgtcacaagagggaaaggatgaaaacataaatcactcataatccaactatttacatgcctatcttctcattgtctggcatattagtttgtacaggtactaattatatcagacaaaattaggtcacactgtttacacaaatacatgttgtcggtttccactaagatactatcaagaggtcaggcgtagtggctcacgtctgtaatcccagcactttgggaggctgaggcaggtggattgcctgaggtcaggagttcgagaccaggctggctaacatggtgaaaccctgtctctactaaaaatacaaaaaatagccaggtgtggtggcgcacgcctgtagtcccagctactcgggaggctgaggcaggagaatcgcttgaacctgggaggtggaggttgcattgagctgagattgcgccactacactgcagcctgggtgacagagcaagactgtgtctcaaaaaaacaaaaaacaaacaacaaaaaaagatactatcaagagaattatccatgtcattaaaattctcagtaaaaataggctgggcacagtggctcatgcttgtaatcctagcagtttaggaggctgaggcaggaggattctttgagttcaggagttcgagaccagcctgggcaacatggtgagaccccaactttacaaaaaatgcaaaaaaagttagccagacatggtggcatgcgcctgtagtgccagctacttgggaggatcccttgagcccaggatttcaaggctgcagtgagccataattgagccactgcactctagcctggacccagtctcaaaaaaaaaaaaaaaatattagtaaaaatatttttttcccttcaagtaatggttgttgaaaaagttggatacagaaaaatagaatattaaaaattacccatatctcacaactcagaaataaccactcatgtatcaatatatttccttttagaacatttgtgtgtgtgtgtgtgtgtgtatttaaaattaggtatagaataattttttttttttcctttggagacagggtctaactctttcaccgaggctgaaatgcagtggtgtgatcatggcttactgcagcctcaaccttctgggcttaagtgatccttccatcttagcctcccaagtagctgggaccacaggtgtgcaccaccacaccctgctaatttttaaattttttgtagagacgaggtcttgctgtgctgctcaggctggtcttgaactcctgaactcaagtgatcctcccacttgggcctcacaaattgctggaattacaggtgtgtgccattgtgcctgactaattttagttttttgaggaatcttcatattgttcttcataatgactgtactaatttacatttcaaccaacagggtatgggtattcccctttctccatgtcctctctagcatcttttattgcctgtctttttgatataagccattttaactgggggtgagatgatattgcattgtgggtttttttttttttttttttttttttttgaggtagaatcttgctcagttgcccacattggagtgcagtggcactgcagcctctgcctctcggttcaggtgattgtcatgcctcagcctcttgagtagctgggattacaggtgagtgccaccacacctgactaatttttgtatttttagtagagatgggatttcaccatgttggccaggctgttctcaaagtcctgacctcaagtgatttgcccgcctcggcctcccaaagtgctgggattacaggcatgagctactgtgcccggcttaatttttgtatttttagtagagacagggtttcactatgttacctaggctggtctcgaactcctgacctcaggtgatccgcctgccttggcctcccaaagtgctgggattacaggcgtgagccaccgtgcctggtctgttgcattgtggttttgatttgtgtttctctgattaatgatgttgaatattttttcacatacctgtttgccattcgtatgtcttctttkgtgtgtgtgtgtgtgtgtgtgtgtgtgtgtgtgtgtgtgkgttttgtatgtyttgagaagtatctgtccagatcttttgccattttccttttggattatttgtttttttgccattgcattgtatgagctccttatatattctggttrttggtcctgtgtcagatggatagtttgcaaatattttctyccatctatgggttgtcgttttactttgttgattgtttcctttcttgtgcagragctttttagctttatgtaattccatttgactttgcyttgttgcctgtgctttttgaggttgtcatttttattgactagatgatattccagtatattaattttttttcttttttgtatttttgagatggaatctcgctctgtcgcccaggctggagtgcagtggcgtggtctcagctcactgcaacctccaccttccgggttcaagcgattctcctgcctcaccctcctgagtagctgggattacaggcgtgtaccaccacgcccggctaatttttgtttttttagcagagctggggtttcaccatgttggccaggctggtctcaaaactcctgacctcaggtgatccacccactttggccttccaaagtgctggattacaggcatgagccactgtgcccggccccagtatattaattttttaataatttgtcattggctatttagatctcttctagtttttttggtgttgtaaataaaggtggcatgaatatccttgaacatacagattttttgcatttggccatttatgtcttttgggtgaatttcttgtaatgaagtgtgtgtgtgtgtgtgtgtataaatattgtgatatacattatctgattgtattttttttagtagtacgtgagagtatttgcccaagctatattcttgatcatcatggctcttgctatataattccttttaagaagaattaaaattatatgagaagataacttgttaacatggaaggagttaatggaaggaagcaaatgttttggactaatagagctattttctattagtaatacttaagtatataacagattatgtgttgaaatgtagttctttctagagctggggtttttcaggttttgcattaagactgtttttgaaatgtaagccttgtagtatggtgtaggatggtaaaagagtttggggaaagcgtcattgtcttaggctatagctgtggtaaaacttaaaatttcagaggctaattatctagttattgggaataccctggggatacagattgaatcgaaaaggcttaaaaatattctacattatagttaaacttggaattctgtatactgagtaagtatgctagcagttgattgttctgtgtagctctcccgttaaagaagagagtatgccccaactggcattcctgtcagtcacaactgtgtgacaccacaggcagcagaggcttccctagatgttgctgggaatgaatgggcttccagacctcttagtagttgcttaagtgggaggtggtagggaggggctgtgttaaagcttataatgaaaggtctcaacctgaattgtcatgcaaaaaatttattttttttgctggatacttgccataacctggtaggatttctttttagttttcacttttattggaataggcgttctgctggagaaaattagatccttttagtggtagctaggcattgcatatatgtatgccctagtccccatgactctgtacttaatagattatttgtcagtaatgaaccagcatttggcccatgtgctcttttttccctgatcctctcatctctccccacagagtgattatggattcttcctggaaggtttctcaggtctctaaccaaccagcccgtttgttggccttcagcaaagtagatgttagtttttgtgtacttcatagtgtataaaattattcctgcaacaggtattaaaacctgagatttaaaatcctttccattggtgttaacatacattatttatttatttattttattttattttattttttgagatggagtctcactttgtcacccaggctggagtgcagtgacgtgatctcggttcactgcaagctccgcctcctgggttcacgccattcttctgcctcagcctcccaggtagttgggactacaggcgcccgccaccattcccagctaatttttttgtattttttaatagagayagggtttcaytgtgttagccaggatggtcttgatctcctgacctcgtgatccgcccgccttggcctcccaaagtgctgggattacaggagtgagccactgcgcccggccaacatactttattttttaaaaggccgttaaattgagaagtgtttcttatatactgtatttcatgaattctagtaactgcccctcccctacttagtatctctgaaattgggaaacactttacaagtaatcatgtccttaaaaagtcatcagccagtcagcggtcatggcatatttgtcattgtttgtgcttatgtgaatttggttgtttttccttgtggcttaactggattattgcacccgtaaccttttgaacaacaaaccatttaaggaccatttgaggataggatagaagccaagtttttgttgtaaaacatttttttgacatcttctggtaaaatcaataaattagcttcatcagcgtttgcagaattggtgttggcagcttggaagaaaatgatgggaagaaaactctggaaatagctgtgcaacgttattttagatgttccattatttgtaaggggaagttcacagcatcagctattaatatatagtattcttgacacaatgttcaatctgaatctaatcatgaggaaacaatcagatgaatccaggttgtaggatttttttacaagatacctggatttaaaaaataatttctatgttttgaaaggagaaaagggtcaggattgggagtgtgttctgtatttaaggatatgaaatagaaatatgactgttaacagctatgaacaatctttgattagatcttagatcatatggaataaaataaaacatacgtaaagaggtttttttttcctttgagacagagtctygctttgtcgcccaggctggagtgcagtggcactatctcggctcactgcaagctccgcctcctgggtccaagtgattcttaygcctcagcctcccgagtagctgggattacaggtgcctgcgaccactcctggctaatttttgtatttttagtagagatggggtttcaccatgctggccagkctggtcttgaactcctgaccttaagccatccacctgcctgggcctcccaaactgctgggattacagatgtgaaccaccatgcccagccacatgttttgtattttttttttttggaagttggagaaatttgggtataggtttggattagagataagttaaaagctataaaagacaaatatgttgtgacagatgtgacatttctagaaggaatgggaggagagttaaagacatggaaacaaaatggtagaaaacttaaaaaaatgcacatgggacccttgttttgttatctaagtggggttattagactgttatcagtcccagcaactcaggaggctgaggtgggaggatcagttgaacccaggagatcaaggctgcagtgaactatgatcgtgccactgcattccagccttgggtacagagaaagacactgtctttaaaattaaaaaaatgggcaaaatatttgaacattttatcaatgaagaaatggatgctgcacaagcacttgaaaacattatgatttgatagcaaaatggaaattaaaaccataatgagataccactatatacctactagaatatttaaaattaaaaagactgaccataccaagtgttggcaaggatgtggagcactagaattttcataagtttctagtgagaatgccaaataatgttgtttctgtttctttgtaaaatagtttggtagttttgtttttttttttttttttaaaggagacagggtcttgttctgttgctcaggcttggagtgtagtggtgcaatcacagctcattgcagcctcaacctccctggcccaactgatcctcccacctcaagctcccaagtagctgggaccacaggcataagccaccaggcctatctgattttttatttttgtagagacagsgtgtcactatgttgctcaggctggtctcgaactcctgagcttaagcagtcctctcgccatgacctcccaaaatgctgagattacagtcatgagcccccatgcccaactggtagtttcttacaatgttaaatatacacttaacttaccatgtgactcagcagttgtatctttaggtattacccaaaagaaatgaaaacatacctccacacaagaccttctactcaaatattcwtagtagcccagaactggaaacaacccaaatgtccatcagctgataaatggagaaacaaattakgatacatccatamaatagaacactacttagcggtaacaaggatgaatcttaagggcattctgctaagtggaagaagccagatacagaagactgtagctttcaattctatttatatgaaactctagaaaaggcaaaactgttgtgacagaaaggaagtcagtggtttccagggtccggaggatggggagggagttatgagggaaatgttctttatcatggtggttatactactgtacccatttatcaaagcacattgaattgtacactgaaaatttttaaattttaatgtatgcatttcgtacttaatattaatgctgacctcccttcctcatccaagaaaaaaatgaggtgatccatagcatcctacaaaagtcgctagtgactttttggtttgtttttatctttttaatattgttatgaagtcttaaatgtaaacattttgtgtgtttcattccattgaagttatgatcctcattgatccttacattgagtccttttgacatgaccctagaaaattcctcggtggcttttttgttttgttgtttatttattaaaattgacatataaaaattgtgtatatttatgatgtacaatattttttgaaatgtgcatacattgtggaatgtctaagttaagctaattaacatacattgcctcacaaagtttctttttgtggtgagaaccttaaaatttactctcagcaattttcaagtatacaataagttattattaactatagtcaccaaattgtaaccaggtaccttttgatacacagcctgttttaggtgcatcactatacggattataggtggtgctccatggctgctagacagtctttattcttagatcttttcattggacagagctgggatattatgatgtgataaatacattttaggtttaaactggtgctttttttttttttttgagacagaatctcgctctgtcacctaggttggagtgcagtggcgcgatctgggctcactgcaagctccgtctcccaggttcacgccattctcctgcctcagcctcccgagtagctgggactacaggcgcctgccactgcgcccggctaattttttgtatttttagtagagatggggtttcaccgtgttagccaggatggtctcgatctcctgagctcgtgatccgcccgccttggcctcccaaagtgctgggattacaggcgtgagccaccgcgccyggctaaactggtgcttttagtttaaatctagaactaaaggattctttcttaacctggattttcttatgtcaaaatctattttgaaccatgccccaaatttcagttctcagtgacataattaatgatttgctatatcccaccctatgcaaataacagtatcggtaataatttcagtattaacaccagcaataaagagactaaaaacaatttcagtttttccttcccctctttcaattacttttattctaatggtaaatcctattaagaatgtacawtcgaattactgtgctttgaagccacttgtagagtggtttctctctggtttaggccactaattggatgcacagttaggctcatttgattaatttacctttactttggggtaattcctttttaaatttaaattttattttataattgtgtgaattatttacaggcatgcttctctttattgtgctttgctttactgcgctttgcagactgcgtgttttacaaattgaaggtttctggcaaccttgcatcgagcaagtgttggtgccgtttttctaagggcatgtgcttactttgcatgtctctgtcatattttggtaattcttaaaatatttcaaacctttttattattactgtatctgttatggtgatattcgatgttattactgtaatcgttttggggcaccacaaactgcactcatgtgagatggtgaacttagtaattgttgtatgttctgactgtaccaccaactgaccattccttctgtctctccctctctttgggcctccctattgcctgagatgcaacaatattgaaattgggccaattcataaccctatgttggcctctaagtgttcaagtgaaagaattgcgtgtttctcatttaaaataaaaaactactaatgggagcttagcgaggaaggcaagtcaaaagctgagataggccaaacgttaagcctcttgctgcaaactttagctaagttgtgaatgcaaaggaaaagttcttgaaggacattaaaagggctagtccactgaacacatgaatcataagaaagagaaaagctggccgggtgcggtggctcacgcctgtaatcccagcactttgggaggctgaggtgggtggaatcacaagggacaggagttcaagaccagcctggccagcatggcaaaaccctgtctctactaaaaatacaaaaaatacctgggcatggtggcttatgcctgtagtcccagctacttgggaagctgaggcaggagaattgcttgaacccagcaggcagagtttgcagtgagccgagatcactccattgcactccagcctgagtgacagagcaagactccatctcaaaaaaaaaaaaaaacaaaaaacagaaagtgaaaagccttattgctgatagggagaaagttttagtggtctggatagaaggtcaaaccaggctgggcgtggtggctcacacctgtaattcccctgcattttgggaggcggaggtggatggatcacaaggtcaggagatcgagaccatcctggctaacatggtgaaaccctatctctactaaaaatacaaataattatccaggtgtggtggcaggcacctatagtgccagctgcttgggaggctgaggcaggagaatggcatgaacctgggagaaggagcttgcggtgagccgagatcacgccactgcactccagcctgggcgacagagtgagactctgtctcgagataaaaaaaaagaaggtcaaaccaggccgggcacggtggctcacgcctgtaatccttgcactttgggaggccgaggctggtggatcatgaggtcaggagatcaagaccagcctggacaacatgatgaaatcctgtctctactaaaaatacaaaaaattaggcaggcatggtggctcrtgcctgtagtcccagctacttgggaggctgaggcaggagaatctcttgaacctgggaggtggaagttgcagtaagccaagattgtgccactgcactccagcctgagcaacagagcgagactccgtctcaaaaaagaaaaaaaaaaaaaatcaaactagccacaatattcccttaagccaaagcctaattcagaacaaggccctaactgttcagttctgtgaaggctgagagaggtgaggtgagaaagctatagaagaaaagttggaagccagcgggttcatgaggtttaaggaaagcagccatctctataacgtgaaagtgcaaggtaaagcagcaagtgctgatgtagaagctgcagcaagttacccagaagatctagctaagattatcgaaggttgctacacttaatatcagattttccatgtagacgaaacagtcttctattgggagaagatgccgtctagggcttttacagggagagaggagaagcccatgcctggccttcaaaggctaggctgactctcttgttaggggctaatgcagctggtgactttaagttgaatccagtgctcatttgccatgctgaaaatcctaaggccctttagaattatgctgaatctgctctgcttgtgctctttaaccagaacaaccaagcctggatgacagcatatctgtttacagcatggtttatggaatcttttaagccaactgttgagacctgctcggataaaaagattccattcaaaatattactgctcattgacagtgcacctagtcatctaagatggtgatgtataaggagattaatgttgttttcatgcctgctaacacatacttattttgcagccccatagagtaattttgactttccaatcttactatttaagaaatacattttgtaaggctatagctgccttagatagtgattcctctgatgaacttgggaaaartaaattgaaaactttctggaaaggattcaccattctggatgccattaggaacattagtaattcatgggaggaggtcagaatatcaacattaacaggattttggaagaagttgattccagccctcatggatgatgctgaggggttcaagacttcagtggaggaagtaactgcagatatggtgggaacagcaagagaactaatgagaattagaattggagcccgaagaagtggctgcaatctcacaagaaaacttgaatggatgagttgttccttataggtgaacaaaggaaatagtttcttgagatagaatctactcctgctgaagacgctgtgaaccttgttgaaatgacaacaaaggatttggaatattacataaatttagttgataaagcatcggtagtgcttgaaaggattgactcattaaaattttatttacttatttatttttgagacagagttttgctcttgttgcccaggttggagtacggtggcacggtctcagctcactgccacctctggctcctgggctcaagcgattctcctgcctcagcctcccaagtagctgggattacaggcacataccaccatgccaagctattttttgtatttttagtagagacagggtttcaccatgttgaccaggctgatctcgaactcctgacctcaggtaatcctcccgcctcagcctcccaaagtgctgggattacaggcgtgagccatggcacccggccaaaaaaaatttttttttcagagacagggtctcactgtgttgcccaggctgtcctcaaactcttgggcttaagcaattctcctgcctcagtctcccaactggccaggattgcaggtacaagccgccaccacacccaggcttgatttcagttttgaaagaagttctactgagggtaaaatgctatcaaatatcgcatgccatagagaaatcttgttaaaacaaaagtcaatagatgcagcaaatttcattgttgtcttattttaagaaattgccccagytaccccaaccttcaaaaatcccaccctgatcagtcagcagccatcaatatggaggcaaagccctccaccagcacacaaatattaggactctctgaaggctctgaagatggttagcattctgttttaagcaataaagtatttttaattaaggcatgtacctagtttttttagacatagtactatcgcacatttaatagactacagcataatataaacataacttttatatatacactgtctctagccaaaaccgcagtatctttgcagtgtgcctgtatgtagttccaaagagaaatctgtgaaacaagatatgcttaagggattctatctactgtccatgttttctctatcctatttattacctctcctcctgtatgtgattttttttttaatgccaaggtttgtttttcctttaaaaaaacatgcattttcatatttccctctgttaagaagtagcatattatacacattttttcccacattttttttttcaccttagcaatattctggagatcatggagtcatggtaacagagaaattccttgaattccttgtccttattatggcagtataatactctattgtgtggagatattatagcttattcaaacagtctcctattgatagttatatgggttgtttccagtcttctgctattatagatagtgctgcagtgaataactgtgtacatatggttttgtatttttgccagtgattttttgagatacattcctaaaagtgagcttactgggtcagaaagtaaatctgtgtgtaatattgctggatatcacttaccagtgcatcagagttttttctcacagctttgctgagtgtcttgtcagacttttgtatatttgtcatttgggtgaatgagaaatagtatctcatattggtttgcacttgcatttctttcctataatgagtgaggttgaacatcttttcagtggttaagagtggttccattgcttttttggtgagctttctgttagatctctgttccattttttttttctgtgtagaactggaagggacgtgagaccattttgtttagtctctgagttcatgacactgatacctggagaaataaatgattttcctgaagttgtaggtagctaggatagcctttttttttttcatttttagattatatgttagtgatatttactctttgtggtgtaagttgttgattccccttcttacccacctacagtttgtcaccttttaaccttgctcctctttgaggagttcttgccttctgagttatctataggagtttgggaagaaggggtgggtaaggaattggagcacataagattcacagtagtttttgtggggcatgataggcttgaatcatcatagataacaaggaagttggatttccgatggtggttagtggacacaggaatataaggcagattggatttagtccatttcattgtaagtggattgggagcttgaggctgacagtaaagtccttatgatgtaatgcagtgaattggtgatggaaagggtctaggcaaggagaaccagttggtgcagtgtgtctctgatactgtgactacagttagtggcccctttagtggatgagctactcaggagagagtggttcccagctggcacatagggatttctgccatggcttaattcagtagtatcctgagactatcatattggtacagtgagtttttttttattgaatttctctagtaaaataatataactttgcctttctatagaatatatatttaatgaatgttaatctaaataagtatttgttgtttttgttcttatttcaggctacagacaagagaaaagctttagaggagaccaaagcctatacaacccaatctctagctagtgttgcttatcaaataaatgcattggccaacaatgtactccagttgctggatatccaagcctctcagcttcggagaatggagtcttccatcaatcatatctcacaggtaacagcttataaaatgctttaaattcaatttaaaaaaaactacagcatatgccaaagaagtaaatagcctgcatgtatggatttctgactcatcttactggtgataatcattaacactgttttagtttggtaaacctgctgtttttcttttagtcctttttttatcatgataaggtaaacataacataaaattgaccattttaaccatttttaagtgtataattcagtagcattaagtacattcacattgtacaactgtcaccactgtcctactgttaagagcttttctgacgtaaagttatttgtacataaagaacagaatttttataagttttgacacacatgtatacccatgtgaccatcaacacattcaagataatgaaccatcccctttccccctgccaaatttcttcattctcctacgtaatccctccctcktgtcccttgtccttagggtttctgtccctagagattagtttacattttctaaatttttatataaatggaatcatatagtatttactawttttttttttggtctggcatgttttactatggataattattttgagattcattcatgtttttgcatgtaaaagtagttcactcttttattgctgagtagtttctattgttacacattttgtttatgtgttcacatgttgatggaaatctgggttgtttttaggttttggctattacaaatcctatgaaaacatttgtatgcaaatctttgtgtggtcatatgcttttatttcttttgggtaagtacctctgtgcagaatggagaggtcatgtggtaggtgtctgtttcactttagaagaacctaccaaattgtttttcaaagtggttataccacttagtcttagtttgctgagtgttcttatcaggaatgggtggtgaattttatcaaacgcttctttgcatttgttgaaatgatcatatatatgtgtgtgtatgtatatatatatatgtctattaatatggtgaattacattggtttgtgtgtgtattaggaatttttgtttctgtactcttgagtgctgttgggctgtggttttcttgtaatgcctttgtctggttttggtgtcagtgtaatgctggttttattgactgtaatgggcagtattccatctggacctggagtgttcctggtgaaaaggattttaactacatatttaatttcctttgtggatacaagcctattctgtttatttgtttttccttgagtgagctttttatctttctaggaatttagctatttcacctaaattgacagatttatttgcataaaacatttataataatcctcctgctttgtttttttttttttttgagacaagagtcttgctctgttgcccaggctggagtgcaatggcgtgatcttggctctctgcatccttcgcctcctgggtccaagcaattctcctgcctcagcctcccaagtagctagaattacaggcgctcgccaccacgcctggctaattttttgtatttttagtagagacggggttttgccatgttggccaggctggtcttgaattcctgatctcaagtgatccacccaccttggcctcccaaagtgttgggattacatgcttgagcgacagcaccctgcctaatctcttattttaaaaatatctgtagaatctataataatttcacattgctcattcttcatattggtaattggtgtcatctttcttttttaaactaatcattatggctagtttaccaactttatcgatattaaaaacatctttggccttattaattttctatgtttttgttttctgttgcattgatttccattctgatctttattatttctttttcttttccttaccttgggattgatttgctcttattttatacttttttttttttttttagatggagtcttgctctgatgcccaggctggtgtgcagtggcatgatctcggctcactgcaacctccatctttcaggttcaagcctttcttgtgccttacctttctgagtagctgggattacaggtgcacctcaccacgcccagtgaacttttttgtatttttagtagaggcagggtttcaccatgttggccaggctggtctcaaactcctgggctcaagtgatctgcctgccttggcctcccgaagtgctaggatcgcaggtgtgagccaccacacccagccttattttatactttattaaggtgaaagccaaggtcatttaatttacttgagacccttaatcttttctaacataggtgtttaggtctgtaaatgtccctctaaatagtgtattattgggaggccgaggtgggtggatcatgaggtcaggagttcaagaccagcctgaccaagatggtgaaaccctgtctctactaaaaatacaaaaattagccgggcgtggtggcgggcacctgtaatcccagctactcactcaggaggctgaggcaaattacttcaacctgggaggcggaggttgcagtgagccgagatcgcgccactgtactccagcctgggtgacagagcaaaactctatctcaaaaaaaaaaaaaaaaagtgcattagctgtatctcatacatttagatatgttatgctttcattttcatttagctgaatataatttctaagtttgcttttttatttctttctgacccaggggttattggaaatgtgttgcttagtttgcaagtattttcrggttttgcaaggatatttctgctgttgatttttctaatttaatttcttactggtcagaaaaatacacctcatttgatttttttttcattaagtagctttcccccgcagctttattgagttataattgacacaaaaatcatatatatttaagatgtacaatgtgatgttttgatatacatatacattgtgaaatgattaccactatcaagctgactagcatatctatcacctcacacagctactttttttgtgtgtggcgagagcatttaagatttcctcttttagcaaatttcaagtctacaaccctatattattaactatagtcatcatgctgtacattagatctccagaacttattcatcctgcatagctgaaactttgtaccctttgagcaacagctccccatttcccttaccccctagtctctgacaactaccattctactctctgcttcagtgagctttgatttttttagattccacatctgaaaaagggagatcattcagggtttgtctgtctgcgcctagcttatttcacttactgtaaggtcctacaggttcatctgttgtgtcatgttgcaaataacagaattttcttttttaaggctgaataataggaattgtagtctgtttaaataaatgtatatgtatatcccccccatattttcctattcatccattgatagacacctagattgatgctgtgtcttggctattctgaataatactttatatgctgtgagtcctttcatatttattaagaattgttatatatcccagaatatgctctgtcttggtaaatgttttgtgtgcatttgagaagaatgtgtatttttctctggtcaggtggaatgtctataaatctcattaagtcaagttggttgataatattcaattcttctgtatctttactgattctatctaattgttttatcaattattaaggaaggtaaattgaaatctccaactataattctgaatgtctatttttctttgcattttagtcttttttctgttacgtattttgaagtgatactatattaggtacacaaatgctttggcttgttaggtccacttgatgaatagaccctttatctttgtaaagcctctttttatcttgggtagtattcttcagaaatctgctttgtctgatatgaatacaaccattccarctttccttttatcctctttttctgcctccttgtgtgttaatggagtgaattttttttggggggggtgctgatttggtgtaacactttgttctgcttctctcttttattatttcattcatgtttgccttagggcttctggtaaacatctttaaactttttaatatcacttgaaggtagactatgctattacttcaggagtatgtttaagactttgtaatagttgattccacttctctcctgtcttagggctgttggtgtcatgcaytttcttttttcttttattgagacggagtctcgctctgtcacccaggctggagtacagtggtgcgatctcggctcactgcaacctctgcctcccacgtgcaagcaattctctgtctcagcctcccgagtgagtagctgggattatgggtgcccgccaccatgcccggctaatttttgtatttttagtagagacagggtttcaccatcttggccaggttggtcttgaacccctgacctcgtgatccacccacctcggtctcccagagtactgggattacagattacaggtataagtcgccacgcctggcttgtgtcacgcattttctttttgtgtatgttttaaaccccacaatgctttgctcttttttttttttttttttgtgacggggtctcgctttgttgtccaggctggagtgcagtggcgtgatcttgcctcactgcaacctttgcccctgccttcccccaccccaccttcccagtttcaagtgattcttatgtctcagcctactgagtagctaggattacaggtgcatgccagctaatttttgtatttttagtagagacggggtttcaccatgttggccaggttggtttcaaactcctgacctcaagtgatytgcctgccttggcctcctaaagtgctgggattacagacatgagccactgtgcctagccattatttttgttttgaaaagcaactagctttgaatgagatttaatatgaggaaattaattcctttatatttacccatagttattatttctgatcagaaaatatacattatatgatttgagtcctttcaaatttgttaggaattttttttttttttttttttttttttttttttttttgagatggagtcttgctctgtctcccaagctggagtgcagtggcaccatcttggctcactgcaacctctgcctcctgggttcaagccatcctcctgcctcagcctcccgggtagctgggacttcgggcatgcgccaccatgctcagctatttttttttgtagttttagtagagatgggatttcaccatgctggccaggctggtctcaaactcctgacctcaagtgatctgcctgcctcggcctcccaaagtgctgggattacagacatgagccaccgtgcccggccaggaattgttttatagcccagagttttggtggtttttattcccttggaatactttagcatgaagtgttgctctattctgctggtgatgagttctttcagcttttgtatatctaaaagagatttttgctttttatccctgtttattattgtggcagaatatgcataagataaaattgatcattcaaccatttttaagtgtacagtggcattaagtaccttgacattgttttgtaattatcaccaccattcatctccaaaacttctttcctttttccaaactgaaacaatgtacctgttaagcactaactctccatccgcaagtgatcctcccacctcagcttcttgagtagctgggactacggacatgtgccattgtgcccagcttattttcatgtttggtggtatcctgttgcctttttagattttaggacaaaattgatatagattggaactttgctaaaataattttttttgtagaacagaatctagtgtagagtgattcatgctggttcttgaggacttgcacaatgtctggcaaatgactggtttgcagtgtttactgaattaaaataaatctcttggccggacatggtggcctgtaatcccagcactttgggaggctgaggtgagtggatcatttgaggtcaggagtttgagaccagcctggccaacatggtgaaaccccgtctctactaaaaatacaaaaattaggcgggcgtgctagcaggcacctgtaatcccacctactcaggaggctaaggcaggagaatcgcctcaactcgggaggcagaagttgcagtgagctgagatcccaccagtgtacctcagcctgggcgacagagtaagactccgtcacacacacacacacacacacacacacacacacacaaagtctttgcaaaattacttaggaaaaatataatagaacctagtttttagttgattcttatacatggattataaccagaggatcactgtacattttatgtataggcagtgattattttgcatggttattggagattataaaaaatggtgatgcatgctcaaggtatacaaaacaatcttactagtcaatgggtaaaattatggttgttctgtgatctgtaaaattttttgtcaaaacattaaaatctctctttttgttataaatgaatagagaaatgaaaaaaaagttatgctaatgtttagtataccataatgtaaaacattcgaggtattgagaattaaagggttttatttcttaagaaagtagtttgaatagtgcttgctaccttctcactgtgtaagttgttatgaagcacacatttttttctgtgccttggcaaattgtcattctcctttctctgggtggatcagctcctctcaacattttatcctttggattttaaatgttgtgaaatatcttctagagtttctttaacataaagtttttatgggtatcattttatctgtagtatcttcttccctttcttctcagccactttgttcatttatgttaatacatttgccttcatgatattcttctggctgcatatctgtagtctcctgaatggcagcaatgttagcattcctgtatgcattatttctgttttaatcccatttacattcaattcgaatttcacctctatctagcattatcacttttcatgtatttgctgcagtttcatctttgttggccagttctctctttgatacccagttttgtaaaatgtcacaatggcttatcatttaggggacaaggaagcagcacaactatgtactttgtagtctgtggataaacttaatatcagatgtacagagaccattcaccaataaactttgaaacaaagacacgattggtaaccagtaatgatgctcatctgttacttatgtggacttcagacctagcagcgaagtttctgctttgtgcgattatttatagttcttgtggtaactgaaatttatttatttttatgtttttatgagacagaatcctgttctgttgctcaggctggagtgcagtggcacagtcatagttcactgcagctttgaactcctgggctcaaatgatcctcccgcctcagcctcctgagtagctgggaccacagatgcacaccaccatacccagctaatttttttgggtggtgaggtagagatgggatcttgctgtgttgcccaggctggtcttaaattccttgcttcaagtgatctttccaccttggccttccaaagtgctggcactacaggtgtgaaccactgcacctgaatgtaactgaaatttaaattgtgtagttggaggactggtgttaactaaaatatggtaactgaaattcatgcgtatcagaactgtgcaaaacaactgcctatattttgttttttcagtaacaaaacattttcaaattatttttcttctttatttaattatgaatattctctgtgttctgctgagcttactgaattcaattctcattctttggaagatgtcttaattcatacagatgtagttatttcagtagatttaaaaataaagctgttaatactatcaattgacttactgaatcataaaaaaattaaggtgactaggtaaatgaagcttttgtaattctgtaaattacattgaattacttggaactcttaaatgcagctgaaatctaattggctaaatttacataaaaacaggcttttggggggggcatttattcttaattggggaattaaaaagagtatttccttgctcttccaaattgctattcttaaaacattgtttaagtaaatgcattgtagtgaaagaaatttttttttaaatctctcagagctttatgagggatttacatctgtcataccttggctgttgagtggtgtgtttttagttaaaattctgctttataatctcttaatacagcatagattatgtgccaattaggacataatctyaaaatttagaattcagagcttgtttgagttttcagtttcaaaaaatttttaaactaaaacaaacaaaaatcatctccaattctatcaggacttggataaactaaaccttaattatttcaggaaagagtccctttcctttcagtgtggagcttttaactttctgtttgtgtgttgacatgttttagatttataaagttttctattttaacaattttatcccccatttttcctgtcttagattaagttaccaaatattagtagctttccttggtgaagtaattactgataagtcctttctgtaaccaatattcacttcttattttgtaaatttttaaaagattcttatagtgatatttcttatgacacagtagtcatctaaaggtgccagtcacttttcctggaaaatataggaagtaatactaggagaaagtgtgcaactgttaaattctttcacatcaccaactttttcacaattaaagtatttgctttgtagagtgcttagcaatgtccattatgatttcttttttccattggcaattttgggcttccctcacatcatggaagttagaactggaagggacatgagatcatttggtttattctctgatgttatagtttgtgacactgatgcccaaaaaaataaatgatttgcctgaagtcgtaggtagctagtataacattagaaatcaaaagatgggcatcttgactcatagatgatccactgattttctcttctgtactacaatgcctccaatttgtaatcagagtcttcaaaatttaggaattggatgaattgccccatccagtctatttctacagtgggctcacaaaaccttatataacaaaccttcaaagtaactgcatcttttaggagactgtttagttttatataggcaaaaacctagttactgtgggcactggggaggtagggcgggtacctagaatggaaacactaactgagtcagtgctctggtttctcagatgttttgttaggaaccttttacatcttaaattattgaggatctacgtgggctttggattcattgggtagatcttccagtatttatcatatcagatattcaaacaaatttaaaaagtatttaactcatttaacaataaaagaaatccactgttagtacaaataacattttaatgaaaaaaactgttatccaaaacaaataaatttatgagaagagtggcattgttttacatttctgaaartgtctttaaaatgtttggtaagacgatcactgggttctcatgtctgcttcttcattcactctgttgtgatttgttgtttgggttgaagtatgtgaagaaattttgcttcacaaaaatatgtagttagaaaagacaggatcttgggracttcaggagtctttagatcagtcagagaactattgctttatgtggttattacagtttagttcctatagattatgtattgcgaatattatatgcaggccatcatgctcccattttaaaagaatcacccaatttgataatacatccccacctgtagtttcttttggctctccgtcatacattttttgtttcatccttactgactgactacttggtgatatttttggtgccattatccccattatgaaggggcttcttcagattcctaatggactgttggtatttatcttagatttcctcagccagtttcttaaaggtgtttcatgatttttttttttttggcggggggatggaatcttgctctgtggcccaggctggagtgcagtgtcgtgatcttgacccattgcaacctccgcctcctggattcaagtgattctcctgcctcagcctcccaagtagctaggattacaggtgtgcaccaccacacctaggtcatttttgtatttttcttagagacggggtttcaccatgttgaccaggctggtcttgaactcctgacctcaagtgatccacctgccttggcctcccaaagtgctgagattacaggcatgagccaccacgtctggccatttcatgaattttaacatcaagcatggtactcttctttggcacttactggctgagttgtgtgtccccccgccaacaaatttatattttgaagtcataactcccagtccctcagagtgtgactgtatttggagatggggtctttgaagaggtaattaagttaaaatgaggttacagartaggccctagtccagtatgactggtattcttgaaagaagagggtgaagacgcaaagagaagatggccatctgtaagtcaaggagaaaggccctgagaagaattcagtcctggtaacatgttgatcttggacttgtagcttcctgagtcgtgagaaagtaaatttcctagccacttacctgtggtactttgttatggcagtcctagcaaactaatatagccctcttatgttgtcattagcactatcacttttatacttttttccagctattatggatataaactttcaccagaaccttcaatattgacagaaagatataatgtagattgataagtgtcatttgtcattcaaaatcagaaaagcatgacatgtacagtccttgcccagtggctaaggagcattcattagcactcacttgatatggctgatttactgtgagaaaagtatgttaatggtactagtcagtactctggtgggtttgtatgcacatctagtatttctaagatgaaccatgctatgctgtattgagtaatgcccccaaaagatatccctaatccctgagaatgtggatgttaccttctggcagaaggggctttttgcaagtataaattaaagatcttgagatgggaagattatcctggattatgcagtgggccataaatgtaatcacagatgtcctgataagagggaggcagaggaggatttgacatagaagagcagaaggtggtgtggaaacaggagcagagattagaatgatgtggcgataagtcaaggaatgctggtagtcaccataatctcgaagaggcaagtgaacaccccctcctgagccttctcagggagcctgtccctgctcactcttggatttgatcctgtaagattttgttcagatttctggccaccagaactgttaagaggataaatttctgctaaaaactttatacaaatctttgcataaatttatacaaatttatacaaatctttgcataaatttatacaaatctttgcataaatttatacaaatttatacaaatctttgtcagagattggttcttcatgaaatagattaaaattggaattttaaaaggatgttataaaattgtataatattcttaacatcataaggaaaacacgaaaaatttctcaagtttcctgccaaagtcctattatgaaatagtattttttatcttcagctttactgttttaagactgatacctaaccaaaacagttgctaattttcctgttgtaaatattgaggaccaatagtaaaatgatttagagcaaatttcctaactccccttctttggaaggaggacaccttttattatttcagattaattaagcatgcttgctttaattatagttattaacacggtaaatttatagaggagcaagctatagtagagatacactaatatagaatatagattcttctctgaatgtaaatacatgctacagaacacatacattcttatttgggggctagagtgacaaagccttatcttggcactaaattttagctcagtattatctaaaataaaattttcttaattattacattgataaacatttgtttcaaaattattctacagggattcttaatagcacctagcagagagcctggtactactatgagcttacttataaccttagttatagtaagttacttcatgttaattgcagaaatttatgaattttaatatattttagatatctgaaatttttgaaattaaataaaagatactctaaaatataccagtgatttctgatagcattaggttttcttcctttgtattttctttccttctccttcctcctytctccctcttcccctttttctttctttccctacccccttacttttttccttcctttaacatttcctgccaaggaaacacattttggctaaaatataatttgtatcagttaatttttttttttttaaaagaacaggtgtactaaactctcccagactattagttgttggtgtggtaaccagaccttcatgccatcagacgagttaatctagtgcaggggtccgtaaactgtgatccatgagccacatctagtccttccccctccatttttataaataaagttttattggaacatagctgtgttcctttgtttacatattgttacggctgcttttgctgacacatggcaaagttgagtcgttacgacagaagccatatggcctgcaaagtcttaaagatgtactctctgattgtgtccagaaaaagtttgccgatccctgaggtgttataaaaacatttacttcaaaaaatttaaaaagtgttcatgggatttaacaccggtttctctatttatagtaagtaacatttttttttaagataatttttctggaggtggatttgctgaaattccttaaggagccagaaattttgaagagtggggctggtgcagattgcatgatgatacaagttgtacatgtttatggcttcattcctaccatatccccagcatatagggttagcttgcgtaagatatgatggaagaagttctgttaggggtttggtattctgacaccagtggggtactgcagtactgttctgacactgatcacacagagttagtgcagaccacacaagggaagggctcagttccagaagtctgccttcatttcaggtgctagtggcaagtagggtccccattctacccatacttatggccaactagctacaaatctggggagtttcccacaacccctctcagggttgataatttactggaatgattcaaagatttcagggaaacactacccatatgattacgattttatttaatggatacagatcaggaccagccaaatgaagagacacacagggcaaggtctgggagtttccaaacatagagcttccatgccctcttcttgtggaatcagggcatgctaccctccttgctcatcagcgtgttcaccatccagggagctccaccaggcaagctccaccaggcttcagtgtctagagttttatcagggctagtgctgttttctcacagtttttggtttatgcagaaagaaaagtaacattaattagtgtccatatgtattataagttaatgaattgttgtcaggtaaggcttatatattgattctaatatttccccccttttttatgtgaaaatgaaagtttatagtaatatttttgttttatttttattttatttatttatttatttggacatagggtctcgctctgtcacctagattggtgtgcaatggtgtgatcatagctcactgtatcctcaaactccctggctcaagggatccgcccacccagcctcccgagtagctaggactgcagatgcatgccaccgtgcttggctggttttttcatctttttgtagagatggggtctcactatgtttcccagggtggtctcgaactcttgggttcaagtgatccttctatcttggtgtcccaaagtgtagggattactgtgaggactagtaattttttttytttttttgagataagtctcactctgtcgcccagtctggagtgcagtggcacaatctcggctcactgcaacctccgcctcccgggttcaagtgattctcgtgcctcagcctcccgagtagctaggattaaaggcgcccaccaccatgctcggctaatttttgtatttttggtagagacgaggtttcaccatgttggccaggctggtctcaaactcctgacctcaggtgatccgcctgcctyggcctcccaaagtgctgggattacaggcgtgagccaccgtgcccggccagttgttttttttaaatgtccttattggccaataaaattggcagcaatactttgtacttctctttctgtgtctgtctgtctccccgtcctttattacctttcccccttctcccctactcctttgctttgtctgtctgcctcccctccctgtcccctccccctttcttctggaatcttttaaaaacaatttattaatctgtgaaatccatagttagaataacccagactgttccatctcccagttaccttttttgttgttgttgttgagacggggtctcattttgtcacccaggctggagtgcagtggcatgatctcggctcactgcaacctctgcctcctgcgttcaagcgattctcctgcctcagcctcctgagtagctgagattacaggcacgtgccaccatgcccggctaattttttgtattttttgcagaaatggggtctcaccatgttggccaggctggtcttgaactcctgacctcaggtgatctacctgcctccgcctcccaaagtgctgggacccagttatgttcttttaacacatgcatacacaccarcccgccatcccacccctgagtgaacaaagaatgaaacttgaaccatcacccttatggggtcagaatattatttatttttaggatagagaataggggcaatgctatggatttagtttctgttccaggagtaaaccaaccaaacattcttcctgtggtaataacagaatagttcctatcaaatgagtcttcttacagataacttaaactctgaacaaaatataaaaaacaaagagtacctgaagaacaactaatagcagaccgaaactacagataagagattgttattatacacttttaaaaatgaaatagccctggttggtttgctacttttttgtgtttttttgaacagagtctcgtgacgcccaggctggagtgcaatggtgcgatctcagctcactgcaacctctgcctcctgggttcaagcaattcttytgccccagcctcccgagtagctgggactacagtcatgcaccaccacgcccagctaatttttgtatttttaatagaggcggggtttcaccattttggccaggctggcctccaactcctgacctcaagtgatccatccaccttggcctcccaaagtgctgggattacaaacgtgagccaccatgcccggctgggtttgctatttttgtagctagttttgcaccatgctagacagctaaaactcagttaggaaactgcatatagcttgtgacccagagggcagagttcatggtgaccacaacagctggaaagtgagtggaaagagagacctgaagggaaagagccccaaattttgtgttaaaactttgcctgtattacaggctgagctgtgtgtggagcgaactgcatgcaactcagccaaggataaaagaactgaacaaagatttcagctgctgcccatcttggaggagaaagtttgcgatttaagtcaagctaagtttagtatcaacttttttttttgaggccgggtctcactcttgtcgcccaagctggaatgcagtggtgtgattatggttcactgcagccttgtcttcctaggctcaggtgaagcctcctcctcccacctcagcctcccaagtagctgggactacaggcatgcaccaccacacctggctaatttttcgtattttttgtagagatggggtttcaccatgttgcccagacctgtgtcgaattcccgggctcaagcgatccaccaccttctgcctccaaaagtgctgggattacaggcgtgagccactgtgcctggcctactgtaaacattttttgtttgttttttcttttctacttctttatctttttawtttttctgcccttgaaaatcaaaacattttttaaaggactatagcagaatctagagtttctgtaaggtatcatttaccacatataaaatgtaatctaaaattaccatacttaggaagaaccatgaaaacatggccaatattcaagaaaaaaagataatcaattgagataaaacttgcaattacatgcatgttggacaaatgatgatttcttatgtgtgacaacttgtggattcagggacttaaaactttttgtagtcaaagggaattttaggatactgattctagtctaattcattgtttttctcatgtatctaaggtctaactggcacttaccagtttgttagcctcttgcactgatattactcattttctttccttcttggtgtgctgcttcccctgtaaggtgttaacttgtttggtgtatatgattcaaggaccaggagatagaaaccattctaactatcttaaatataaatttactctccacaaataagttccagaactcaaaaactgatctgctggggaagctataaccactgatggtgccacaggaattactgagtttaagaacgttatgcaagggtttcaggccatggcttagaaagctgctgccattgttgctgcctcaactgcctcttgacacccacaaacctggtgactgggcattgaacttggagtccagctgttgtttccagtgyggttgcctgtaaacatccaaacagttggagaatggacactggagcatcaatttggaaaaaaaccttatttcttgacttactttgccaataggaaatgtaaagtggtaataagagatctccacttcactttcagtttccaaatcccatgaaagtattttattgatagatcagaaattgtatccagaagcctggtggtgagaacaactggacaatgttgattttagctttttagcttctgcagtgcaagcagatattcttggggcaaggatcaggagggtagaatgaagattgaatgagctggttttacagcatggcttgaaggaataacagttgaattgggtcttaaaggaagcctgttcatttatcatgttgatacggagtatagatgcattccagtstgaggtaatggcattagagaaagacatgcatggttttttcagggtgattagaatgtagggtatgatttctgcaatgaggaaagtacctggagatcaatttgcaaaaacctaaagttctaaattatagcttattttcctttgatttggtttcattgctgaggctaattgtgttgtgctaggggagtagctggtatcctttggcttcttctctgcttcttgtatctgctrggtgctggaattacacagctcctgagtcagagcaatatgcttagcagaaataagcatcagtcttcctgaaccatcagatggcagactgacgtgatatgccctgaatcaaaggaaaggcagtatcttttggaaattggagactctgttctttgcttttagggtaaacagctggcaatcctgcttctgttcaatatgctttttggagaaatgaatcacctaagcctgcattctgcctcaaataatctgtatttgtggggttaaggaagcaaatcttcagtccctccctgttgatcacaaagtgtgggtgaaaccatttctttgttgtgtcctaaaatatgacaacggagtgttctcattaaccttagaataaaaactaccttttttttttttttttaaataaaaagtgactttggaactgtccttgagcttgagtataaacagctagtttgggagtctccttccaaatttcatgttcttttggttgtctgtaagccrttcactcaccaggctactgctcagacctctgaagtctgagtcttcacagtagcctaatcttgctttaaagtctggaaatggatttttacttcctatagttcagataccatagcatggcataaaagtctcattgatgtggtctcttcaactctcstatttctgccatgcccagcttcttgaagtgttgcagacacagctgtaaatttgtgcgtctttgtttttccaattatgtgtttgtcttacctggaattcagtttgtcctgtttctgttctgcctaataggaacaccgtctgaggtcttcactaatcagctcaggatagagttactggccctctctttgttttataccttctaacttattccttcttttacattgatttttgggtatatgtttgtgttccttaccttactctttaaagataaggaccatgttttattcatctctgtatctttattacatagtaactggcatttacatagtttgataaggatatggaaagaataagacagtgtggtgtattttggagtcataaagacctgtgtttgaagccatgttctgtcactgtgtgatttttcctacctacctttttgagtttagttatctcatatgcagaatttggacaatagtgctaaccttggagattaaataaggaattgcttataaagcatttacctttacatagtgttggcattattagtcatcatatctgtcatcccttttttctcttatattcaatctctcttgtgttcccacttcgaataaacatttaacatgtgtatgtcttcccatcttaagttttcctaaccatgccttttgatatattgcctttctctgttgtcagtttacaaccaagttcttgaatctgctgtttcctggcagcttcttccttcaaacatatgtatgcctcaatccattgtgatttttttttttttttttaaatagagccttgctctgtcacccaggctggagtgcagtggtgcgatctaagctcactgcaacctctgtctcccgggttcaagagattcttgtgcctcagcctcccaagtagctgggactacagacatgcaccacgacgactggctaatttttgtagttttagtaaagacagggttttgccatgttggccaagctggtctcaaagtcctgaccccaggtgatctgcttgcctcagcctcccaaagtgctgggattacagacatgagccaccacacccagccgatctattgtatttgactttgtttccttccactccctggacattgcttttgcagagtcatcaattatatttgttcttaatataatagaattttttttttttatttcatcctttgtactacatagcagaatttttttttacttcatcctttgtactacataccaggtttgtaattatgtttatttgtatgcgtacttatttaatggctattctttcttttgaggttaagtttaatgatgacaggaaccttatctgttttgtatatcactgtatccctagtatcttcaatagggcctggcaaggagttgatcctcaagtctcttaaattttcagtgtgtcactttagaaaatctgtagttctttgcaaatagggcacgatgtcaattttatttttagaaagattctccattttgaagcagaatggatacactctagtgtaaaatttcaattatcaattatttggttcagaatgttaaacagatgacttaatgtgatcactaaacatttttgcctgcctgtttcctgaaaaagtcaaaatttgggaaattgaaaaggataacgtagattagaatttgtgtaataatttagtattactggtgtttgcattgttctctacatttccactctgccttgcaattcttgtgaaatgaccaggcaagagctatttaaccaagaaataggagagcaaatggacttcagccattaaaaaatccctgtacctgttacttttattaaaaacccacacccatttctgtcagatgaggtcatgtcaattcttaaactttgcctttagcctaaaggtaaagggaagggaagcatggtataaaagattgatcttatttccccttgctgctctagttttcttcttttccctttttttccctcatattctgtgcttcaaacatcctaatttatttactcttctggaagtgtatgtttgtagtgctagtccctttgcctggaatgtctgtctcccctatttcttctgcctaactcttgctcattgtttaggcttcgtcttaattgtctctgcctaatggaaaccttttccttgctcccagaacactaggtttgatttttcctagtacttctatatatactcctgcatgacagatagcttctgtttgatcttcctgatctatgctttcctttttctctcctgttctgtgcccggtaggcttacttgtatggattttgtcaatcagtatctgtgacttggatcacagttcagctagtgtagaaaacaggtagattggaagcagtgagaaaggccaattcagaatatttatttccctggtttcttcgctgtgaggttaccttgggttggcagtgtccggacacaggtactgcctcctccaggtggtcttctctgtgtgactttctgttccacattgttgtaatctctcccaccccttgccatttggatttagaagtactgctcctgctgttagcgctacttcctatatttaccatgttttcccctttcccctcatcactccattgtgtttacttcctttgtatgtaaatgctctgtgaatgattgtcattgatttattgtattagtttttgattggaagtctagctagtatatccccaacatgtattatttgtgatactgccttctctctctcaaacaattgcctgtttttgcctttgccctcattttaggtaaacaggagcctcagtcggtgaaattctaaagcactctacccactttagataggacagtgctgttttagtttatattatatattgagagtctctgtaagacttgatttgaaattagggttgaataataaaaaaggtttgaaaattagtgactacaagggaaaaaatcctaaattacttttaatggcatttaaaggttctttaaaggtctggcatctggcgcctgccttaattttttgccttgtcctaactcttcttagacttttaacttccagggataacaaatgttctctcccatgttagtgtcttgacatatgttattacagacatgcatcacctagctaatgcccactcttcgtttagttcttattaacctaacttttttaaaagggtggttttcccctgtttctcctttctgacctgtttcctgtcagcaaacatgctattaggagtctctgttaactatttttgtggcatcctatactttcccttcatagcatttattatttgaattatatagctatttgtctgattgttcggtatgtgccttccataggaggtctattatggtcattgctctattcccattgtctagcatgcatgcatgcatttatccaacaaataacagggaaggatgttagagtggaaggataatcacatcatctctttggaggagtatgatgcagaatttagggccattagaattctttacttcagttaatgaaaaatcagtgtatctttttagagaaattttattggattgcaagttacaggcataggacaaaagagctttttattttgaacagtttgagaataacttgctggtatgatgctctcattgcccctaaatactgtagtgtgtattttcttttttcctttttttttttgagacaagttctggtcctatcgcctaggctggactgcagtggcgtgatcttggctcaccgcaacctctgcgtcccgggctcaagtcatcctgccacctcagcctcctaagtagttgggactgcaggtgcataccaccacgcctggctaatttttgtattttttgtagagacagggttttgccatattgcccaggctggtctcaaacttgtgagctcaagtgatccgcctgccttggcctccaaagtgctgggattataggtatgagccaccgtgcccggccacgatggtgtgtattttctagaaacaaatacattttactgcatcaccgtattacgctcatcaaagtcgggtgattaccactgatacattgctaccatctaatcaacaaattccattcaagtatgccagttgttccagtagtttcataggaaaggatccagttcagaaacattaaatgtcatgtctccttcatcttcctcagtctggcacagttcctcagtcttctcttgacctcatctgaccttgatcctttgttttttgagatggagttttgctcttgttgcccaggctggagtgcaatggcacaatmtcggctcaccgcagcctctgcctcctgggttcaagtgattctcccgcctcagcctccccagtagctgggattgcaggcgtgtgccaccatgtctggctaattttgtatttttagtagagatggggtttctccatgttggtaaggctggtctcgaactcccgacctcccaaagtgctgggatgacaggcgtcagccactgtgcctggccccttgattttttctttttgaggcaaggtcctggtctgtcacccaggcagcagtgtaatggtcctgtcatggctcgttgcatcctccacctcctgggctcaaatgatcctcctgccttatttttttgttttattttatagagatgagttctcactatgtttcccaggctggtctcaaactggagggttcaaccatcctcccaccttggcctaccaaagtactggaattataggtgtgagccaccgtgcgcggctgaccttgatactttggaaaatttatagccagttgttttgtagaatgtgtctccgtatgggtatgtgtaatgcttccttgtgattagattcaggagttttgtttttgtttttgagacacagtctcactctttcccccaggctggagtgcagtggcgcgatcttggcccactgcaacctctgcctccagggttcaagcgattctcctgcctcagcctcttgagtagctgtgactgtaggcacacgccaccatgcccggctaattttttgtatttttagtagagacggggtttcaccatgttggccaggctggtcttgaactcctgacctcaggtgatacacctaggttggcctcccaaagtgttgggattacaggcttgagccactgcgcccggcccgattcaggtgatatattaaggatgactttttgaaggcagtagtttcctatttaaaagctgctcccactgtcttaattttttttttttttttttacgtttttgtggtttatattgtaaaattgttttccaagtgtttttagttttgtgtctttagaatctgtgataatatggaaatctagaggaagcctgtagagaacttggcatgcccatcaagatgtgatgtccctaaaaatattttgaaagagagcagcaaaatgtactgtcagaggaatttttttcaattaattgggaataattgattttgctataatttgtcattaagatcatttctaattgaaaaattctttgggttttgaattgcaaatggtacttgaacttctaacgcataaataagtatatttaattatggcagaacttatttctaaaatagccttcttggttaaaacaaattgtacacatttcatctctcagttttagctctgaaatgatttgaaaatccaaacgaaggcagtcagaatcactgttctaagcctatttttagattttttccccttcagttggtttcctttctagccacctgcagttttatgtgcagttgcacgtgctcattttttctaatttcccccctcccccgaagcttggcaagcagcttctttattgcttttggtttgttctttttgaagagcacagtgtaaattataaagccttcattgagtatttaaatgtattttaaaatatttttgagaaaatgcagcataattatggaatacaggacactctgcctctaagaatcttttctgattatagttctcgatattatattaatatactatatattaatatgcagaatatatcttttttattcttgcagtttttttctgtttttaaagatttgtctggatgacagagctttgggagatggaactggaaaaaagctaaaaaaattgcctcttctaagaaatcatataactggattcacaaaaatacagtgatacttattttaataggagtactattgaatttacatttaatgtagttaatgatatatttgaattcaaatgaaacaacatcattttgtgttttctacttatgtcatctgttctgtctcttttttctcctttctttcttttggattaacttccttcggagatttgttacatrtgtacatgctgactcckgcttgtggtgaatttttttccttatgtgttttgtaaatttgtgttgtaagcttattttaagatctcatgtgttgagatctctgtgccacttaagggatataccattgataagctaagctgaaggtatattccctgttctgctaagtgttctaggatgccgtcagtccaggactatttatactttttgaacctgaaaacttcatggaaatgtgtatactttctagaacattccccaaccccacctcagtgtgtgcgccttagtttcctatagttgctgtaacaaatcaccgcaaatttagtggcttataacatatctttattatcttacagttctggaggtcagaagtttgaaatgggtttcactgagctaaaattaatatgtggatagggctgtgttccttctagaagcactaggggagcatctgttcccttgccttttttcagcttctagaggccacctgcacttttggcgcatgaccccttcatccatctttaagtcaccaatggccagttgagtctttttcgtatggcatcactgatcagtactgaccctctggcctccctctttggcttgtaaggaccctcgtgatttcatttgattcaccccccccaatactggatagcaccccgtctcaagattcttaatcacatctgcaaagtcccttttgctatatcagttctaacttcccaccttcagcaagcccaaagggtattttaattttgtccccatgtggcataaaagtacaagctcctttgctagaggccaaaaagctactacagagtagctgcagccttgttcatgttttctgctctgaatttttgtcctctctttttcctagtctccctggattttctttactctctttagttttggactgtgaattttaaaaagatgctttcatagcatctttaaatcaagcatttttaggtagtttctagtgggagagatttcaggttatctaatgtgccatattgctctagttggcattgcttatattagtaaggtaataatgactttaacaagacataaagtctgttactttgttttcctattatcctttaatttaaaatgcttttaatgtcaatcaaaacccctcagtgaatctcatctttgaaaagtcagttaattgtgattaaaactcagtttcttcatatgaacattccgttctactctgatatcgacaagccatgctttttttctttaatctgaacagcatgtcttggtttacagctctgaccccactattcagccagatcaggtttttcctaccatgccttgccttccttcttgactgtctgctgagattctccctcatttttacattttctgtgtttctgcttatctcatttgagctaaaggcatatagatactcttctgtaccaagctgttatctttggacttcattttacaactccctcccttcctccctgtgataatatgtgaatgtgattaaaaaccagtcacatactacctaagggattacaatgacaagcggaattcagtgcaatcccttcctatccctagtcgtgctttctagagcacttatagagtgcatattgtataccaggctttttacataaatgaacacctatgaattaattcattcttataacaacctcattttacagatgaagaaattgatacacaaagagcttaggcaacttgttcaggataatacatctattaaatggcatcatttgaaccaggcagtctggttttagaatctacttgttatcactatgctatactgtccttagttttagactaaaaattactttcctttagacttaaaaaataaattttactgtgtatatttgaggtttacaacatgacgttatggcaggggtccccaacccctgagctactggcctgtactagtccgtggcttgtcaggaaccgggctgcatagcaggaggtgagcagagggccagcgaacattactgcctcctgtcagattagctgtggcattagattctcacaggagcgcaaaccctattgtgaaccttatgtccaagggacctaagttgcaygctccttatgagaatctaatgcctgatgatctgaggtagaacagtttaatcccaaaaccattcgcctgtctccccagtgcgtggaaaattgtcttccacaaaaccggtccctggtgccaaaaaggggactgctgtgttatggaatacatatagacagtaaattagttactatagtgaagcagataaacacatctgtcatttcacatagttacttttgttaagtgatgagcacctaaaatctacttatttaatgaaaatccttaatacagtcatgcttgcttaatgacaaggaaatgttctgagaaatgtattcctaggccattttgttgtgtgaacatcatagagtgtacttacgcaaacctagatagtacagcctactgtatacctaggccctatggtacagcctgttgctcctaggctacaaacctgtacagcatgttactgtcctcagtcctgtaggcaattggaacacagtggtatttgtgtatccaagcatgtctaaacatagaaaaggtacaataaaaatacagtattataatcttatggaactattgttattatgtggtgtgatrtatatgtggtccattgttgaccaaaatgttatgtgacacatgactgtacaatacagttttattaactgtagtcctcgtgttgtacatggatctctaaacttaytctgaatatctgctattttgtatcttttgacccacagctccctctcctttccccccaaaataaccatggtaaccactgtttcattctctatttctgtgtatttgagctcttttattttattttttgagactgggtctcactccgtcacccaggctggagtgcagtgacacaatcatggctcattgcagcttagacctacgaagcttttgagctcttttattttattttttgagactgggtctcactctgtcaccaggctggagtttctccgtattgccttggttatttaggatttttgtggctctgtatggattttaggattgttttttctatttcagtggaggatgccattagaattttgatagggattgggttaaatctgtatattgctttgggtagtatggctgttttaacaatattaattattcctatctatgaacatgggatatctgtccatttatttgtgtcttcagtttctttcatcagtgtattatagttttcagtgtacaaatctttaaccttctcggttaaatttactcctaagtatttttttttggatgctatcataaatggaattgttttcttaatttccttttcatctgggttattgtgtgtagaaatgttactgatttttgtatgttgattttgtattctttaactttactgaattcattagttctagcagtgtttttatcttttctgtgggatctttggggttttctgtatttaggaacatgtcatttgcaaatagagataattttactacttcctttctgatttaaatgcctgtttatttctttttcttgtttgatggctcttgctagtacttctagtactgtgttaaataaatttttttattttagaagtcaacatattttaaaggaaatagttcatttcttctcccttccaatattgtcattgagatgtcttatgtgtcactgattgcagatcctttgtatattcttatctttttctctctggaaacttttggcatatttaatctctactgtggtgctttgaaatttcacagttatgtaacttggtatggtgtttttggtttttttttttttttgagacagtctcgctctgtcgcccaggctggagtgcagtggtgcgatcttggctcactgcaatctccgcctccttggttcaagcaattcttgtacctcagcctcccgagtagctgggattacaggcgtgcgccaccatgcctggctaagttttgtatttttagtggaggcaggatttcgccatgttggccaggctggtctcaaactcctggcctcaagcaatccgcccaactcagcctcccaaagtgctgggattacaggcatgagccaccactcctggccctaagtaacaacttctaatgtctaagattgctaagatgagttgtatttattattggctataagctttttctagtttcatatcatcaggtaaactcagttaaaaacttgaataagaactgggaaacaataataataataaaaagctaacatatattgatttttctacatgccagacactgttgaaaatccattctatatattgcttcatttaatccttacagtaactgtgtgaagttgataactgtttttttgcttgtttttacatctcgtatgtatggtaaggaaactgagggcataggatggttaagtaacttacccatgtgcacacagttagtaaatggtacaaccacctattaaatccacacagtttggttcctgaactcaactcttagtcattagactgtacttcctgacatatgtagagaattttattttacttattttttatttattgagacatggtcttgttttgtcacccagtttggaatgtagtggcatgatcactgtttactgcagcttcaacctccttaagcaattctcctgcctcctgtgtagctggaactacaggcgtgagccaccatgcctggctaatgtatttatttttattatttttatttttatttattttggagacagggttgctcaggctggagtacagtggcacgatcttggctcaatgcaacctctgcatcctgggttcaagggattctcctgccttagcctctcgagtagctgggactacaggcgcacatgtcatgcccggctaatttttatattttttggtagagatggcgtttcaccatgttggccaggctggtcttgaactcctgacctcaagtgatccacccaccttggcctcccaaagtggtgggattataggcgtgaaccactgcacccggcccttgcctggctaattaaaaacaatttattttttgtagacacagggtctcactatgttgcccaggctggagaattttaaatatatcatctttttaagaagggagagacactcatgaaatattaaaacaaatgttagttgttaggtaagaagtagtaggttgaagaattaagttcaaattcatgacctggtgcttagaagatcaactgtgatctaatgttctattaaaagctcatatttagcttagattctagtttggataaaaaatgattatcactaaattaggcaaaaaagtttcctttttgaggtgggtatgtaattaccacatagagtatttagtagtttgtcttatataattaagcaggcgaggaggagacagaaaaatgtcatgggaagtactaaaaaattagacgtgggccagaatgttagtgacagattcagtttttcccaggccaaaatatttcagaataattctgatccaagtggtttttgtttttccaccagagtctgattttgcagctcatcttttctaaatagatctattttatggtgtgtatatgggtcattctgaatcaagttaacttcgaagttgattgggaccttgtttcaagcttattgaacaaagatctgtaacacagaattttgggcataaggccatttccagagtctggtccaaataagcaataacagacaaagattgtctctttcttggctgaaggcttcctctgtgcagcttgtctcaggactctcttcttctgccctttttatacccctctcctttctctattcagggcaaaaatattttgattttcattctgtagttattttttagcaaacatttattgtgtttttacttatgtacaaggttctttgcttaaaacctataatgcccttcctgtagtagcagtggcagttgtgaggatgatagtaggccttctgagatgatattgtagaaaatccatggaacgttaagtagtgttgctatgtcatrcttctttcctgcctggctttctgtcttttgatgattaagaaggatttttctggaagatctttaaaagaagcatatgtgttatttttatttcctccagagtgacaagggagaggaaaaagaacaaaatgaaaacctatttctatacagcagtttaaaataatcatatcttaaaagataattttaaaatcttgtctgcttatggagtttgtcattttatttctacattttagaaaatgttttcctctctaaatataattgcttttagaatattttaatgtttcctttagaacatttgtttaccacacaattaattttatttattcaattcccaatctacttatttttataaaagccttgcttgaccatttaaaaagaagttttcaaatttggtctcctaatttccataatcttttcttcaactcttaattagagtagagttcaacttacttttattcatactattttagcttttctctcatctcggagaaggtgttgtgttttcatgcctcttttccctggcttatgctgtcccctgtgcttggattttgacctttttccccactctccttttttctctttcacctgccagttatggctggcaaaaatgaggtttctttcatggagtcttttgatgttgcttcaggaatattaatcattcttttctgtatgctatttgtgtgtaattaaagacaaaaattacacttattcaaaagaataaatgtaatatatgttatgcatatataataaatcagacatctctgaatccatcgttaaaactaaaaactagaaaatgaccaattctgtttcttttctctgtatacttctcaccaaccacaaaagggatgtttatcattcccttgcactaaacatttttttaaatcgcatgtatgtgtatcactaaacaattattgtttaattttgcttgtgtttgggcttataacaatggattcatcctgtatgtagtctagcatggcttgctttttttattcagcattataatttctaagatttatccgtattacatatacatagttcattcattagtagtttgttcattctcattatatagtgtataatatttcaagtataaatatgccatttatttgcatttaaatgtaaaggatctggaattagttttttcctatggtttgaggtagggatccattttcagtgtttttttctatatggcaaaatagttgctctactcaaataaaacattcttcttactgtgctatcactgtaagataccaagtttccttataagcatgattttttttctgaattctctcttctgttgtattggtccatttatttaaccctgtaagaaccctactatcttctttactatggcttcgtatctcaataggcaagttaccctcctcccttctagtttttcttttagaccatgtcttagccattctttcccctttgccctcccatataaatttagaacctttaaaatctctgttggcatttttattggaatgcattgaagctgtagatcagtttggaaagacttggcatcaaggtaacatgggatagaagggggacaatcgggtgtatgtgtggttgtgagtagatgggggtgtgttgtatctggctttgaagaccatttaagtttttttccaggtttttctttcaaactcctatctcactgtttccttatttcttatttataacttgaagtaaaatataattggataggggagagagcttttagggttttattcagggtgttctagtaatttttactttgaatatttctcttgattatgttatgttccatattgcctttagtctctctcacaactcttgatatgatttttgcttgtcataatgagtctgccaaaagagttttccacttgtattatattcgctctgttttkttttttttttttttttttgagacggaatcttactcttacctgggctgtagtgcagtggtgtgattgtggctcactgcagccttgacctcttgggctcaggtgatcctcccacctcagactcctgagtagctgggactgcaagtgtgtgccaccatgcccagcaaatttttttgcattttttgtagagatggggtttcaccatgttgcctaggctagtctcgaattcctggactcaaatgatccatcctccttggcctcccaaagggctgggattataggtgtgagtcactgagcacagccagtattagctctgtattatgcctcttgcattacccaaattcagaggccttgtttgcttttattggactaactagaactatgtcatttttaccagcccattgcagtacagtttcattttatgtgataaaaatacaacataagtggtcacttctgcagcacgtacactaaaattggaacaatacagagaggattagcatggcccctgtgcaaggatgacatgcaaattcatgaagtgttccacatttttctgacaaaggtctaatatccagcttctataaggaacttaaaagaaaaaaaaacaaccccattaaaaagtgggcaaaggacttgaacagagaacagacacttctcagaagacatacatgtgyggccaacaatcatttgaaaaaaaattcaacatcactgaccattaaagaaatgcaaataaaaaccacaatgagctaccatctcataccagtcagaatggctattattaaaaattcaaaaaaataacagatgctggcgaggttgtggagaaaaaggaatgcttttacactgctggtgggaatgtaaattagttcaaccattgtggaagacagtgtggtgaatcctcaaagacctagagacagaaataccatttgacccagcaatcccattactgggtgtatacccaaaggaatataaattattctgttataaagacacatgcacatgtatgttcactgtagcactattcacaatagcaaagacggaatcaatctaaatgtcccatcagtgatagactggataaagaaaatgtgtggtacgtatacaccatggaatactatgcagccatcaaaaaagaatgagatcatgtcttttgcagggacatggatggagctggaggccattatccttagcaaagtaatgcaggaacagaaaaccaaatactgcatgttctcacttatatgtaggagctaaatgatgagaacatatggacacatagaggggaacagtgcacactggggcctactggagggtgaaaggtgggaagagggagaggaccaggaaaaacctaatggatactaggcttaatacctgggggatgaaataatctgtacaacaaacacccatgacacatgtttacttatgcaacaaactaacacatcttacatatgtacccctgaacttaaaagttaaaaaaaacataaaatattaataaaatacagaaaatcccttttaaaatgtgaagatttccttcacattaaaaattttgtgaaccactgcgtaatttcaaaactgaaaaggggattaaacagtttcttttattgtcatttgatgtttagtcaggaaacggaaacaccatcatttgttatacgtcttgaattttgtgagctttgaattatataaaacatatgtaattcaaatgtgtgtatgtattcatgctttaaaaggtgattccccctgtacatgttcatttttttggttacttccaaatttgttccatgtatattctattttgattttgtctcttctccttcaggtgctgatgcatcaagcatggtcttcatttattgacaacttgtctttgggtttttatcttttctctagttagtacttttgatacccctacctctaagatccactttcttttttctttttccttttccctggtgtcctggtgcttgaggatagaactggcagacgggaagctgcatggctccaaagacatgccaagggggccagagctcttccctttgcctctgtacataacagggagtgggactacaagttcctgccaagaaaatgaggatccacttttttttttttctcaaatgaattttagcatttgtttacgttggaatcagttgagttttcaaactgctggtatcttttttttttttttttttttttttgaracggagtctcgctctgttgcccargctggagtgcagtggcgtgatcttggctcactgcaagctctgcctcccargttcatgccattctcctgcctcagcctcccgagtagctgggactacaggcgtccgccaaccacgcccarctaattttttgtatttttagtagagacggggtttcactgtgttagccaggatagtctcgatctcctgacctcgtgatccgcccacctcggcgtcccaaagtgctgggattacaggcgtgagccactgcacccggcctcaaactgctggtatcttaatgtttattagactggctttgaggagttcttaaaaattgtattgccagtggcaaaactggagatttgaacctaaatcacattcatcatatttcaaatacataatgtgttacattcatgttttcatattaatattttagaaatgctttatcttaattgcagagttgtagattgggtagtttgatmaataagattcagatttattattttttagtacttttttgtatcaagcaatgttagagtttctaatatgctattcccattttatataagctgtgttagtccgttttcacattgctgataaagacatacctgaaactgggaagaaaaagaggttcagttgggcttatagttccacatggctggggaggcctaagaatcatgccgggaggcaaaatgcccttcttacacgacggcagcaagagaaaatgagaaggatgcaaaagtggaaacccctgattaaaccatcagatctcgtgagacttattcactaccacgagaacagtatgagggaaaccgaccccgtgattaaaattatctcccactatgtccctcccacaacacgtgagaattatgggagtacaattcaagatgagatttgggtggggacacagagccaaaccttatcataagcaaaatgaaattttagttaattaaaacttgcataaaatgttatatccaataagcaaaagagttagtattcaaacataattttctaatttcaagattgcacgctttttttttttttttaaccagtgggtctaaggattgctatagggtactctcctgggccatctagttcttctcaactggggttactctgattttgactctcatatattaagactaaaagcttattgttttttaatgtcagactgctgcttttgctatgtaaagttgaagaaaaatgtatgaaagtaaggaaattcaagtatgagaaagaattagtctcgctgaaaaagctaactctcgcttggtgaacatatgcatgctgttgttatacaaatgttccaaacctgttcccttttttttgctcaccctgccatatggagggttgtgctttgctggacatgttgtgttttggacttctatgattcagaattgagagaatggagagggagtagaccagagtagaatttttcaagtaatttgaaatcgtgtcctgaataattctgcagtgtgtgagtgaagtaggaagggtgaaaaaaggatgattttaaggaggagagttgtggattccatgatgtttgagaaaaatagggaaagaacaagacattttgaattaatttttcccttgaggactggggaccatgtgggatgctcttttaatagggtttaaacaggtgagatgtacacatttttcattttgttttctcaagtttacttcttttgtaaagatctccatggttacaccatagagagcagactggaaaaaggccagactgggtacaagtggaccaattagaagactgttgcaatagccaaggtgagagatgatagtagattgagtaggattaaagtgttagaaacagatttctggtatttaaaggtagatgtgacaggatttagtaaaattaaacatgaagtaaatgctagatgtctgacttacataaaccaatagagaattgaagtaggagcattgaaataggattgaggagcctgtgtgtttgattttgaacacgttcactttaaggtaccattgaaatatctgagagaatgtcagttttatacacgaacctatagcttagaggagggttcttgaatagataaagaaaagtttgtgtgtatatatggtaatttaagcctgaatgtggatgagtttgccgaggggtcataaagaggaaaatgaactgggagacactgtctgtaacgtgaccttagaaaggagacagagaatgagtgttcgggagagttagaaacaaacctaggtaaatactggtccatcttttccaactcccattgaaatctcaatattttcccttctatggagttagggattcctcaacttaattctgtgctgagcagaactgagctaaaatttgtactagtgctggacctattagaaaagggaggagtttaaaagatgtgtagagaggcggggcatggtggctcatgcctgtaatcccagcactttaggaggccgaggcgggcaaatcacttgaagtcaagtcaggagtttgagaccagcctggccaacatggtgaagccccgtctctacaaaacatacaaaaataagccgggtgtgggggcacatgcctgtagtcccagctactcgggagtcatgagacatgagaatcgcttgaacctgggaggcagagggcgcagtgagccgagatcgcaccactgaactccagcctaggcgacagagcaagaccctgtcaaaaaaaaaaaaagtgtagagaggcattctacaaaaatggggctctttacgttttgtaacatcaatgaatcaatgattgtatcagataatcctcagaattacttggggatgggggtggtcagaatatgtgaattgtttcactataaaaacagttttttcaagaattgtgaagagtcagattttgccctccatgcaagctaaaatctttcctagatgctggtagaagacagaagacttctggaccagagacataggactttattactgatgagaataactggaggcagagtgttagcatttgtgccagtttgccaagcccactgctccacagaggaaggtgaaaggggccgagtgatggcatgtggtgatgcctctcctgtaatgcactgcactctgttacaggagagggaccaccagtttagggaacccaaactttgataataggtagtaagccttgtaagcctacctgaacttcaccctggagggagatgacttttttttttttttcccagacagagtctgactctgtcgcccaggctagagtgcagtggcttgatcttggttcactgcaacctccatctcctgggttcaagcgattctcatgcctcagcacccccgcaagtaactgagactacaggcatgtgccaccgtgcccggctaatttttgtatttctagtaaagacggaatttcaccatgttggccaggctggtctctaactcctgacctcaggtgatctgccctactcggcctcccaaagtgctgggattacaggcatgagccaccacacccaactggagatgatatctttattgtactagacagcaaacaaacytgccttttactcctgagggagacactgtttcttgatccctcaagaccattccttatataatacaaacatatgtagcaagttggtatggaacaaaatgagtcagtccctctactcacaacaggtacagaaacatgaaagactcaagtataattgccttccaacagtattcacccttcatttctataccttcttggcttctggtaagatttctttcccatgattatgcaacttcatttgtcactctgattaatcttaccgacagaggctgggaccagatccattcagtttttcttataacacatttcattacagttactrtcaacaggatagcaggatgaggccagactgcaatattgacttcaattatgctccccagggtccaagacccagccaacagaacaaatgcaataaacctttagggtctacctaagagagccaggtggctttctctttgtttctgtgctgactttactcttggcccaaggcattaatctagttactgcagaatatagagcacagatttggccttggtctacaaagaggaagcgtagggctattcttctatctgtaacaatcctggatagtgattttagaccgtcctgaatgcctctaggcccaaggtgatgtcattgattgcttcagctaaagtcgggaacaaatttcaaataaagttttctaattggatgactcccattatagtgatttttcccttggtgtgcaagtcatcacattttctgaagggaggcaatgcccgacttccaaacaagaaatactcccaaggactgtgtgtgcctataaagaatgtgttgtttatattgtcctacttctccccgctccccccattcccccccacctccccagttatgtgggacctacttttaagtcagacggcacaggctgacagtttctccaatgtggcctccctgatggctggtaagccttagggttccaagtacagtatgaatacttctctagtactggtttgtggagagatggcctgaaggcagtcagtccaatctgtcctgtttattatctgtgccaccaactcaatggcattcatctgtcccttgaaatgactgtcccttgaaaagatgcctaaagttatggacaggtgtttcacgtgggagatttgggagcttggaccatcctctgctgcttctgagagactgtgcagttaaggagaatgatgattgagtagtgatcaaagttgtgtggtggggtaggggcagacccagttgtcagttaaatttgaggttttgcacatttgcagagaaatgtcctttgtgagggatgattctaaaagacggatcactaatgtcccccctttttccttacttcccmgcatctaaggtgttttccccacaggtgccagacagggttgttgtacccctttgactgccacaaaatcagtgtgtcccattccagtagctagctttaccttttttccagtcatctctgactcaaacccagaccttttgtctggaagggccaggtgcaagagtgacaaagggcccttttattaaacttacagagacccttttatgtctcctacttttgtccacatgagccactctaggggaagcagtgtacttaactaagtggtcattattatttaagaccaaagaaatccagcaagaaaatccagatcgtcaattccaggtggctgaacctgaattaagtttataccaaagacctccttttggctgggttgccacccagagagtagaccaatcaagccagcctgggatttccattagaggaaagaaagaagcatcatgtttaggaatggtcagggtggaatcccaagtggccaggagatgttctcttcctggagacagccacattcagtgaccaaactgctgtactcctgtgtagaccaggaggaggtgacagaggtatactcagaaatcttttgagttgattaaaattttttttwaaattgtggcaaaatacatatatgatcaccatcttaaccattttaagtgtgcagttcagtggtgttaagtatagttacaatgttgagcaaccaataatctctaggactctttttatcttgtagaaattaaaccctatacccattaaacaagtgtcctttgagctttcctcccccaggcaaacactatctccattttctgtctttatgaatttgactgctctagtacctcatataaatggaatcatacaatatttgtctttttgtgactggcgtatttcactcaataatgtcctcaaggttcatccatattgtagcatgtgtcagaagttccttcattgttaagtctaaatactattctattgtatgtatatatcacattttgtgcatccattgatctgttgatggattgttgggttactttcatcttttggctgttgtgaataaagctgctaggtgaccctgctttgaattcttttgagtatatacctataattggaattgctggttatgtgctaattctgtttttaattttgtgaggaatcactatactatgtttcagagtgactgcaagtgcacaagggctccagtttctccacatcctgatttttttgatagtaaccatcattatggatgtgaggttgtgtcacattgtggttttgatttgcattgccctaatgataagtggtattgagtgtcttttcatgtgcttattggccatttgcctgtcttttttttttttttttgagacagagtctcactctgtcgccaggctggagtgcagtggcataatctcagctcactgcagcctctgactccctggttcaagcgwttctcctgcctcagcctcccgagtagctgggactacaggcacacaccaccatgcccagctaatgtttgtatttttggtagagatggggtttcaccatgttggccaggatggtctccatctcctgaccttgtgatctgcccgcctcggcctcccaaagtgttgggattacaggcgtgagccactgtgcctggcctctatttgcctgtcttctttggagaaatgtctagtcaagtcttttgcccatttttgagtcgggttttttttkttgttgttgttgaggttttttgagctgatttttgataaggctgttgcagyactaagcgatataagatgctgtggatggtagactgtcacctaccttgactaacagctcattgttgagtgacttttgtgataaaaggtgtacctattgtcagattgcaaatgatgtggaaagtaaaaataggacacagattagtgtcaaggaccacggtactgtggctggagtcagctgattgaactggaatascagtaccagaccctggaaaagtgtcatcagcagtgagaccccactgatagcctgaagaaggttgtctgatgcaaccaatctgccagtagcatgtgatgtggttcctctcaccatgagacaaatgagtccttttccaggactcataagtctaggatgaggtggcagcctctgcatcaggaacatagagtcttttactttgtatccactctatgatgatagatatgttgctgtgtctggtatgatgatggatccagcagcagtggtagcagtcttaaccgtgcagcttgatcagtggcttgattataattggtctcatcagacaatggacccttactgtaaacatctatattagtgacccagatggtttgatcagcaactacaattgatctccatggtttttggacagtcttaaatatgtcattctgtagttttccwagtggctgactaaatasctaggcagttggtaatagcctgatagtcagtaaaaatataacaaggttttcaaggggaatattggccagatctgtgagaatgtccttgagttttgcccgtggaacaaagcaaccacacccattttcagttctgtatcatgggcactggagtttacagcccactaggcaccacagcgtctcagcttagttgaatcatcagtgaaacaggcccaggcatttagggaacctctgtgaatcaagggcctcactgagctagcagatttggtttaggtggcagaatgtaagatcagactttctcaaagggagaagctgctgctttttcatgtaaagctgagatgccctaggggccagactggctgcattcttgaatattaccagttccatgtgatgacagaggcttgttgggcctttcccaccttattagtcattgcatttgagttgactcattcccaaatgggaatcttttcaaaagaggcatacctagtagctacgtcagggaggcattgaatccaaacccaagagtcacctgaagaggttgttcctcttgccagagggtctagtcaggaaagtcatctgtgcacagacttgtactcaaacaggtcataaggattgtggggccccaaacctactaatgcctttctacatgggctattcgcagtgagcataatctccctggagcttatgagccctcacagttcaggcmtgtaaaatatcaataccactatacactcagaagtggaagctacaaacagtagtacattgaatggtccaaagagccccacccaaaaggtcacagtagcttcccttccctactttgaaccctacccagacctcagcagttggaagctggtaacttattcttccacaggatgggtatgaaggtgccttgggctcctgtatccaacagagccataaaatgttgagtctgtgctctccccaaagttatgtagcctacccaggtgtgtgtggtctttagtctcctttgggaacttggagaacttggccccactcctaatcatctttcttcataaagcagctgaggttgagggatgagggaggctgggagagagtagctttgcaccagtgaacaagagacatttgctttcagttttgartggtgctatagctgtgtgctgatcagtccaataaacctgcagtaattttggtgctaccaaaaccctgtattctgtgcaagatcgttattgcttgagcccaggagttcgagaccagcctgggcaacatcgtgagacctcgtctctactaaatattatatttaaaaaattagcctggcatggtgggatacacctgttatcccagctgctcaggaggctgaggtcagaggattgcttgagtgcaagaatttgaagattgcagtgagccgtgattgttccactgcactccagcctgggtgacagagcgagaccttgtcttacacacacacaaaaggtcatcattatggatggtatccatttctgtttgggaacaccttgatcgaacaactatagctttgttgctttctgatgggggaaatgggttttataccctttggctgacgggcttgatctgcacaatggcatcattttttagaagtctgccttaatgtaggctctttactgctccattgttaagataatgtcaagattatatctcttaaattcttgcttgatttcaatactagggctactggagttttctaaggctgcaggactgacagcaagaattatctagattctttgagctagtttctgattcttcagtgaattaccttgatccgcattttaaacccaatctagtacagtaggagtctgtagactggttggtgtccaagggagtttgtctcagggaaatttccctgagagtttcaaaggtttcttgtagtggacggttataccaccagaaaatgctgaggccctttccagttatcttgaaaggatttaatgttgacaaggtagactgcggtaggagctgagcactaagatagccagcaaaatgccattcttctttaacaaccattacatgcctgagcaatgtaactacatgcccctcctcttccaagcaaactagccaaagttctaaagatttgtttggctctgcctacaatggttgcaccttttcttactttcaaactcagtgtagatgtatgtctctgtaactgtcgtccaaaggaaacagaaccttatgtgcccctgtctccctcttctagacaaatcttagtctggaagatttcatgaagcagacctgctgaggctgactgtcagcttgataaggaagtcctcctatctgcaggagtgttgrcaataaccaaggcatcattcaggctgttgtctttgaatctgcctacttcctggtacttatcctgaaacttcctcttcatttcagcctcattcacaggcactaaagtggaggatcattcattgcctggttgaccatacaatttggacaacatgttggttaatgattctcgtggacttttctcaatttctactaactggtctttccttccatttctagaaagttttgtccccatcagcattctttttcattgccaaaactatagaaaattatgatggtcctgagatttatccttgttaactaatgagttagcctaccacaatttcatgggttctgttggaagacatgagactcctgggtcagagacaaaggacatcattactcatggcaatagtagtagccagagtgtcggcatttgtgctagaaaacagccccagtttccatagggtactgcaaagagccaggtgatgcctgcatacacagttgtgtacattagagaaaaagtattctcaacttaggggaccacatcttttataatgggcagaaaacctttctcctggaggtctacattaactttattatattggacagtaagcaaatctgcctttgctttctaaggagatgctatattttctaaggctgtttactctataaacatccagaacaaagggagttagtgcatcttctcacaagatgtacagaaatgatagatactcatggagaggtgtctttatctacttggtttggaattgggatagcatttttgattagaagttctttctcgattaaaaagttctgatgaaataagatagaatcataatagatctgattcaagcgtaacattgagctgttcttttccatgggagtacctttttttttttttttctttttcctacttcagttcatatcctggcctcgtctcacctagactgccacaattgccccttaattggtttcactctctgcagtcttgttctttctgtcttcaatacctctgctagtgggatcttcttaaaatgcagaggtgatcatgtcactcaatttaaatttgtcatcagttccttattaagccagattttaagttgttgagcagttgtataattatttctcatgtgctggttactatccagttttaagttggcaactaaattaaaaaaatatttttaaaaagtcttgtagaccagtcctaggtaggctctaccaaacaggtgtctaggctgcttgctgacagtttatatctgctcttaccatttttctctcttaaacctttgtctgcaggatgttattctctctgcctttaatatttttcatatctacctcttgactcctgtttatcctttgtacagagtaggtacagagtaggtacctactctgtaaagccattaaatgaacccttttcaacctagttagttgtcttgttctcagcacctttatagtaattttgaatgaactgtgcatatgtcattatagcacttgcctcattgtgttgtaattacttttttggggggtgtgtggggaggttctgcatcacactgaataaataaagtgtcagctactcataccaggacaactttccctttstacacataccaaatctctctcttttttttgagacagggtctccctctgttgcccaggctggagtgcagtggcataattacagctcactgcagcctcgacctccccggttgaagcaatcctctcacttcatgtccccagtagctgggaccacaggcacatgccaccatgcctggctgttttgtactttttgtagagacagggttttgccatgttgcccaggctgatcttgaactcctgaactcaagcaatccacctgtcttggcctaaagtgctgatattacaggcatgagccaccatgcccggcccacataccaaattgttaggaaagaaaactgctttccagagaattgttttagaatcaaatccattacattagttggtgctttaaaccaccactaaatattctctgcttttagcctagtataatttaatagtattcactggaaaatagacatatggtgtacagccctgtggtctgtcctaaatatggtccagtgtatatggatagcaaacatattatgtcaaataatattttcttgttttgttcaaattaaaatatagactgtggatattcataaggagaaagtggcacgaagagagattggtattttgacaacaaataagaatacatcaagaactcacaaaataatagcacctgcgaatatggagcgccctgtaaggtatattcggaaacctatcgattacacagttctggatgatgtgggccatggtgtcaaggtaagcattttatattayattaacaagctaatttgcatatccagtaaatattttggataggaaatattgtcataaagatgattttaatagattctctttagcagctggcattataattttcatacaatatttaatatgaattttactaaggttggggtgcaattttatcagttgaataggctgtattaaaaagatattaaaattagaaatggttattaagccataaatcctagacaaatattacccatttgtgttgtgaattctatgtctttctttcactactgaacatttaaaaataaaagtctacatgcttttcaaaattactttagaaaataatttataaatacttytatcgtttcatttctaaatatgtatatatatttgtatacctgtgtgtgtatctataatgccagcaacttattaaaaaatgaaaattgtatgtaattttgtcttaatgycccccaatctcccccacaaaaaaacccccaacagattttcaggagagatatgatgtgttgcctgtgttcatttctaagcatgggaaattagctgatcttgaaggatacctgtagtgtgtcagctttttggtatttatgggtcattttgcaagcatttggaatgaccaaaattctttcgctgtctctgctcaggataaactattcctttgaaatttggtagttcctttccaagaggactatttgatttggattctggtcttcagaatattttataagtttttaaggggtcagctagaatcttgaagcttgtcctagctgattgatctgactggtgctgttgctagatctgttacattctggattttctggggttcctggtcgagagaggagtatagctgacagcattgacctttattctgcccctctctgagactattggaatctcctcttcactttttatgtctggaaattgtatgtaaaattggaacacattgcaaatgcagaggtgactgcttgtttatttcttgtgtttttatccagggatgtggctaggattgtataagagctgaaattcagttttaattcaaggtgctttaaactagactgatctctgggattggagtttcgagaatctggggaaaatgtcttttgtgttactatccaccttgggatttaaagaaaaaggatatattcatgcatgcatgtatgtatacatacatacctgtatatgtgcacacacatacttgcacacgcacacactcgcactcacttctccccattttgcctcaccttgattattcttcctaccaaagcaatacatatttattaaaaattttttctgtcattgtcttagtagtgaatatcctccattaccttatccctcaacgagtaattgtgtttaacatttcaaaacatagtacttagctgagtataagatgaatccaaattttacaaggaagttttgggtgagaaaatttaactatttcatcgtatatgtgtaagtgggaggtgtaaacagcataatatatgctgaaagtatatgaatgtgaattttggaaatctgctttctagccataatatggatacattagacacagggttggggggcttggttttttttttagatttttttattgtggtgagatacacataacataaaatgactaactctttttaggtgtatagttctgtgacattaagtacattcacattgttgtgcaggctattttaaaatatatttttggcgagggatgaaggtgcatggtctgtgagaagaatatattttagaagctgattatttggcatatttgtctatagtttgtttctgtgactgaaaaatacacacatacatacaattacttttccccagtagtcttaatgctgctttattttcttagttttgtgttctctctaaaggatcattgttggcttaaatatttccagagcattgtagagatgtgtaaaggtagaaattttggtagtagttaatgaacacatgccaggccaaaattattagaaggaaaagtttaagtttattttaaaattagtgttttgaggatagtgagacattgcttacagctttcgaattatttttgtatcttttgcccacttttctatttagaagtttcttttcttactgacttgtaagaatcctttgttttctgtttgaagagagtagaccctcatatattggcaaatatttactcatattgctgtttggcttttgactttgatgttttctggtatttaagaaataaacatacagaattttaaaaattatatctaaatatattaatatttttcttatcgctactaggcttcatgcttacgattgccatactccaagattaatattccattgcattttcttattttgtgatgtaaattttagtgttttggtatttgtatttaaatatatctgggttttatttaaatagtatttactgtgttaatgcattttatgctatgaaataaayggtacatgttagtttaataggaatttaaaaatatgcaaaatatcccaaagtaaatctggttcgatttttgggaataataataagatatgtataagagaatcccagcatagagaaactaccagaacctattcataaaggagaatgaaaagaagatgatctttgtaagtgagcacaaggtttgagaggaagctagaatagagaaggcttgaatacttagcaaagaaatttacatttattttgatgaacactagtaataattaacagcctggatcataatttacaaaggacttttcatatgtagttggccctttgtatctctaagtttgcatctgtggatttarccaaccttggataaaaaaattccagaaagaaaaagtaaaaaatacgaggacaatacaagagtaaaaaataatacaaataaatacaatataactactatttacataccatttaccttgtattaggtattataagtaattgagagatgatgtaaagtatactggagggtagtgttagttatatgcgtatactacaccagtttatatgagggatttgagcatccttggattttggtatccatgggggtcctggaaccaagcctccttgatataccaagggatgactggattactgtgtgtttgtgtgcttgtttttaagcttcaaaagattatgtgatctaggagttgttagattttattattggtcttaaaagataagcttagatgtgttactttttttggagttttagtttacagtgattcatgaatcgggcagcttcagaccacaggagacatgaagcaggtagaagttcaagaaagcaagacaagcaaaatatttgattggttagaagttaattgtggtttctgattagtaaagttcctagttagaggttagttggaggtttctgattaagtttcttttaattgtgttttggtttgcctaagtaggaacccagaatgctggagccgtctcagcctaatggtctcagcctaatggctttctgattaatttttttaaaacagtgtagaaactaaagctttataatgtttacataggaagatttttttttaatttttattttataaagcagaggagtgagttaagaatcatttcaaagaaagaattggccttggctgggtgcagtggctcatgcctgtaatcttggcactttggtaggctcaggtgggaggatcacttgaggccaggagttcgagaccagcctggccaacatggtgaaaccccgtctcctaaaaatacaaaatttagccaagcatggtggcacacagttttaatcccagctacttgggaggctgaggcaggagactcgcttgaacccgggaggcagaggttgcagtgagccaagattgagccactgcactccatcctgggcaacagagccagcaaaaaaaaaaaaagaattagcattagacatttagtgcctatgacatacaaaactatgatgtacttagaagatagggaggaatcaaagggaatttcaaacagattccaggcaaatggtaaaattactcatccataaaggtaaatgttaaggaaacaaagtgagatttttttaaaaagagacagggtctcactgaagtgcaatagctcaatcacagctcacaactttctaggctcaagtgatcctccctcctcagccatccaagtagctgggactacaggtgtgcgccactatgcctggctaattttttatttttttttttcaagagaaggggtttcgccttgttgcccaggctggtctcaaactcttgggctcaagcagtccacctgccttggcctcccaaagtgttgggagttacaggtgtgagccaccgtgcctagcctgaaatgagatcttaaggaaataaaaaagtttcattttggatatattttggggatatttaaataaaaaattttatagatttctaacaaaaatattagtattttgaggtgtaagatgtagaggttatttcctactaacacttgccaacattgacacatctgcatgtctaataacacttaatagaggaggccgaacttcataagaggttaaagcttataccattgcatagtagcacagagttcaagtagaattttcattcccaatctaattcttcttttattctttccatttgggaccagcttatacttgaatgctaatttttttgtttcttatccacttgaaatgacaaatgaaggaagatatgtggacatatttagaatattttcttggttattttaggatagtatttagtattatgtatatacattataagatatacattgctatgtaagtatatactatacatgtatagtatatatcataatacagatactgaagtatacattagtgtattttatcttcaaggatcctaataatgttatactcaaaatttattctctagatgtgaaatgtcatggttaggtagggtaccagatgttgtttccagatagaagtaagcagtatcattttaaacaaatattgaagtgtaccaaatttctcgcacagtttctataaatgagaatgtatccaaaagacaccaaatctctcctttggatgatttcctttgatactgccttgtggccacctgaaaaatggtagttacttgttgagaatgtcagatgttatttaaaaaaaaaaaaagcttgaagcccccaaatctgtaaaaaattagactctaaaacctgaagatatttttttttagtggcattgtacaagtagtgatgctttaggactacacattgtttcatgytgtgtaggctagtcagctttaatagaagtagcctttaggatcaaaacaacttttcttcaactttgaattttgacttaactggctcagatgaaaacttagaactaaagctacttagaacttcctattagtgttggcctgcacaggattggggttcagaagctaggaatgagagagttttccagaccctgtttgtttatttcttagttagaatctggctaagttatcactgtgcatgatgaatttgtttttaaacatcgagatactaggtccttttttcatttttggaagcaatctgtggttttgaattttaatgtttgcagtttatcactttttaaactatactaccattgaagtaatgaatactcatacttggacattcattatccagtaaagtgttaggtctcatgcaccgatatgttaaaatagcttcacatctaatgtgttatggtgtttgtatttaaatgagcgtatttttaaaatcatctgttactcggttggattagttccataggacaaaatactgacttaaaaaatcattgagcctgcatgagattggaataattaagtggtggtttccttatgaatataattcttttgaaaaatacatgaaacacatgagtatttccccagtacgtatrgatctctttttctttacaaagtagttgaaacatggctggaaaaaagcttattaacatgaattgagtaactgtaaatgtaaacctgtcctatcggatataacttacctagcattaatgtctactttttccccccctttttttgccaacgtaaagtggctaaaagccaaggtaagagccattacttatcatttgatccacagtatttcctctgtattgatagaggctgcagagccactaaaatttgaaaactcttcttatgtctgtctgcttttccctgtaggatttatgtagattatttaatactcaagttcagttcaaataagcaacatttagcttggctgtgttaatatatcaatgatatattgacatctgtgtttatataggaacattaattttgctaacatttattgctttgctcatttttcgatagttgccttgctttcattgacttacaattaggaggtttcccagacatcatatgtgactttgttactgaattgttaggatgaagatgatttttcagatgcgtatttgagcaaattgacaagtaagatctatagttyrtgttcatgcacacatttcaaaaattttaggaaacccagtgtttgaatgcagataagtttgatctcagtgaacatgtttaacaataaaataagatattaaatccagtcatctcacctgtatttggctacaatgtgatataaatggcataaaataataggaagaccaagtgcaagtggttccttgactttttaaactgtagtaccaaagtctttattcaaactgtctgggaatccttaattcacattctgatatttaaaaaaaataatacatggtgttaaaacaccaggagaacaatttgatataaaaataaaagcatttctttctacattttagcatggaaataaccagcctgcaagaactggcacactgtcgagaacaaatcctcctactcagaaaccgccaagtcctcccatgtcaggccggggaacactggggtaagaattcaactacattttgcaaaagaattcatatgctaaaggaaaagatgtttctgtgacttaagtaagtgtatgggatccatgccacactaccctctctatgtgacgctaccttttacaaattcattttaattcctattttcctgaacagaatcccaaatgaatctgccagctttgtaatattctctataatctgtactaggaaagtttttatgtatgtataaatggcatgatttatttttttgtcatctaatttttaaaaaatataaatctgacttgtttgttttaaatggaatgattagagtattccaaatggtgcctttgcatgtgtttacagtatctatattgtagaactttgactagtggtctacttttgtgtagtatggcttagtccacagctcttctgtttcgcctattggtgtctgagacttagggactctttactttaggaaagtatgcactttacttgtaactatgcttctgctggtaatcttaggcctcttcacactagagtagctccatgggaaggccagttgggcaagtagaaaagataacagtggcttcttccttcctagttctcagtgtactaaatatagcgaatacttgtcaaagcattatatttctttaaggttgtttttcttaatactggaaatattatattggatttcttattttttggcagaggggttgttcaacaatcagtcttcttttaagaaggtcttagttttcatttttattcattaaaccctctgcccctgaaaaaaaaaatgaagttattaaacagaatagtcgaaatcatttattgagaaagtaatgattagaatgtatatctccatttattgccatattgagatgggaataaattgcagcttcctatgtaaataaatttagcttcctrtttaaagaacagtggcttatgggtgactgtactgagaaaaatgtacattttaaagtttgctattattgagcatttaaaaaattataaccataatttttagaaataaggttaggactttaaattaccctttcctatgtttttcctaggaaaaggtaayaaattttagttttcatgttaaagtaacaaaattcatatatcccagtgaagaatattttttaaaattacaaactttgtcatatatatttttaaatcctggtatacatggtcacaaagggagactcacatatttttgggaaaaatacaattttatcttttttattcattattcctttctccactatgctcctttagacggaatactccttataaaaccctggaacctgttaaacccccaacagttcctaatgactatatgaccagtcctgctaggcttggaagtcagcatagtccaggcaggacagcatctttaaatcagagaccaaggacacacaggtaagcctttaggttgagtatctcarcatctctaaagtgggtgtaactgactggcgacaaactcctatggaggtgctgagtaaaggtgaggtgccactctaatgctaatataaaatgtaaaagttgggggaataatattatatatgttcctgtaagtttgtgttataacttctgttttgttttgtttttttaactttttaaaacatctatttgtactattaatggattgtttgtatttcctccttttgatagaggtacagactctatcagactctacgggttaagactaaagaatttttttctttttttttttgtgacggagttttgctctcgttgcccaggctggagtgtagtggtgcgatctcggctcactgcaacctctgcctcccaggttcaagcgattttcctgcctcagcctcccaagtagctgggattacaggcctgagccaccacgcctggctaattttgagttgagacggggtttctgcatgttggtcaggctggtttccaactcccaacctcaggtgatcctcctgcctcggcctcccaaagtgctgggattacaggtgtgagccactgtgcccagccctaagaatgttttaaaatgctcttttaaaaaaattcaaggcaaaccactcaaatacttttggagaaaagattaaatatcataggaattatacaacgtgatttaaactttcagagattgaaggaaagaagattaagcttaaatctgagggagatttttttaagagaatcagtatactagaatatgttgttataataataatattattattatctttttggagatggagtctagctctgtcacccaggctggagtgcagtgacgcgatctcggctcactgcaacttctaccacccaggcttaagcaattctcctgcctcagcttccagagtagctgggattacaggtgcatgccaccacgcctggctaatttttgtattttagtagagatgaggtttcaccatgttgcccaggctggtctctaactcctgacctcaggtgatccacccacctcggcctcccaaagtgttgggattacaggcatgatccaccgctcctggccttgtatttattatttttaaatgtcctaaaagtcaattaccyggtgggtttttaaaaatttagttacagagcataacaagcattcagaaaagtatccacttcagtaagtatacagcttgatgaatggacacacactcatataaccatcacccagatcagaaaatggaacattaccagcaacccagaagcccctcatgctccttcctggttatcgcctcgaccttcttcccccaaaatatagccacttcaatttttgagtgctttataaaaccagataaatttattatataaccaaatttgttttattcttcagttttctctctcacttaataacgtgggcagggaacctctcttttgccttcactcttaggttggtaaatgagagataacttatcaaaatgatttatgggaattccactaaatagggtatatcaagatgcgagatgctaggtaagcggtatttattactattggtgctgttagtaaacaaattgttaagttgatatctgcagttactgtatcaggtcaagttctttgaggaacaaaattgttctctttgttgttattgaactcttggatcaaagtatagtttttctctatagtggaagcatagtttaatcatattcaacaagcagttattaagtgttgtttcattagatactaggcatttgtcaatagggcatagttcttttttcaagagctcattctgttagaacagggatcagcaaactttttctataaagggccagattgtcaatattttaggattcgtgggccatatatatggtttctgatgcaattactcagatctgtcattgtagcacaaaagcagccattgacaatacgtaaatgaatgtggctgtgttccagtaaaactttatttatagcactgacattctaatttcatataattttaatgtgttacaaaatattattcctcttgatttttttaactattaaaaaatataaaaaacattcttaactcacaggtagtaaaaatcaggcaatggaccagttttagcccacaggccataatttgccaaccccttgttggaaaaaagacagtaattgaagaggagcataataagagcataaatattcatatgtctatgatgcagtggtagcacaaagctaagtattgatcacctggcttgagggagttagggaggtcttcacatctaagctatgtctgttttataaatgacttttttctttttcttccattaacatatgataatctaattatagaatgatcatattgcagaagaaaataaaaatcttatccaggcattgcaaatctttgccctttgaatttctgggcttattgagcaaattatgtagattttaaaacataatatggagcctaaggctgcatgtgcacaaatatatgtttttacacatgtacacacattactataaacaactggatggcacaagatcttataccttactagaaacaactagagggagccaggtcctagagctaacaggacagtacatccacaggaagtagaatagcgaggagttggttagagtttatcagtagcaactattccagaatgtccacactgaaacttcactattgtctttctttgtcgttatgcttattttccagaaaatttccctatgttatcacctttctttgagatgagaggaagtttcatattaattttagactagaacggagtacccttttaatttacttccacatcatttgtactttctcttttgttgtatctattacattaccttttcakgtcagttttcccattatgaacttcagatggtgtagttcatgactgcattgttcactgctcttcatagcaggttttgaataaacaattgttgactcgtactataagattttgttggtgataaatatttcaacagagatggttttaagtactgtgttatcattatattggttccagataggttgagaagtagaggaaaccatttcaaatattaggattaagatttgtgatgaataacttaaaaatttcttgttacacacacacccccacccacctgcacccaccaaccctcccattgcctaccactttccctcccactctccctcccactctccctccctccctccctctctcctttcccttcctccctccctccttcccttcccctcttcctcaggttctgcatccccagagtaaggcagtctcgggttgaaaatacagtattcatgggatgcagaacctgtagataaggaaaaccaatgtttcatgtccactggttctgtagggccaactgcaggacttgaacatccatgggttttggtatccaagggggctcttgaaaccartcctccaaggatactgagggatgactatatgacataaaaggagtatttagtggccttgggtgattacagtttttttttaaatatgtctctagaattggtttttcacagtttttttttttcttttcagtggaagtagtggaggaagtggaagtygagaaaacagtggtagcagtagtattggcattcccattgctgtgcctacaccttcgccacccactattggaccaggtgtgttatttattaatctatgtttaatacatgataatatttatgagctttattgtggaaggctgaaataaattagtcatattgagtaaaattattaattaaatttgtgatcgttgctagaataaaggctgataacaaagttaacaatatttttagattgcttttcacaaagtctttaggatttcaccagctgtttctccttatatatactgcatattaagtagttttgttaaataactttttgttggccattttgctttagaaatatattcattcctcagtgtccatgggggattggttccaaggtcccctgcggataccaaaatgcatggatgctcaagtcctttctataaactggtgtagtatttgcatataacctacacacatcctctcatattctttaaatcatctctagattacttgtaatacctaataaaatattaagtgctacttaaatagttatactgtattgtttagggaatagtgacaagaaaaataagtctgcacatgttcaggacagatgtagccatctatttttttccctgaaatatttttgatctatggttgattgaatccagggatgaggaacccatggatatggagggctgactgtatttgcctcgcatactagtcaagaatgacatttattatttcaagagcaaaccagtattgtacgatactccagctggagaatcagtgtctataaaggtgaattatgtttctaagagttttaatgttgctttacaggccagtatctactctggtgtttgcttattttgtgactttactacatttatctatgatattcaatatatatttcagtaaaatgcaataaatgtaaaataaaattaagataggaaagttacttttagaaagcatgaaaatttaagaaatccttggagagcattgaattagccccttgatttttagtaaatgaaatggagactttttatattgttaaaaatgtatatttttaaagtatgataatgaaaaatgttaggaaagaaattcttagcttttcaagcatatttttgaaaaaggagaaaaagccacttataaacataggcatatttgatagttaaggcaggtataaactcggtagcctctttatgtacaaaattcatactcatttgagcatgctttacatgggggtatcttttttctttttcttcccgatacattgtactttcttgctgtttcaaaatgttgagttttcttttcttgtactctgacctgaattataaactattttattagaaaacatttctgtccctcctccttctggagctccaccagcaccacctctggcaccacttctcccagtgagcactgtgataggtgagattgcatagccattggagccattgaactcactttacataattcataataaactcctctgtgctagtagagtgctggcttttatagttattaggttgcaggtgataatacaaagtttaaagtattaaatctaatatcactaacttctggtgaaaggcttctgcacttatacagtaaacaaatataaaacaactttttctataatatgaaatgcttggtttataaccaacttaatgtgtttttaatttgttgtttgtttagatttttctagtctaatcccccctgccccgcacaagtgaaacttaatttggaactctctggtatatacaacagtcaaaggatcagggtgaaggtggggacaggaggagaaaaattgaaaggcaaacgatatgtgtgggatggggtactctgaggctttcctgtggatcatagtttgaaaaactctgatatggcccagtttttatgacatctcaggatgccatgaaatagttttctcgataaaatgcatttaaattgttcacaagttggggatgactgaactgagcatataaggaattttaaatatattttaaatgtcaatgtaaaaaccattgagtctagaaatacacaatcacagtaatctgggtagaaatggataatgaggtgtttcaaataatgagagctgagtttcaggttaagtgaaataaagctgtctaacaacatcttttccaaacatttgcacataccaaggaaaagggagaaaggaggtagtaaaatgaagaccctaagaatagaaattgttggtagaaaatctgtgagaaaaaaatagcctcaacccaattaataaccagaagaattaaaattaaaaccacagtgagatactattttatatccagcagacaggtaaaaaggtagaagttagctagtaccagtgttggtgaggatgtgtgttggtgaggaaagcaaattgctggtgggagtttattaatgtatacactcacttcagaaagtaatttattgatacctagtcaagttgaacatgtacctaccctagatttatcaatttcatttctacatatttaccctagagcactagttctcaaaatatggttaagggacccctgaggattaccaagatcctttcatgaagtttttgaggtcagagctctattcattatttgtccttttcattctcattctgttataactatacggtagaattttctagaagctgcatgaagtatgataaagtcattgctttgactcctaatgaaatgtgtacttgtgtattcatatgttttaaagatatatcagtttcagtatctaatatggtaattatctacagctataacccatgtcaacaaaaggcttttggggttgtctaagagtggaccctaagaccaaaaagtgtgaaaactgctgtcctagaacagtggttttcagagtgtcatccccagacaatcagtatctgagaattagttagaaatacagattctcaggtcccttctagacctgcttcaatcgggaaactcttgaggatgggagtttctgctgttataatacagcagtctatattataacaagctgtaaggctgggcacagtggctcacgcctctaatcctagcactttgggaggctgaggcaggcggattgcttgatccaggagttcaagaccagcctgggcaacatagcaagacctcatctctgcaaaaaatacaaaaaatttagccgggcatggtgatgcatgcctgtagccccagctacttgggaggctgaggtgggaggatggcttgagcctgggaggtggaggttgcagagagctgagattgtgccactgcgctctagcctgggtgacagagtgagacmccatcttaaacaaaacacaaggcttcaagaagaaatactgatcaatgatgaagtttgagaaccactgtcctagagattcaggaattatatttaggaatgttcgtagcagtagtattgatagcacaaatctcaaaccaaaatgtctaatagtagtagaatggataaataaattatgatatatttacatacaaataaaatagcaaaaatgaatgacattgatatgcatagccacatggatgaatttttgaaaatattatcaaggaaaaagagcaattcaacaatatgtacagattgattccattacaaaagtttataaatttgtaaaaactgtgtgtattgtttaaggttatatatgtgtatgtgtgtgtgtatatatatatatatatatatatatatatatatatatatatatgacaaaaactatttacagaagaaagagaatgtttaacatacaccttgtgggggttggaatccaggagaggagcacacaggaagcctcagtgatcttgttaatattcgatttcttgagctgtatattatttaaatttttttatacacacatgtatgtgtataattcacatgtataacatataattatgcatataagtcacacactctttggcattatttattttatgataaaatgttaaattctaaaataggctcagaattgctaaatgattggcttttgttcttgaatcaccaataaaaataactcgatttctgtacacttttttatacaagccggagaaatgtaaaatccttttacagagatttctattaaaaatggttggctgggagtggtgactcacacctgtaatccagcattttgggaggccaaggtgggaggattgcttgagcccaggacaagaccaccctgggcaacatagtgagactctgtctctacaaaacataaaaaattagatgggtttggtggcactctcctatatccccagctactcaggaggctctggtaggaggattgcttgagtccaggaggttgaggcttcagtgagctgtgatcccaccactgcactccagcctgggcgacagtcagactctttacccaaaataaaaaaataaattaaaaaaaaaacagttaaaggcttactcttttttttttttttttttttttttttttgagatggagtctttctccgtcactcaggctggaatgcagtggtgctgtcttggctcacgcaacctccatctcccgggttcaagtgattctcctgtctcaacctcccgagtagctgggattacaggcatatgcctccatgcccagctaattgttgtatttttagtagacacgggttttcgccatgatggccaggctggtctcaaactcctgacctcaggtgatccgcctgcctcggcctcccaaagtgctgggattacaggcatgagccactgcacctggcccttaaaggcttatttcttggctctctggaaaaacctagctgtccaaaattacttattcacgaaggcttttgaatagacaattatttttaaactgtttctatttagaaaatgagcatgtggatgattcaaataattggtgactgcctatgacttgggagttccaaaatgttagatcagcacttctcttaatgaacaacctctgctgtatggttttatctgataccttgtgtgacctctaagaaggattagacaactgaatgaagataaactaggacgctggctttttacttactctgtcattgtttgttgtttagatggggcaaggaaaataataataatcccaaagttaactttggaaagtatagttaactttagaggctttgaactctattaacattttaaatatgaaacttttgaaatgttgggaaagatgacacttaatacaatgttaagtattaatattttcatcagtttcgatattaactgatgaaaatatatgagcatgctaattttttttttttttttaaaagcagattctttggatgtactatgaaaaagaagccctccaggcatggagaaagagaatagatttgctaaacaaaactaccttaaaatgccatattttatagagtcaaaaaattttctgcttctgtcagttataaaaatttaatagggaaaatgtatgttaatcttaaaactttggagatctacaacaaatctgacattacatgaaagtgctttgaaacgagaaatggcacatttcttaaaaatgattttacttaatatgtattgatactaataactgctaattcaataaaaactcaaaaatattagtaaataaaaatttattgtttaacttggatttggctagatagagacttatcattataagactctatctagccaaatcaaaattctgaaagttttgtcagtggaaaggaagaaatttgtaactcagacatgaatctacttatatctaaagactgatgcttcctacctcacaccatcttttggtacttattttattggaaagacaatttacatataaaagctatgtatttgaaaatgcacaaaaaatttatatatcatattagcaaagtaccatttgggattatggtttttaaaagcttgagaatattacttatttacttttgcagctttccatgcagctgtttttttttctctctgtttttgactttggagataaagttactgatttttatctttacttttctctttattttgtgccttggtcttgaaaaagtaataaatatttcttactgaggccccctcctgctttgttctgccatctaaggtgattacaatgctcaagtctctttgttggttgcctttgactaatgcttttcagcagccccgggctcagctcctggttcccagtatggcacaatgaccaggcagatatctcgacacaactctactacttcttcgacatcttctgstggatacagacgaactccctctgtgactgctcaattttctgctcagcctcatgttaatggaggtccactttattctcaaaattcaagtaagcttgtgctttgcaggcatacagcaacagtggagctccttttgaaggaaattatttgaaactgttattcttgccagtgatagacaacaattgaaaaccatgatgtttcatgtttatttttgttttaggatattagtccttgaatcataccattttaagagtaattgyttaccactttctcttccaaaatttagacttaccaagtatacttaactaaatttatcgagacgtgtctatattgagtatacyaaaatttaactttaatatgcgattttattacataagtagaactagagaacaaaaacattgcagaaataaactgaatttattggcatgtttgagacagcrtastaatggtaaaattaaagacacaaacattgtcaaagttttccttyaaattaatataatgaaattgctggctatcacttttaaggtcattaacgtgttcagaaatgagttcaaaaccgattaaaactgtttgtgatgcctgcttaattactctgtctttgaataattctaatggtgggaatttcttttgatttctttctgtttacctcaaattgcacatctcaacactaattgcagtcagtgtttaaaagctggtaagaaaagaaaatagttttagcatataatgttaggaagttagaatagtgtagggtagtcattaatatcactttccatattaagatgttcaatgcaaaaaggaaaaaaaacaaaattagaaatgaacctgttgtccactgtttgcttttagcttaaaaagttgtgcccactgggcatagaatgagacaagctttcctacatggcttttgtggctctttctagagccacatgttatttttgtttatataaaaacacttaatactcagtgaattytccatatttacataggaggktgctttaagttctttttatttataatgaatgacctgkatatgtattttaaagcagagctaggggaaagttttttttttttttttttttttttttgaracagagtttcactcttgtcgcccaggctggagtgcagtggcgcgatctcggtccactgcaacctcaccctcccaggatcaagcgattctcctgcctcagccacctgagtagctgggattacaggcgcctgccactacacctagccaatttttgtatttttagaagggacagcatttcaccatgttggccaggctggtctcgaactcctgatctcaggtgatccacccacctcagcctcccaaagtggtgggattacaggcgtgagccactgaaagttctcattagttttttgtttaaattttaaacataaattatgttatagcaaaaattcctaagaattgaaaaccactttatcagaaatatcaaaattcacaaataatcccaaaatttatatagctttttttccagactaaaatattaaagctactgagaagtgttaaacttcactaaataggattttacctaacatttggtatcaaaaggtagccagtgtctgtctaaatattccagattatctaataattcacttcacttgtttcatcaactttatttttttcatattctgaatttttagatcccatctttttgtgtattatttttcttttccccacttagacatttaatttactctgcaaataggatttttgtgacttttttatataatacatagttttatagttttattttagcaatgcttgtgtggattattttcaaaccgtatactttaattaatgaccacattcttttgaatattggaaagcaaatttggcctcagattttaaataaattattatgttttgtcaaattaattatccttcaatctgagttactgttggtgttgtagtagtagtagtagtagtacgtgaatgtttttagtgttttgatgtgcacattttcccttctgtctaaatgtagtaatgattagtatcttyacagcatagcttttctttttcattacatactaaccagcatggctagttactaagagttgtttctaaacacttttttaggtttgtgagagttttttgttttttaagtcaaaacctctaaccttttatttaggagccttctatagagtattagaatgaaataggattgctttcatagtgaattgaatgttatctttagctatacaatgaatattaatgcacataattgctttgttacttctttgaacactgaacttctttcaaatttttatgcttaccaacagaatttgcatgttggattaattgaaacaaccttttgattaatccttggtaaccaataaattgtttttctctatcaatttagtgttactacttggtgactaccgatagactaaattttgctatctagtcctactgactttttctaagcaatctttggcaattactgtcttgttaaagtgagacaaagtcacaaacatatgaatgtttacttctagtgtatgttataatttttaatacatgagtatttggtattaatttcctgtcaattatgtcatctccacaaatgcatatgaatgtgtttcaagctatccaatgagttgttaaaaattactttaatgcaaagaactacgtattttaacttattggagatcaggtttcctttttcagaacagtgatraaaaggtcacttttgagatatcccatgaaactctgactgattaacatgatatattcccttgtaaatttaggactgatatttttaaacataaaattgccaacttaaaaaaataacaaccttgttttacaaacaagagtttttcctggagagctgtgtgtgaatttagatatataataagaactgtctttaaaggaaacctgtgattaatatttttattgatatatgaaataaatagctattatatatttgttttatttatttgggtcctaatttacaacattaccttaaagctagacawacctgttatagctatggcaaagacacaatattctggaaacctatgtaggtatttcattgttacctattttagaagtctttccttagaatttgaaaattttattttactaaagtgaatgtgatggtaaatttaaatcctccccaaacaatgtaacattaggattgaattaagtatatttgttcttttataaaattaattaattggctaagcacaacttggcctttaggtttgcttgtgggaaatgtactcsaaggttctgcaggtttttgttttgttttttgttttgttttgtttcatttgcaaactgttctttgcatacttatgtttgtggtccttrtaactgacttctgctttttgtttgtttccttttctttcctttatctgttttacttcccccatactgtgttgttgctaccagtttctattgctccaccccctccccctatgcctcagttgactccacagatacctctcacaggcttcgtggccagggtgcaggaaaacagtaagtttggaaaaactgagctatggaagagtagaggctgtctccttatagcatgcatggctgacgatgagtcatcgttttccttacttttattgagaagctaatcttgaaaataggtgcmgacatgttactgaaactgaagagcacggtcttcagttttttctctttgtgtgcatggttactgacccatataaatttcaaagctgcaattttcttatgtctttacatgatcctaaaacaggagatctgatctttacatattcttaaggaaagaataatcaaacacaaaaattcaaattatatggaaacttttagcttctaacagttactagaattagaagacatttttaattctaataaatttatcaagagataggtagatatactgtaagattaaatttaatatgaaattggggcagattttccccccttaatttcaaaattttagggaaagctttgtagcctcagatttttgtacatacatgatattgaacctacgtaaaggttcattgttaggataagattgaatgaccargaataagtaaattacattcatgctatccatttcagtgtgagtgataagcaatttagcatccttttcacattttggctacatccaggcccacgaagattgttcctgaatatgaaaatcagttaacttttttagatcttctctcgaatgaagttcagggatttttttttgtkgggggggagaagttattttggatatatggctttaatcaggatagactagtttatattactgcctgattacttttgaaattccagaagatgtgtaatcctaactgcatgatcacagtgaatcttatataaagtgaaaaataccactattactgaattataatatgctagaaaagctgttgatggtaatgtggtctatttttaatttacttcatttggaccatcaccatgaaaataaatctcaggatggtttgaacaaatgaataacccacttgcccagcctatcctccaagaaaatatattgtggcaaattccattcttcagcttttgctgaccctgttgtgttattctccccattccctccctcctgccagtcaaatatttgtgtacccgatgttacgtgccagactccgggaagaataccagcagtttaagacaaaagccccttccttcaggaaatgtgtgatccaattggcttgttataaaatgttgttttgtaatgttgaaatttctgagtgtaagccatccttactgttaatatgtgtttgaaaaccctaatgtgtgcaaacatttaaaaagatatgaataatcagcctgggcaacatggcaagactgtctgtacaaaaaaataaaaaattagccaggtgtagtggcatgtgcctgtagttccagctaccaggtaggctgaggctggggcatcatttgagtccaggacgtcaaggctgcagtgagccatgatcacactactgcactccagcctagacgtgcaaaaataaatagagtgcaaaaataaataaatgcatggatggatggatagatagatgtgaatcttatttttaaaaataaatgagtaagggtaaactgctggtcattaatgctgcagagtttaaaaacaaggccagtgtaaacttttgaactgccatatcagtaagaattattaggaaataatttaaaatagccataawgaacatcagttttgtgggtccaaagtgactgactagctatttggtaaatcttttctttatatagaaatccagtattagtgtacattattctaggcatgtgtggtctttgctaaagaggctcttggtactatattagttctttttaccaaacatatgaacttgggtcagtcagtgattctccttgtgccacagattccctaactttatttggtttctgttttctttgaaagtgtgttaggaggattggtgttaaaatatgtatcagtactttaaacgttttatgaagtacaaattttatgtgttctcttaaatacccagtttcttatgacactcaaagtgggtgataatgaatgcatgtagcagcctattaataagtatttcagtttaagatatgagcctctaaaaaagtcagcagtgtgtttacatctctttatgattatgcagagaattagattaaccaagacttccttcgccataatttgaagataagacatgtagatttacagcagttggacataaagacaatttcgtgaaaacattaaactaatgtgataaatcaagagtaaatgcaaggtaccaacatacataatttacacattaagccaaattaaggatatgaactatggctgtttgatgtcaggaggggtctgtacccattttcctctcctcaataatattaaaaagttttatagaggragttatgggcaaagataaaatggatctaggaatgaggcagaaaaattaattgtagacccgtttgataggtgttatagtgagcattaccatatagggtttgttttctaatagccctttcatccctcgagaggataaaatagaaatcacagcattgaagtggttatggaaatagggtcattatctgcaaatattttaaacctggagcccttggttgtatattcagcacattattccaaggagggtagactaaacgtttaaacctatatgacagatagattatggctgatttctttgatcacgtaaatagccccagaaattggcatttgatttagtatgtttgtattatgaacttctcccctgcaggaattatgtaattcctgtatcaatttgtatgaaaacattttcatatgtcttttgaacttttaaagaaatttattgatcagaaatttaagttaagcattaattgggttccagctttgaattctttaaattttaggagcatttttacctgatattatactagttcattgaacagagctctagcctgacattttcccatttccctgtttacacctttgactgtgtaaagcacacacatatatactgaccacgaccatctagagtttgaggtatgagtcatttttattgttttgtttactgtaagttcctttttgtttgttttttttaattacatcttcaacactttatgtttaaatcttaattgttgatgtattcttagaaaatcgaatctttaggatctaggctttccctcatcccgtgcttatgttttactagcaataatgcaaaattttagcttgctttctacattaaaaaactaattatgaatataaacctttttaaaaatactcaattagattttctactggttggggattctttttccattttttcaacttgtaaaatgtaaataacagagtagaaaatctgcacacagaagcagacctaatactaccaactttacttttctcttcatcaaaacaaacaataatcaacaaagaaacaaaaatctgtccacaggagactgaatttttagggaaccaaagctgtttcaagccaaaatcaggggcatgaatgagcagagtgaagagtgatcaaaccattaacgtaatgttactcatatcattactgcagtccaaatgacaaaagtgacatagatttattttagattgttaacatttgtcccgatctgaaccttggaataaggaaactactcctataatccttataaaaagagacattgtctcctaacaccctgcattcattaatttgtagtacttccagatacccttatttttagctcattttgttatttttaaatgattcttgagtagcataaactttaacacaccaagcttttatttctaatcattgcatgttttattatagtgcatgctgtacttaagttagagctttcttaaattctgttaacttataagtttccatctagacttatttttgattcaaatcaatcatatgaatctttttagttgctgatagtccaactccaccgccaccacctccaccagatgacattcccatgtttgatgactctccacctcccccaccaccaccaccagtggattatgaagatgaggaggctgcagtagttcagtataatgatccatatgcagatggggatcctgcttgggcccccaagaattatattgagaaaggtaaggtacagtcaytgagttgatgtgaaggaaaataacctaattgtagaaatttagaactataaagaacatctaatccaatgtttctcagccttttaaactgccttaccaaccaagatgatttacttaaaccttacttcctaagttttgtattattcccagtgtacagggggattctttctttgtattttaaataaaagttgcagtgttagatttgctttcaaactacatatgcgttcagctgaagattaacttgctggacggcattttatagatgaaacagctaaggcacaaaaatggagttatatgtaattagtaaagattttaaaagttctgtcaagctctattgattacctttcatatctaaatatggacggtccctgatttatgatggttcactttaggatcttttcaactttatgatggtacaaaaatgatatgcattcagtatgcttctcaacttatgatggagctttgtctggataaacctgttataagtaaaaaaaatacaagttgaaaatgtactttcaatttacaatattttccactaaacagtgggtttattgggacataaccccattgtatgtaagtggaggagcatcggtctttaaaaatatattagtactatcatgagaaaagcctcaattaaggtttcaattaggtgattttataaaacacaagagaaattatcaggattgtatttcatgaaattatgaactactctaaagtctaatttacctatagtacccgatattcactataattatctattaagaaatataggtggggaagaaacaaatcctgtttctagtttttattttttcatccagttctgtgctattttaaaatctgtatttctttttgcagaagtgggaatcaattaaaaataaaatctgtatttctatagagttctgaaaaatgcttgtgatttdgttgaacacttttggttgcctttgaaatatatttccttctattgactttactgggttaacggactttaagctagtagmtgtagctcttgagaccagcagcattctttcctgcccaagttttggatatgtggcaaaagtaaatttgttttccttttatatttttttattttttgagatggagtcttgctctgtctcccaggctggagtgcagtggtgcaatctcggctcactgcaacttccgcctcccaggttccagcaattctcctgcctcagcctcttaagtagctgggattacaggtgcccgccaccacgcccagctaacttttgtatttttagtagagatggggttttgccatgttggccaggctggtcttgaactcctgacctcaagtgatccgcccatctcagcctccctgtgctgggattaccggcatgagccgagcgtggccttatatttttaaacagtaagtaatttacatattgttaagaaagtcttgaatattctacttgagattcccatataccttcaaatagagagctgttgttacttacgaggatgataaacttgagtgaccttgaattgtgtttttacccatattttcttacttggtgaagccaattaactgtgaaaatgggaccatatttatataagttgacaaatttggaatgatatattgggtaatatatttgatagtagaggaggattaaaaagtatattcccaagaactaggggtgagcacactttgtttggtataaagccagatagtaaatattttaaactttgctggctatacagtctctgtcacaactactcagtcctgctattgtagcgtaaaagcagacatagacaatacatgagtaagtagatgtggccatattgcaataaacctttatttacaaaaattgcgtggtttggatttgtccatgggccattttatacattttggattactttctctttccatagcagtttgcaaaggaagtgaatataggctaagcatccctatctgaaagtcccaaattcaaaatgctccaaaatccaaaatgagttccaacatgatgccgcaagtggaaaattccacacctgacctcacgtgatgggtcacaatcaaaatgcaggcacatgacacagtttattcagtgttcccaagggaaaaataaaattaccttcagactatgtgtataaggtgtatgtgaaacaaaaatgagttttgtgtttagacttgggtcccatctccaagatgtctcattacgcatatgtaaaattccaaaatctgaaaatcccaaatccaaagcagttctgatcccaggcatttcagataagggttactcaacctgtatcttgaactgaaaaaattacagacaccacagaattgcaaagttctctaagtattaattaaaatcctttaaagtaagtaaatattctttaaaaaaaaatctggggacagtcccttaaattagcatgggtccttgaatgagtaggatgtgatttaccttccagtaactgtgttttttcaaattagatagcttggattgttacctggtttactgaatggctatgcagctttctttgcctgataattattttgaaaagccggtgctttgcatatgataggcacttggtatttgaatgaattgaaacatctaataaattctaaaattcagagagctttcttaaagtgattgacagaacctattgatstattcagtctaatcagattgtcatttggctctaagattaagccaatgatttaagtacatggttggccactgacctacttatattgatagatacaaaaattaagaaatcttcataaaaatagtttwgctgtgctatatatttaattgtctttgtcttaaaattcaagtaaattttggatatagtgcactcatgtgatatttcaactgttttttccatagttgttgcaatatatgattatacaaaagacaaggatgatgagctgtcatttatggagggtgcaatcatttatgttataaagaagaatgatgatggctggtatgaaggagtctgcaatcgagtgactggtctgttccctgggaactatgttgaatcaatcatgcactatactgattaatttttttttttcttttgaagtagattcttattactcagtcatactgtgggactattatggttaacagaactgtcttaatatgttttaaaatgtgcccatattttcagaacatgctgttttattggtaaattgaatgtctacctgtaagcataaatctttgaggcagtttatgtattgctgaatagcaatttatacaagaagctgtccataactgattatgcttatgtacttacttacacatttttaactttatgaccagcctaaatattctgggggaagtggggtataatatttaacgaatcatgattcagattgtaccattacatgtttcagtgcagcatggttactaacgctatgtcagactaatattaaaatcagaaaatttaaatgctggtgctggtcagactttttttgttagattctctcatttaaaaaaaatactgtttgtttaaagcatgcataaaaatttatgtattgmaatatacttaaaaattcaagatgcttcccatttgtgtaatatttacctggaggactcgtacttaggtgtcttaacgtgaattgagtctccaaggtctccatgtgaaacramcaaaaagagaattatctgtaatgttgtaatttgtacctaagttttttaatgagtgaaatttgcattataaactttttccattcataaatacataagtgaaccaaaggtttttgtcctttccttcactgatttgctttaaaaaaaataaaagataatgatttattgcagaattatgattctattttctcaatatgttaacttggaaaaaaattttagccttatcttaatctgtcccaacagcaatgtgacggatttttgcagattcaaaatctgcaatggttatttacaagtcaatctactgaattccttttttaaataatcttttgaaactaagaaaatgtgtcaaattgtgtgcattcattctgtaggtaaaattcttaaggattgccatgtcagtccttcagttgtacagtgaactgttgtacactggttcaatgaaaggaagttaaaagtaccttttacatattgtaaaagtggatacagttgatttgtgagtaggcactctttaatccattacctggcactagcaacattagaattttaaaataaaataattgggaaagaaggtgggtcatgtattaatcagtgaacagagatttacctaaccaacagacttggattgtcttttgacataatcaaaatgcaacacatgcactttgtgtgtctcctcttaattgaagggagggctgagggatgttttctcttcttgtcttgtgtataattctctattgcttaggatattaaagtagagcactcaagtgtgggtttctgtgttattgaggatttgtttggaattcaaattacagttatgtactggatgctacagacttataacagcatagtgaatggtaagactagtgcaaaacagttatttctgaaaattaaagaccattattgctaccaaatcaatgtgactatttcatatgcattttgcctttgttaattttaaacaaacaaagtatcattagtgatcagctagctaccttctactttccatttttcaagtggattgttctcttaatttgtatataacctgttgtctaaattttatgtacagtcttttataataaaccattctcctatatgaaattttggatactgttaaaatataactcatgtggacttcaatgcagacttcacatttttctgacctttactcctacggtaaatcaagacaaaccatttgaattttaacattggttatttatttgtgtaatggccttacatgtggatattaacagtgtaaacaataccacatataaccatcaagataccttgattataatttataggactagaatgacagattcaggtggtttattaattacatttaaaaagttttctgaaaaaacttttgcaataaaaaaaaataaattgcccatcaataagtttgatatcttttaaaatgatttttggttatctgcacatgaagcaaacaaagtgtattccacaaaattctttaggcacagtctggtaagatagctgccagaaagaacagaaagagttgtcatttatctcttgtgagtacaatttctgaaagctgaatgagggcatctctttctggggatggtcgaagtttactgatctctcttattgcttcatggcagtactgctgggcgaggtaggttgtttgttgcacaccatcactctataagatacagaacaaaacagaacagatgcctgtcactgactgaatcagcgttttaacttcctgctataataaatgaacacatagttttgagatcagatgagctgaggattacagttaacagtcaaactacatctctaatgttcttttcccgactcatagtgctaacttcctttaggcctttttctcatattgaagcaaatttttattctattagcatgcaaagcaactagctcatcaatattacatagtcattcgttttcccctaatttttacttattagaatttctcagaagttctatgtacaaagtatctttatacaacatttttaaatgtaaaaaaaacacaagtaaaacttacttaaaaaataaagaataaagacataacaaaatgaaagtacagagggtttatgatgaaaatcagcttcctttcttccaaaggcactcactttatccaatagttttttttttcttttttctttttttttgagacagggtctcactctgtcacccaagctagagtgcatgacatgatcttggctcactgcaaccttcacctcccgggctcaagcgattgtcctgcctcagcctcccaagtagctgggactacaggcgcgtgccaccatgcccggctaatttttgtatttttagtagagatggggttttgtcatgttggccaggctggtctcgaactcctggcctcaagtgatctgcctgccttggcctcccaaagtgctgggattacaggtgtgagccaccgtgcccagcctagtttttatttcttgattaccaattttagttattacctgttacctttttgttaagatgagggtttagcccacccacaatgtgccgcctcatcatcacactgctgtctttagttgttttgttgattacttctgttaggtagcatcaacttcagattttatcttctatgagctcttgtcctttcctttaactatactgtttgttagactatagatatttacatcctattctataaccatgttttaaaatattggttctttctaaaagccaaatactaataaagtatcatttctatgatgtaaaaatatttattgcagaatcaagtcatatactataattctatttccttctccatggctcatgatccctctgacatttatttattttttttaaattttttttgagatggaatcttgctctgtcgcccaggctggaatgcagtggcgtgatcttggctcactgcaacctctgcctcccaggctcaagggattctcgtgcctcagcctcctaagtagctaggattataggcgtgcactaccacgcctggctaatgtttgtatttttagtagagacggggtttcaccatgttggccaggctggtctcaaactcctgacctcaagtgatccacccaccttggcctcccaaaatgctgcgattacaggtgtgagccactgcgcccggacccctctgacatttagaaatggaatattcctaacattgtggttgaaatacatctgattttctataccagttgctcaaaacatgacatattttagtttgctgttcctttttgtacagaagcctgccttctctcagtgttttccacacgttttcctgaagtacatctgcaaataacctacccagaaagtgttcatggggactgagcgcggtggctcacgcctgtattcccagcactttgggaggccgaggcgggcggatcacgacgtcaagatcgagaccataatggccaacatggtgaaaccccgtctccactaaaaatacaaaaatcagccgggcgtggtggcgggtgcctgtagtcccagctactcgggaggctgaggcaggagaatcacttgaacccgggaggcggaggttgcagtgagccaagattgtgccactgcaacttgagcctggcaacagagcaagactcagtctaagaaaaatacaataaaataaaataataaaataaaaataaaataaaatagtgtttatgggaagtcaacattttagtcctgatgtgtggtgactttcttttgccttcggatttaatggatcctaggtttaaaatgtttcatcctcacttggaagaccttcctccactgccttctagtatccagtatctttgctattcattgagccagttttgacaccattttctagcataagtgaccacttttttgtttattttcttcctgaaatacttgttacatgatggtactggtccttgtagctcttgttatttttcactatttccccctttctgttttacacttgggaggatttccacaatttcacattgcagcccttctttggagtttgttcttcagtcattttcagtttcttagaacttgctcttactcatttaaaaagtatgatcctgtactgttttgtgaatgtggtatctttttggatcctcctatttacgtttttcctgtttttttttccccctgttattttggtcccactcttttgttcagcaagctttagtcaacttatttgtaaccctgagttgtctattcatatttaatgagggaataggcctagaagctctgtgggtgaacagggagctagaattttggagaatttgttcagagaacattcccgtggatttttgtttcctctaaatgtgtttctggctaggattgctggaactttgctattttccataggtgctactattaacttccctcttttcagttccacttcccactctagctttcaataataccattatttctgaagccagaacctctcccagggaatattgacttctttatcagctccagctccctgccatagtttttaatagtacgtttaaaccattctccaaaaaaggcagtaacccgtagtgaataatggggcttaacagtatagtcagttaagagagaaaaataaccttttaggggttggggttgctttttaaattttttaagaatctggaaggtaattatttggaagtctttcaggtactacactaagtacagatctcatgccacacttgctttgtaatgattttttgctcactccgactcatccagtagatctgttggctgcaaatgacagtgaacttggaaatggctcattctcacaggagtcagtcaccaaaactcaagtcatgcagagagatctggcttccacagaaaagttctgaagatacgtggcaatatatttaaagcaagccactagcccctgaatggggttaaatggttctccctttaaaagaaaaacatttatataaatgtatagtttgcctgtgttggtttattgttttcaatgatcatttctttagtcacacttttataacaggtaggatggactaggaaagcccaattatgagtagactattgcagcagtccagcagcagcccggatggggtcatggatggggacatggatgaggctggagccgaggctgggtgactgggggcccagtgattctgttgatggacacagggaaggctggttccacaccactgggtttcaacactaacagttcaccacaatcacttaggtaccttttaaaagatattaatgtctgtgccttacctaagaccagttaaaacaaaacatttcgtaagtagtctagaagagaaatgaaaataaaaaatcagaaaaatgagttttcccttctcagtttttgtcacatcaagagttgaccaaacagtcttgtatctataatttaatgtttagttaatgttacatttttggattaaaggattttgccacgttgttcctgctgctgccttttttttaaaaaaacagtcttacctgtagtacatactgtcgagctctgtctacatctccaggcaaactgaaccgtcgcatgatcatagcattcatttctgggaactaacaaaaaaagagagaaaatctgagaaaatctatttatttctcttgggagaaacaagtgttctaacactagtttgtaacaataggaaataacaagaaacaacaaaaatgaaactaagtgtctagatgatgtgggggagcagtaaactgtggcaacaaaagctgagctaagagacatccaccgtctatgcctaggcactgtggtggtgtatgggaggagaagacattagtccttgtttattctgatgttttatcctagtccaacactgagttaagagaggcaggaggaataaagtacatctttaaaacaacatggttctggccaggcgtggtggcacacgcctgtaatcccagcactctgggaggccgaggtgggcggatcacctgaggtcaggagtttgagactagcctggccaacatggtgaaactccgtttctactaaaaatacaaaaaattagccgggcatgatggtgcacgcctgtaatcccagctactcgggaggctgaggcaagagaattgcttgaacctggggaggtggaggttgcagtgagccgagattgcgccattgcactctaccttggacaacgagtgaaactccgtctcaaataaaaaataaaaaacaacatggttgttaaactttaaatcgtatcaggatcacctgtactgcttgtggggcctctcccccagtttctgattgagtagggatggagccttggcatgcatttctaacagatgccaccatctaacaggtgacaccagtatctctggtctctgccaacattttgagagtcactggcctaggatgaggatgggaattaggcattctactctaagttctaaattgattaccaactgaaagctactgaggtttctgagcagagggcattatgtgcagagctctgccttaagcagtgtgtagagtggatctgagcagcggtgcatgacattgactgcatactgggatcagctggggagtgttttttgtttttttgttgtttttccccccctcctgtgatggagtcttgctccatcacacaggctggagtggtgcagtggcacgacctcggctcaccacaacctctgcctcccgggttcaagcaattctctgcctcagcctcctgagtagctgggactacaggtgtgcgccaccacacccggctaattttgtactgttagtagagacagggttttgccatattggccaggctggtctcaaactcctgacctcaggtgatctgtccacctcagcctccccaagtgctgggattacaggtgtgagccaccgcgcctggcctggggaggtataaatacagttgcctagatcctgttcccagagactttggttatactggcttggggtttagcctgggcaccaagattttcaacctcctcccgcccaccctggtatttttaatgtgccgccaaggttgagaaccatggaattaagagtcagaggtagacagaacaaacaggttactagagtaggttataaaaaagacctgaattaagatgatagcaagaagagagagaaaaaataggtaaaaaaggaactgaaggtaaaatcgatattctacaatacttagcaactatttagaagtgtcac

SEQ ID NO: 97832 - DNA, 24675 bp, Homo sapiens
gaaccctgcagaaatggacagcaggcatctccaaagtgacctgtgtagattaatgaccagtaaaggcacaccccagatgccctggcactatggacggcaccaggagggggatagtgggagcccaggagtaataagttggatttccctgccagctggacgagatgaggactcagagtcaagatcaagttgcttttcagggtataaagaaagaggatgtttcttgcactcctggggttgtgacaagatttatacttgctgcaactctcattaccctcctgaaggaacccttggctcccccaggctactctgacctttctctcaggattggggctcattcccatgtcccctccctcatgacctcccagagccactcaagctcactctccgccgcccctaaagacctcttcctccctcctctgaagcttgaagctcacgcatcacccatttgacagaagggtatggtgagttctctctgcaaggctgggtcttggctacccagcttgtccaggagcctcctgaaggaggagatgtgaccctttcttctaattctgggctgagcctcggagcagctgctcagtgacagacccaaccacaacacacaggactggagcctttcagcaggcaggcccttttccaactcctgtcctcacctcagccatgccacagcacgtgttgccacatccgccagcacccagagcagacgccaagttccttctgtctgcaatatccaggctggctctgggatgactcccccgtgacccaaccagccagtgggtgtcagggcgtcctctcctaagacaagcctcacccacttcctcctccacctgccatagatggacagattctgctggagcccgatgttgagaaatgagcacgttttgtgttaagagctctgtgtacaccaggaccacagcagatgtaaacactccagcctctcttctccagctagataaacttcaggctttcagggcaaggcgctgcccccagcacactctcagtgtttaaagaagatgtcagctgcagcccgtgttttggcagaggccgactctccctctcccagctgaagtcccaaattctgggccactgatgcccaggccaaggggcagggggcacagagcgcaccttctaaaggggccggcctggggccctctggtttacagactaagaggggactatctatgagaaataaatccaggagtgctatagactctgatgtcctgctacaaaatccctgcaggacgtatggagaaatattctcttactttaagctttagggcctgtaaaaataaaaatgctacccattcacccctaacaaggtgataatttagactttactcatcatttgttattcatttattcatttgatgtttattgagcatctaccatgtaccagtgtgccaggcattatacggccctgcccacttgaaatcccaccattaacttagaactttcatatctgtatcacaaagacatagatataaataaataaataatgtacacataagattccccatccctcactggagtattattttacattttattcatcatttttattcaaccaacctttataggacactgacaacgttctggccactcctagacactggaaacaaacaagacgcgatccaagacctgagaagccttgcctgccatcagtgtgacaaggaggtgatcaaggaagtggtttcgatgggcctccgggacgtggaggccgacagaacagtaaaggcaagacaaggggacgtgagccccacctcactggtgatgaaaccaggcctcgccctgcccctcttgggagctcctgcacctctttttttttttttgagatggaatctcaatctgtcacccaggctggagtgcagtggctgcatctcagctccctgcaacctccgcctcccgcattcaagtgattctcctgcctcagcctcccgagtagctgggattacaggcacttgccactgtacctggctaatttttgtatttttagtagagacagggtttcaccatgttggccaggctggtctcgaactcctgacttcaggtgatccacccacctcagcctcccaaagtgctgggattacaggtgtgagccaccatacccagcctcactcctcttctctaattgaggaaatagataggggctcctgggtctttgaatttcatgggccaatataatattaaaaacctattgagggggccgggcatggtggcttacgcctgtaatcccaccactttgggagactgaagcaggcagatcacctgaagtcaggagttcaagaccagcctggccaacatggtgaaacctcgtctctactgaaaatataaaaattagctgggcatgggggtgggcgcctgtaatcccagctactcgggaggctgaggcaggagaatcgcttgaacctgggaggtggagggtacagtgagccaagattgtgccactgcactccagcctgggcaacacagtgagactctgtctcaaaaacaaacaaacaaaacaaaaacaacaacaacaacaacaaaaaccctattgagggaaccataccggtcactgactttttattccaccaagtaaggaattttaaagaaaaagcaaaaccaggtcaacaactaccatccgccatccccattatttcatgaaagaactcaaacagcaggaagggcatggtctcggaatgaaggacagtccatggaaccagattcatctagcagaatgaaaagtgttcttcttcttgtcctcatttggccccaccaggagctcccgcaaatacagatgtgatccttcctcctgtctctgggatgatcactggagcagcggctcagggtcagacccaccaccgggcacaggactggagcctttcagcagaggggctgaccctttgccaaccccacgtcctcctctcacttcggccacctcctggcacccccagcattgccctggtgacagggtgaccctcagcgctagtgtcccgcgatgctgtctgtgacctctgaagctagggcccagagcagcctcccaaacagagataggccactctcaagagcatcccccaggcgctgatagcaacgcctcatccacagtgctttctggagccgcctttcctctcccacccacttctctcacacaccacagctctcccaccttttcttcctcaaactccctggaagatcattcctctcccaactctggtctttaagcctctagcccagaggtcacaattacaccaaccagcaaggcacagttgccagcgcacgcccgtctgaaggagtggctgctgtctagctgtgtggacgttgccctgcgcttcccaggcccccttcaagctgccgggcaggcatatagtaccagcaccatgtttagcgtccccgactgcaggcctcgcctcaactgccttgacaacaatcacatgatttcttggggtggcccacgtccagtgaccaatgtggaaatataaaggcctggttaactttgccccacacggggcaactctgaagctatcccagttccaattacccatggggttaccaaggctattgtaggcctggaccacagcacgatgccgtgcttcagccacacttgcttcctgccttgtctgctgccccaagtgttgaccccagtggtagctccctgagaaacagctggtgtgtttcttacacagcagggtctgcttcctggatgcacgcaactggcaccatcagctcaggtgtgcgattacaggtgtgagccaccgtgcccggcatttttttttctcctttaaaaggactggccttccaggcgcagtggctcatgcctgtaatcccagcactttgggaggctgaggcaggtggatcacctgaggtcaggagttcaagaccaccctgaccaacatggtgaaaccctgtctactaaaaaaatacaaaaattagccaggtgtggtggcatacacctgtaatcccagctacttaggaggctgaggcaggagaatcgcttgaacccaggaggcggaggttgcagtgagccaagatcgtgccattgcactccagcctgggcgacactgtgagactccatctaaaataataaaataaaataaggactggccttcgggatcgctgtctagctatggactcagaaggccagtgccaagcagcaaagctgatcaggaaccccttcatcctgggtggcccgcatcttcccctttcacgaggcttcaaaccatagcacatagttggaaggctgcaagagcagataatttaaggggaaaataaaaactcagatgtacaagctccaaaacataatcccctttacataaacagtggaggtggcgggatgttgtggggaggaaggaacttgaactctgctgggcttctgtgactggtgacaggcgctcaggcatcccagccctgcactgggtttgcacctgaagctcaacaaattcccactgcctgggagcaggaggacagcaaaaagagcaggctgtcttgggcttccattcttatttctacacattctgctctttaggaccctggccagatgggcatgagacagaagcaaaccctaaagtactgctactgttgccgccaccaacagagatcaaaggcagagacccttctgctagggtccaaagtccaaacaggccactccagagaggaaacaggcacacaggcacacacccacgggaggagtaggggcccaggaagcactccctccccaagggcaaggatggggttcccattcgacccagcacatgctcctcacatctgcacagcagggagaccaaacaatagatacaatttcagtgttgattgtcgatgaacttacccagaagttcataatcagaaaaatccataaagaagctctttcaatttcagcatgtttaagtttcatgacttatggtttagtgttgtttttatattggattccatgggtggcataatcttttcagcactagagacctttaaaggtctttctcagctcaccccgggagacaagggctgggtgtcaggaaagtgacacacagggagaagcagaaaatggactgggagtgtgggggccgaggcccagccacgagaaacccaggcggtgcaaggcagagccctgggagcacagaggctgctgtgccgtgggttgctggtgaatgagaagcctcctctgctttaatgaagaacatgcccccccgactcccgctaatcctgccctgccttcatggtccacacaccacaggtgtgcacaggttcatgcgtgtgtgtgagcttaacacgtcagccgcacatacagttgctcagaaacatcttcactgcttcacacacgtgcacacagtcaatgaccaggagcagggatcttggggcaaacctagagcagcttctcaggagttaaaactccagctttgctgtggttcccggaagagccctgactttgtcctaagacagtggttctcaaagtgaagtgctggctccagcagcatcagtatcacctgggaactcgctggaaacgctccgggttctggcttctcctcctagagcgcccagagctgtggggtcctcccttcgggccagaaactccaatcatagtttttatgtaccaacccctgtgctaagtagactttgtgcacattatctccatttaaaattcacaaatgtactgtaagatgcacaccatttttctatatttttcagatggggtagacagagctcagaaaggttaagagacttgcctggagtcaccaaaccaggctcgaactccttctgtattcagaatcactcttcagacgtagctcctgtcctgggctgaaagtcaacatccgccgagagctgggccctctgtaccagccccatctcccccaagtctctccctgcctctgcagccagtcctaaatctttcaagagacaaggccaagcagggggtgggaccaggggcgggagccaaagccccccctcgtgagcaggcagcacctctgccaaggcccccactggccctgccccagagaacggcagggaagctgcagcgagggctggcagctggcagagycctgagcacccagcacccagcccggcttgcagcccaaagcctggagagaggctgctgcgccattgacctgtggactccagagactcccgctgtgcattcctctgatctggaaggtttcctgaattacgtgacgagaaacctgggttcragtcctaacttgtcaccaacttcctgagtgacctgggctggtcccgtcccytcttggaatctctgtcttccatctcttcagcraaggggttgatttataagggtgttttctgctctgacactgtgatttgaattctgtgtttccayatgatattcgagaagtctggccrgaaggatggaatctgaaatgacaatggttctggactgggctttgtgctcagcccagctcatctttgcctgagacctaggagtggccccaggctctcctgatgtgccaccacgcttggcatctgctcctctccctgcccccatattcccatgctctgaaggggagttctctttcatagcaaatccgagaggagccraggagccaggtcctttgttccagacccagaagcagccatggggacctgtgrcattgtgactgaagccaatatctcatctggccctgagagcaacaccacgggcaycacagccttctccatgcccagctggcaactggcactgtgggccacagcctacctggccctggtgctggtggccgtgacgggtaatgccatcgtcatctggatcatcctggcccatcggaggatgcgcacagtcaccaactacttcatcgtcaatctggcgctggctgacctctgcatggctgccttcaatgccgccttcaactttgtctatgccagccacaacatctggtactttggccgtgccttctgctacttccagaacctcttccccatcacagccatgtttgtcagcatctactccatgaccgccattgctgccgacaggcaagagrgtccttggggaagctggggggagcctccccactgagccggggctcagataagggtggtgacatgcctgtgrttacacagcaagtttgggtagaaccatgggaatggcttcccaaatctggtcatggtccaaaactatgaatctggaaggcagggggactgtggagctgaagaaggtagactgagggttagacacagagaaggactttgcactagatgcactagacaggttgttcaagtctgtaggggaagtgggcaatgttttagcgaccttctgaagtgttctttcctggagttgatctttgttttgttgtctttatttcactccaaagatatgtcttatacagttttttttttattattccggatagattacacgaggggaaaatgttaagtttgcttgcagttacaatctaatagggccaattattttcccaacgctgctcagggctgagcttcaggctaatgttggatgcttgatcttgccctgagatgggcttccagtgtggctttcttgtggccgtccacgggcatgtccatgcccagaggkaaatggtgggccgaggtgcctgggccggggttccaaggcatcagtgtgctgtgtggctgtgggagagtcacccagcgggctctctgcaggtcggctgatactatgatatcagcagatggcagcagtgcggggaatggctagarggcgtgggcctgggttgggagagagggagacaggggaaagggagctgggctaacaggagggcccctgccgctcaagctgccctctgctcacaggtacatggccatcgtccaccccttccagcctcggctttcagctcccagcaccaaggcggttattgctggcatctggctggtggctctcgccctggcctcccctcagtgcttctactccaccgtcaccatggaccagggtgccaccaagtgcgtggtggcctggcccgaagacagcgggggcaagacgctcctcctgtaaggcctctgggggattgtggagggcaacagtgtgtgtgtgtgagtctgtgtgtgtgtgtgtacacacgcgtgcatgcatccatgtccatgcatgtgtggtgtgcatgcatgggtgtacacatgagtgagtgtacacgggattgtgtgaatatacctatatgcttagtaagcaacacacacgatgtagccgatctgtttttcacactttacatatattgacccatttaattctcctaactatgtgggatatatattatattattattcttaccattttttagatgaagaaactgaggcactgaaaaactaagtaacatgcccaaaaccacacagctagtaattcaaatccagctagtcatttgaatccagctatggattcaaatctaagcaatcctgcccagggcccaatctcctcaccactctgctactcaaatatgcacccttgcatccttagataaggatatgcatgcatgcacacgtgtatgtgactgtacatgtcacgtgaacatgcggcacccatttctgcctgtgtgtacacgtgcaagtgtgtgggcatatttgtagatgtgtttgcacacaggcacgtgttagggacatgtgtaggcgtgtgtctgggggagactctctatatgctcaggccacaaagcggcaggagactgaggcagaacgagtccatgatggagcctgggacattttcaggctgctgaggtgggcatcacrggctggaggcagggagggcagggttagaggaattcaggcatggcccagctgctgtgtgaccctgggtgagtcctttctccattccggcctcagtttctgaggatctcacgatgtgtctttgtggtccccaggcactgagccattgcttggtagaggctaaagaaccgactggggttctgggctcagtcaggcccaagtcgtggcctggtcccacgtggccggaggatgcctcacactcacgtaacctctgaacctctggctttctctctctaaaatgaggattcataatagtacctygctctgtgagcataaatgagatagtgtacctgaagcccttagcaccatgcctggcacagaactggtacccagtatgtggcagcttaaataggggacacatgaaaacacacctgggggtggcagatccttcccacaaagtcccagctgccccaagcatgagggtgtgcatggtctgaggtgagggctgccaggtagccatggcaacacacctctcctccaacatcctccctgcctggtctccatctgtcctgagcacctgccaggagaaggctgctcttgtgggcttcagggatagggaaggtgccattcttctgagaagccgttcctggggactggcgagtctcgagggcaggccctgcccagggtctctgccccctccctgcaccccaccctctcacggagggcgatatccatatatggggaatgcccggctttctggctcagcaaagggtggagagcagaacatattgagaccggccacttggggtcggtatttctccatcttcatacaggaccactgtgcgtgccagctctctgagaacagcgagttccatcccagattcaggcgactgggaaaaacaggcgggcaggggtgggctaggaaagccatactttggtgttgcttaaaattccgaaaggatttggggaaagcctggttttaagtgtgagaatgtgttattgtttttcttgggggagagcctaatttaggatgagggctccatccacacaggctcatgtaactgtgtgtaattaggaatctgatgaaattaaagatgccctcttcaggaacatgcgcacacacccccaaaatcaaaatacaaaaagactacctttgggaggccaaggtgggcagatcacctgaggtcaggggttcaagaccagcctggccaacgtgatgaaaccctgtctctattaaaaatataaaaattagctgggcttgatggtgggtgcctgtaatcccagctacttgggaggctgaggcaggagaatcgcttgaacctgggaggtggaggttgcagtgagccaagatcacaccattgccaccagcctgggcgacaagagtgaaactccgtctcaaaacaaaacaaacaaaggcggtccctggaactcttcccctctgccttctgcatggagacctagcccagggtgaattcctgtcctgcacaacatcctaggagcaagcaacagaggagtgtggctcctgctaaggaaggacttagagatggcctcctccttttacagatggggaaactgaggctgagggaaagccctgacttgcctaagatcatgctttaaacaagaggctggacaagagccctgtactgactcccacagtgctgaccctcagaaaaggggaaatttggtcatgattaaatctgtagacgggtatgacacagacttcctgtgcctctctgggcctcagtttcctatctggacactgagataggtggccctgtagatcctcactctgtaaggtgatgggccctggccctcgttgyccctcctcccctcttatctgctccacactggggttctcaacccaaagcctacttgaggatcagggagtctaggagcgcctgaacctcttgtaattggcatgcttgccaaaagaacccaagcagaattctaaacacaagactttaggagagagatttactggagccattataatcacccagtgggttcaccttgcctgctgcctagacagaaatgatttatcaagacaggggaattgcaatggagaaaaagtaattaatgcagagcctactgtgcaggagaccagagttttataattactcaaatcaggccaggcgcggtggctcacgcctgtaatcccagcactttgggaggccaaggcagtggtcaggagttcaagactagcctggccaacatggtaaaaccctgtctctactaaaaatacaaaaattagtagggcgtggtggcaggcacctgtaatctcagctacttgggaggctgaggcaggaggatcacttgaacctgggaggtggaggttgtggtgagccaagaccccaccattgcactccagcctgggcaacaagaacaaagctccatctcaaaaaaaacaaaatcaaatcagtctcccttagcattcaggaatcagagtctttaaagataatttggcagctagggccttggcaaatggggaatgctgattggtcgggttggagatggaatcacagggggtcgaaatgaggttttctcgctgtcttctgttcctgggtgtgatagcagaactggttgagtcagattacccggtctgggtggtgtcagctgatccactgagtgcaggctctgcaaaacatctcaagcactgatcttaggttttacaatagtgatgttgcccccaaggaatttgggggaggttcaaactcttggagccagaggctgcatgacccctaaataatttctatccttgtagctaagttgttagtcctggaaaggcagattggatcccaggcaagaagggggtcttttcaggaaagggctgttatcaattttgcttcagagtaaaatcatgaactgaattccttcccaaagatagctcggcctacacccaggcatgaacaaggacagcttaaggattagaagcaagatagagttggttaggtctgatttctttcactgtcgtaatttcctcgttatttttgcaaaggtggtttcaccatgggtccccttcccttggggtagcagcacctctagaaaggggcgcagcmagcctagcatgtggcaggtagaagcaggaggtttgggaacacctcagtcctcccagtaagaaagaaaaagtcaaatgacgggaccaggggtctcaggcccattggtggaatgctytaaggactctgttccatgaaagggacccccaaatgccaaaggagcccagacccaaagaaggaggsagaacaaatccagtttgtcaatattgggtgatttattgagggaatttacagaccgaagtgggatcttgggtggccacaagacaggtggagctctgcattctcacaccccagatgcaaggcttagataccatarggaaagggtattcgtgctccagcaagacaaccaaaggcagccctccagaacaggcaagaacgctacgtgmgtcacagcctacgatttgtggagtaacatcaaggttgacatgttcttacactaggggcagtaaataaagtagaaatcagaaggcattcacaagactggggcgaatcggaagtcaacacacgggagtggcatccaagatggagtcacttttgtctccacaggttcccactgcagacctgccggggagtcagtccccagcctgcagctcatcagagagaggctgcagcgtcactcataaaccagagatctgagaactggggacactgtcgttttttttttttttttttttgacagggtctcactctatcgcccaggctagggtgcagtggcccaatcatagctcattacagcctcgatctcctgggctcaagtgaacctcttgcctcagcctcctgagtagctggaattacaggtgtgccccattacgcctggctaatttttttaattttttttaatagagatagggtctcactatcttgcccaggttggtctcaaattcctgggctcaagcagtcctcccaacctggtctcccaaagtttagggattacaggcatgagccaccacgcctggcctacactgtttccaaaaggaaatgaaaagcctcaacacaacccagtgtcctccctggggacggggtaggaagccacscaatggtactctgcatcacttcctcaaaggtggtatgaaagagcatttgctgacacaaacgaggttcccagccaaatgctgataaaccataagcagatgacacagcagcatgtgatatatggcgcttttccactgtcccatgcctccatagcgatgttggtgcagatggagccttattaacaccagtcattctatccatccagacagatacagattatatatatatatatatatatatatatatatatatatartatatatatatatatatatatatatatatatatatatgtacatatrcatatacatatacgtatacgtatacatatatggctatactgtaggatacactccaagacacccggtggatgcttgaaacttcagayagyactgaattctctctatatagatatatactgtttttttcctcaacatacctatgataaagtttaatttataaattaggcacagtaagagattaacagtaactagtaataaaacagaacaagtataacaatatactgtaattaaacttctgtgaatgaggtctctccctctcaaaatatcttgttgtactctcctcccctattttggatccgcagttgggaggggtwactgaaacccgggaaagtgaaactcccatcaggggtgactactattcatacatatgattctggaaaaaatatgccagatattaatagttaatgttaatagtggtgggagtgggataattttactgcctcctttgtgcttaatggyattttaaattgcaaacaaattatttcttaatttgtttcattcacttttcctttttttgacacgtgtctatcacgtggaaggaygtgatatggaaggacgcagggctactgctggcgtcccttttgcagggaagccgtctcctggcacacaggctacccaatgccacctttatttttgtttaaatcaaaccaagtccctgggaggcgcccagsgtgggcccgcaggggcggctccacagtgcccgcggggtcccaggaccaggcgctggcagacttcggagtcgcccccgggccctccgctgcccaggcctcggctctccctgcaggtaccacctcgtggtgatcgccctcatctacttcctgccgctcgcggtgatgtttgtagcctacagcgtcatcggcctcacgctctggaggcgcgcagtgcccggacatcaggcgcacggtgccaacctgcgccacctgcaggccaagaagaaggtgggcgcgggggcgggggcctggagggggcggggcctggagggggcggggggctggcgggggcgaggcctcatgggggcggggccggacggggtgggacgggggtgggacgggggtgggacgggggcgggacggggcctggccccgccctggggagccgcccttacggtctcaaggccggtccgcaagagggcgcccgggagaagcttgcggaagctgccttcgctcgaagtctggggccagagcctgaccgcgttcctcccagccgggcggatttgcctttggtctttggccaaatacaaaattaaagaaacttgccgggcgcggcggctcacgcctgtaatcccagctctcagggaggcagaggcgggaggatagcttgagcccaggagttcgagacctgcctgggcaacatagcgagaccccgttctccacaaaaaggaagaaaaaaaaaagacaaaaaaaaattaacttcccagaatgttaggggagtcagggactcctaaagccccgtagaattcagatacccccaagaatcttagaatgataaaatattaaaatcttagactttttgaataatcagaatgttgaaattgagaagccccacagaactatagaaggtgcctgacagtcacaggagagccctcaaaggctggaactgcggaccccggaggtcgtggagaccagatagttgtccagcttcatcaaatctgtctccagtttcttccggaagtggcagtgtccccctactccctgccatccagggtcccccgaaggtcctgatgtagccctctgtgcccaagacccccttcaccctccttcagtccaagcttgtccttgcccccttcctaccaggcaacaggggaggtaatgggttaaccacatcatgtagccaggtcaaagccatgcttctcacccaaaagtaggcatctttcacagggtggttcggggagatagctgcacatgggcgccatctggtgcccctcatggagcactggcctccatctgctccacactaggggtctcaacccagatcctacgtgaggatcagggtgcccaggagcccccagaccttttgtaattggcatgctgggctgccaaacggagcaggagtgtgcctgcaggggccaggctctgaggagggggaggtccaggagctgacccgtgggcagaggcaggggtccctggttggaaccttacagcccacagagagaagggctgtgccgatacggatcccagagagggggcgtcctgggaacgcatagctgacacaggggctcccccagggatggggttaggagagagagctcagccactctccagggagggggagctgcagtgaatgaaggggtcccagacaccttttgtaggaagtggccattgagctgggcttcaaggagtgaggacttcaaaggaaggatggcagtaygggcagagggacckgcctgagcacaggcctctgaggttgggggctcaggaagdtctgggcaaaacatgctcagaggcctgagtaatagagctaayggggtctgwgtgtggagcagttcccaggtgggtgyaaggggwcctctgygtctgccctcrgagggctggggctggggcttgggcactaagaagtaacttgagcctcycctggaccagtttgtgaagaccatggtgctggtggtgctgacgtttgccatctgctggctgccctaccacctctacttcatcctgggcagcttccaggaggacatctactgccacaagttcatccagcaagtctacctggcactcttctggttggccatgagctctaccatgtacaatcccatcatctactgctgtctcaaccacaggtgagcccccactccagccccaccctctgccctcagggccccactgcccagccccaggtgggctcccctgcacagctcaagcatccatcctcattcctgccggaacctgtggcccygtgcccccagcctacatgagaaagccgtcctcacactcagcccccagcacaataatccctctggcctgggcctagcttgagcccccttcctccccaaatcctcaccgtctcccaggctgtagctctcactgtctgtctgttcctgctggctcttctgggttctgtgtctggggcaagagaagagagaagggagggccagagagatgaaggggaggggagagtcacagagagggggtgggacagacagacgaaggaaagaaaagctaagtagcgggagggagggactgacttctgttmtagtattttcacaagcttcctactgagggctttcctggagccaagtgaatggcacccatccggcagtggaagcagtggatgggggctggggccagcacaggggtggggcaggctgctccctggaaagctcacagtgcatgccctgtcctccagggactttcagggcagstgggaagtgaccctgtcagagacagccaggaaggagggggccagaatctcactctcctggcatcatccagtttccctacgcctygtgattctgaggaaatgagtcccagagaggggcctgcacttgctctggggcacctggagaggtggggggtggtgagtcaggsaggaacccagccccaggagttctgcagagcaggcctttcagtggcaggaaaccctgaaggtggggcaaataaggggcggcaagaggtggacacagtctcacctcagtgagacaatgatgtgggcgaagttggccttggacctctttgttcatgttttttgtcacctccctggccaggtagccaggctactcataatgccattgggatctttgtggctcagacatttcacccgcctggggcaggccaaaaggaaataaggagctatgattttttgcaggaggccagaactctctatctcctgagagggaagtagataataggagagaagcaggtgtcacccccactctacagatggggaaactgagcttcagaaagtaagatgctcccaaattcatacaacaaacagtaaagccaggactccatgggtctccaaggcctgtcatcttatccccacaccacgcatttctcttttaaagacttgtgggattgaaaacctggagacagggactctgacatctgggaggggccaccagcccactgtgtctgtgggttgatcactctcctgctacccaagggagatacagtccctgggagtctaaacaacaccccaggctctacaagatcctgacatcacttctggatcattcccttctctgagcagccagcgttccctttctgccgtctgatttcttccactcaccgtgtgtgcttcctctgaactcccgttcagtgctgccatggggagagctgtttgttttcaagcaaatgcatcagaacttggtggctccgagtgtgggtttttcaatgtagtccccttgggaaaagcatccttgttctcccaagttgccaaagcctccattgtgttttagcaggttcttctttgactcctcccttagaagccagttaacaagtcagacaagaacatctgctggtttttttgtttgtttgttggttggttggtttttttagtaattatgctggggtcattttttgttcgtaataacagatgacctaaatcagcttagtcacccacttcattcactagacccagctccagaacactctggcagtttccaaaaatcaaactcacccacgaaggcatctctcaagagcccctgagccatgggaggctcttggagagagacagtgactttcctctggaagggagtcagtttcctgggggtgggggcagtcacatcacagctcctgagcccctaactccctggctcaaggtgcccctcgctcccccaggtttcgctctggattccggcttgccttccrctgctgcccatgggtcacacccaccaaggaagataagctcgagctgactcccacgacctccctctccacgagagtcaacaggtgtcacactaaggagactttgttcatggctggggacacagccccctccgaggctaccagtggggaggcggggcrtccycaggatggatcagggctatggtttgggtatggtttgcttgcccccaccaaaactcatgttgaaatttgatcccaatgtggcagtgttgggaggtaggggttagtgggaggtgtttgggtattggggatggatcccttatgaatagattaatgccttccagttgaagtgaatcatcactcttgtgggaatggactagttcccaaaataacaagttgttagaaagagtgtggtgtcctcagtttccctgtcttgcttcctctctcaccatgtgatctctttgcacacaacacttcccttccactttccaccatgacaagaagcagcctgaggccttcaccagatgcagctgcccaatcttggatattccagccaccagaatcatgagccaaataaacctcttttctttataaattacctagtctcaggtattccatgaaagcaacacaaatggactgagataggtgcctatygaaccctgaagccttgtgcctggctgcagaatgaggtgtagcaccctttgagaagtagccaatcgagaagaccacatctgaaagttcagctcatgccccatccttcagtataccaatacaaagacaacatggggccagaactccagaaaggatgctgactttaagaggactcagccacccatctcagagagcacttcagaggatccagtaagggtcagaaaagacagtgtaagctgatatttatctaatttaagagatgcaagctcaaatgccttcctggggcatacaagaatatgtataaaagaaaaactgcaaatgtgatgataaaaggcaactgacttccaccctcagtttgagctaatagggaatggtgggggccatggcaacctggagaggacaggcattcaaaggggacaagaactactcagctctggacaaacgttgccacatgataatgggagcccactgttgctagatcttctaaatctttcaagagaagctataaatccacatttgtatgtgagtcttccagatttgttgaatttgacccaaattttcataaactttgcataagttaaacaaaacgtatctgtgggcaatgcaaccatgaccctgattcgccatcaggctgtggatacaaaggaggaaacttcttatttcacaaagcccagtgactgagtcagctgagggcttctctgtctcagtatttaagaagtcagatacagcccacgtagatggtgattaagagccaaaaaaatcagctgtgtttcctcaggcaagtcactttgacctctgcccagtatcaaaactacttcacagggatgctgtgaggaacaatgggagtaatgcctataaactagcaggccagaccagattaagtgcccaatacatggtagccaggactttcttttttttttttttttttttttatgagacagggtctcacctcactctgagacccaggcaggagtgcagtggcaccatcatgattcagtgcagcctcaacctcctgggctcaggggatcctcctgcctcagtctcccctgtagctgggaccacagatacataccaccacacccagctagtttttaagttttttgtagatatggggtcttgctatgttgcccaggctggtcttgaactcctgggctcaaccattcctcctgcctgtctcctgaagtggtgggattacagatgtgagccaccacacctggctgttagccatgacttttaactatttcacacaaaagccacctacaaagcagcagcacagctcccactcccacttctgcagcaagaagctagagggcagaaagcagcaactgtcccaactcccagaaagctcccggtctggcccagcccatcccaggggcacacctcctgcttgccaactcagcctccacgccctggttcccctgcagaagagccatgtaacattgtcaatgcacactggaaggtgtaatgttatctgtgttctccaaaaaatcactgctccgtagacaccagcaccatgcccctaataaagggactctgatctcaccaaaccaggtggtctggcaatcggtctcgcaggaagccacttagagccgcagctgtggcttgggacatcacaaggtgcttgggtgcagagtgacatggaacccaccaaggctgggggagaatccaaaatggtagcctggggatagaccaggaatctcttgaggtgggggtgggaagggagagtaaaaggtcagacaagggttaatttcctagggatgaggtcaatctaagatccagaaggggtgggccgggagcgatggctcacgcctataatcccagcactatgggaggctgaggggggcagattgcttgagctcaggagttggagaccagccctggcaacacagtgagaccctgtctacagaaaataaaaataaaaaataaagaaaaaagatccgggagcgggagcgtgcagccagcctgggctgcttcaagatttcatctgtgtttgggtagagagggaggggaggggtggggcagagcacatttcatcctttgtcttggggttggcagagaggaagatgaagggcaggatccgggtggggatggcagagaggggaccagtgttgcagtcctctcactgaacccaagcagcctggaagccaagtggccttgttctataatcccagcactttaggaggccaaggcaggcagatcacttgaggtcaggagttggagaccagcctggccaacatggtgaaaccccttctctactaaaaatacaaaaattagctgggtgtggggatgcacgcctgtagtctcaactactcaggaggctgaggcaggagaatcacttgaactcgggaggcagaggttgcactgagctgagattgtgccactgcactccagcctgggtgacagggcaagactccatctcaaaaaaaaaaactcctccgcccagaaggccacaaaactccccagtgtttggtctttgccacatcccaagaaactgcacccccctctgcctgtccccccgtccccagccattaagcatcactcgggtctttgaattggtacaaagtttactaggtcatacgacacggctcacaaagcggtgggaaattccagtgatggcattgtttgttggttggttccttttatccaaatggagacaagacacatttccgcaggactgtccacctccccccacgagacaaacagaatgcaagactgtcacacgcggctaggactggttccacggacacacgattttgtggcattgacacaccacgatgcgatgccaggccacagtgggtgccaggaggggaggaagcagctaatgctatgcccacactcgccttcaggcagtgcccccgggagggaggcccggcagtgtctgctggtgataatacatttcacacagggagggggaaccccaaggatgggctttggaggcccagaaggcctgtcaggtggtgtgattttccatctccagccaataaataactctgttggatgaatgcatacattagaaatggatgccactacacttcacacgtgggggaccaggtcaaaatcaaaccatgcaaagtggcagggcaagtgaggagggatccgggtgagagatattatcaacagcacacgctctattctgtaccctacaatatataccattagttggattttgctttcctccccgcgccggcaggccctggcgccagcgtctcccagcgcaactcgctgggagggtagggggtcgccgcttgaagagagaagtgctggagaggcagtaggctggggatcccggactcttagctgcttgcctctgtgcgtaaccgcacgcccacggccgtgatgagggcggcccccttgccgctgccatcctcagacaggaggaaggacacgttacattttggtgacagttccttcaccgtctggtgcatgattctggagaagctaaaaaggacgagaaaacagaaggtagttggaggaagatgagagacgctgggcctacccgaaaacaccaaagcacagacagccccctgactggtgatgattcgacttaggattcttcgactttgtgatgggtttatcaggacataagcatcggaagtcaaagagactctgaacccaacaacaaggagggtgaacatggttgggaggcaggctgcttagaagcagctgtggccagttgagaatggctgggaggaaagtgggcccacggtcaatcccattgtcacagttttcagcagggaggcccaactgcgaatccaaacacaactgctctgtatggcttatgaaggctaggacatgaataacacacacacccacatcggagcttgaggctccagggggacctcaaaaccaaggaggatgttaggggctgacatggatcattaaggcaggtgcaagccagccaagcactggatcggttcaggaggctatgcaggaatgaatatcacccatctccagctgcaaccctgagacccccagcgccccaccatcaacagcctggcccccaaagacaggaatgccttccagtgaagatagtatctgaacaaaggctgaatctacatgcttgtaagttgggctcaaaatgaagggcagggccaggctgaagatgcttgtggtgaggggctctcaaaagtagtcactgtccttggttggggacctattaggtgggcggagtgcggtggctcatgccagcactttgggaggccaaggtgggaggatcacttgagccaaggagtttgaggacctactaggtgccccatattttacagctctaatttctagtcctgccagtggctgccacctcatgaggaagatgagattttgcagggattaagcaattgcacacagattctaagtgacggtgccagggttaaatccaagagtatgtggctccaaagcctagctctaaaccactcctgtgtgctgcctcagctgatggcaaggacagctattaagggggagagacagaggtgaggatggagcaagacagatggttccaccccaagccacggccatgaggtaagcaggtaatgtctacactgagtcgggtgaggttgcttataagtagggtgacactatggcctcatttatctgggatggtcctagtttgcctacagtcccagagtaataattattagcactcttgactggcaagagtaccctagtgtagacaataaataaataatatggtcaccctattcataaggtgagacatgcggtggatcacaatcacacagcaagtgcaatcacatgtccttctctggcatggggggtcagatgcctgaccagagggaggccactccctacccctccctgccatgaagcccagggcccaaaccgctcccgcccttccaagtcttagcaaactgattcagcagatgaacaagagagtggctatcctcctttcctattttattttttgaaatagggtctcactctgttgcccaggctggagtacagtggcgtgatctgggctcactgcaacctccacctcccaggctcaagcaatcctcttccctcagcctcccgagtagctgggactacaggcattcaccaccatccctggctaattttcaaaatttttttgtacagacaaggtctcactatgttgcctaggctggtctcaaactcctggactgaagcagtcctcccacctaggcctcccaaagtgctggattacaggtgtgaaccactgcacccagctcctcccctttcttaatatcctctccccacttacccaacagagcctctggcctggctacagctcaccaggcttatgagtgagcccacgcccaccctcacctcctctcccactgcctagcccccacctaagggggaccaggaggagtggggtgagggtcacatcatgccactggtgtgagctggccaagtgaagccacttctctgtctccctaaggatcccagtcaaaccctacaaactgttcattaccttgtcctagacaatccccagctcctgaacgcacagccttcagcctggctgggctcccgcagggcatttccccagcgtaaaccacaccctgataccccctaacccaaagggatcccagcaagctctgcgcatcccaactggaaggcccactcactgtggatgaagcttgtagagtgtcccgtccactcccacagtcacattcagacggtccagtcctctgttctcgcggatcttatccacaaccgcagccatgcctgcgccacacagctgtgcggccctcctggacaccaccccgcacactgtcttgacgaggatactgtcatcgcaggtgctattcagacctagctgctggaggatagcccggacctggagcagtgctaatcggtcactgtgggggacaagagccagagggctggatgaagcaggacccacaagagcagcctggagaccacgtccaaaggacgccccccacccccaatcactgtactcatccacagacagagtcaagggcaagtgttacatgttaaactgtggagaatttggcaaatctagcaaaataaaaattggaaaatctaaaccattcactatctcaacatctaggaaaatgctattaacattttaatatatttccttccagtttatttttcctagctggtatgcttctcatgatatgcaaaatgggattatccttgatatgtgattttctttctctttcctgtttcatgcattgagcaatttcccacagccttatctgagaacaggattggaaacagctgctg

SEQ ID NO: 97833 - DNA, 58181 bp, Homo sapiens
ctgggcgtggtagtgcgcacctgtaattccagctactcaggaggctgaggcagaacagcttgaaccctggctgggcgcggtggctcaagcctgtaatcccagcactttgggaggccaaggtgggcagatcacgaggtcaggagatcgagaccatcctggctaacacggtgaaaccccatctctactaaaaatacaaaaaattagccgggcgtggtggcgggtgcctgtagacccagctactcgggaggctgagggaggagaatggcatgaacccgggaggcggagcttgcagtgagccgagattgcggcactgcactccagcctgggcgacagagcgagactccgtctcaaaaaaaaaaaaaaaaaaaaggaaaatagcttgaacccggaaggtggaggttgcagtgagctgagatcgtaccattgcactccagcctgggcgaaaaagtgggacaccacctcaaaaaaaaaaaaaaaagaaagggagtctcctttccttggaggcgtcagggagcactctgctccaccagcttcttgtgggaggctggatattatccatgcctgcccgcagtcatccggagacctaaacccctccctgtggtgctgtgcttccatggtcacgctccttgcccactttcatgttcctcccgtactcctggttcctgtttgaagttcatagatagcggtagaagaaatagtgaaagtcttaaagtctttgatctttcttataagtgcatagaagaaaacgctgacatatgctgccttctctctctgcttcagctacctaaaagggaagggccccctgtcctatgatcacgtgacttgcttcaccttatcaatcacttagaagattcaccctccttaccctgtccccttgccttatatccaataacagcgcagccaggcattcggggccactaccctgtctccacgtctaggtggtagtggtcccccgggcccagctgtctttttttctatctctttctcctgtgtctttatttctacgatctctcatctccgcacacgaggagaaaaacccacaggccctgtaaggcttgaccctaccaatttttagttttatttaattttaattacttcaaatttacctttaacgacatgtggctaatggctactgttgggaacagcacagacctacagtgccactgagaaggtaagtctcactagcagaacagttggctacatgcaaatagatggtggtgtttaggtttctctccacatttgctgaacactccaggaggtcaacactgtgttaaatgcattgtttcatctttttctccctcaataactttatagagttaaattagaacttcccaactttttagggtaaaaaatttcagggaaactgagtcatagggtttttctgtttgtttggctcattggttgtggttttttacaacttgctaatatgtaacaaggccaggatgagagcccagatccaactggttccaaaacctgcctgtttttcagccatactgaatggcaaaatggcaacctgtggttcccacaaggttcttaaaaaatttctgaatttgttgctaacattttaagccagggaatttgacagaggaatcaagattttcagcttcttttttaagatgtgaaagctgggccgggtacagtggctcacacctgtaatcccaacactgaggcaggagaatcacttgaggccaagagtttgagactcatctaggcaacatagcaagactcctatctgtacaaaaaaaaaaatttttttaattagccaggcatggtggcatgtgcctaaagtcccagctgctctaaaggctgaggcaggaagaccacttaagcccaggaggtcaaggtcgcagtgagccatgatctcatccctgcactccaggctgggcaagagtgagaccctgcctcaaaataagtgtaagatgtggcaatactgggccatttgttgatatggccatactcagctggagacggagggcagtgcaaaggctatccactatgacgcccatccattggtcctccatgggcatttgagtttgtgatccccgtgaacattcctgaaggcaaggactgtggcctcaaaccattactgttccccagtaggggccacacagaaggcacaaaacttattttattattaatgaataattactcatatgatactcaattatttaaagactctttccctgggccagggcactggccagggatatccagccagccactcacacctactgcacctcatggtaggaaatatctcctgcatcctcacaggcctgtgatgagggtcaaatgagacaaagatgggaaagtgcttttaaacaaaacctcaaatgtttgacttcattattctccattctgcatcaggtcccctcatttccaaaacctcttaacaaaacataaactgaacacagaaggggctggccaaagagggcagggtacgctgatcccccgctctgtgcctagcactacagtttcacatccgttatttcatttagtccttatgacagtattattcttattcccatttcacagcccagaaactgtggctcaaagagggtaagtgactggcccaagaacacgctgccaggcagcctgatgccaaagtgggttcccgaaacctctatgctagaaaagtaaaaacgcacacgcctccttcctcgcaagtattaacgtaaattaaaatggagaccaaccatgaagaattcctgagcagacaaaaccaatcaggtatcctaagtgacctaaatcttgcttaaactgcaaacataagcaaaatttaacttgggtcatatctgataaatgcttatgttagagagaaataaaacttaagaccagccaaaagcagtcaattaacagaccttaaaaaaaaaaggcaattttgtaactgcaaaccaatcaaataatttctttattttgcttccacattttcccaataaatacttgcctctgacgttttgtcattgcaacactaaagctctttcagtctgatgttctccaattcatgaattgtttcttattcaaagttctcaagatgtgtctcacatttttcctttacacaagaaacacaagcactaacagtgtacgctgactgagtatggcatggaatcgctttagcgaacacccgactaagaggtgtttgggattctttggctccgctgaggggtttgaagccacagggaaggctaggctcccgcacaacgcctcctcgaggggcgtggggacccggccgtgcagcgcggggacagggggccgggggcgcacctggatgtcctcgatcatatggggcctgaacagctcgcggctcagcagggcgtcccagagctggtccacctgcagctcttccaccagccgcagccggcaccgccgcaggagccgccgatccgcttcgtccatggcgagtagccaactaagactccaggccgcctcagtccgcttccgggcctcggccgcccgccccagtccccaggacccgcccccgccccagggcctgcccccgcgtcacggccccgggtcagtcttcgctccccaccgcctccggacgcatctccaaggcctcgccccgcccccaggagtcgctcttgcgtcaccgccccgccctcaggacgcacctctgcgcctcgccccgcccccagggccaagcctcccatcaccgcgccgccccagaacacgctccgcgtcaccgccccgccccagaacccgccccacgtcaccgccccgctccagaatccaccactgcgtccccgccccagaacccgccccgtatccccgcactgacctcacgtcaccgccccgcccccgcgttaccgtcccgcccgcaggacgcatctccaacgcctcgccccgccccaaggattcgctcttgcgtcaccgcctcgccttcaggacgcctccgcgcctcgccctgtccccagggtcaattctggggtcaccgcctgtccccagaacctgccaccgcgtcaccgcccactccccgggacgcatctagaaggtctcgccccgcccccaggattcgctctgcgtcatcgccccgccctcaggacgcacctcagcgcctcgcgccgaccccagaatccattccgcgccaccgccccgcccccaggattcaacccacgcccccaccccgcccccaaggtcaatcttgcgccaccgccccgcccccaagggctagcctcgtgccaccgccccgcctccaagagccaatcccctcccctcgctccaccctcagaatcgtccttgcgtcaccgctcagcctcagactccagttcgcactctcgccccgcccccaaagtcaatcctcacccccaggatccatccttctgtcaccgccccgccccaaggcggcacctccgcgactcgccccgcccccagggccccgccccgcccccgcatcacctccccactccgggcgcaggtgcccttttgcaattctggcaccagttcctggtccaccgcgggcccttcgccagaattcactatagccccgcttttacagagatccggagggagtcgtcacacttccagcaagagggaaaccatgagtggagccgtgatctgtcccgcccattcaacctcctccggggcatggcttccccttagccccctcctccaccccaagtaaaaccataagctcccctcaccgcccttgtgcccagatcgcagttgactgttccaaactcgagtgtctgatccaaccaagcccaccttacacagtcttccattccctcttccctccctcccaccctaacacctcccacacagaaaaaaaaaaaaacggcagaaatctagtcctgtaaactcccatcgttctgaacggttcattttcacatttcaaaaataatcgtttctgtttactgagcatttgctaagtcccaggcatcgtgctagccacttttcatgcttatttcacttatccttaactacaatcctgccaggaaagtattcccaccccccgccggttttacagatgtagaccctagggttcagggaaacgaatgtttaaggtcacttgggtactaagtggccgaggcaggcaggattgaaacccgaacctgactctgtaagccacactcttaagaatccaccttagaatataatctcttgagcaccaaaacctcagccccattcgttcacttctacgaatatttattgagcctgtagtcaaacactaagaacatgaaggtgaacaaaacaaaatccctgcttttagagtttacattccagtggaaggatcaggtgataaactatatcaataaataagacatactatgttagatagtgataaatgcaaagagaaaaaaataaaaacaagacagggagatatgaaagctctttatatccgcaagggatctatctcattggctcaaagaaagtttccttcacttacctgtgccttatccctctctccacccccaccgccctttccccgtgcttaaggcacagactggtacattcttgggtggagctcggttttcggtaaacgggattaaaagtcctggattctctcaaaaaaaaaaaagataagtaaacaaaaataaaaggaatgctggattctaggccttgggcaaatctctgcccctctctggacctcggtctccctatcaatattgcaggagttggagagttaaagaatccctaaggtcacttccaatctgacgctctaaggttctacgaatagggttaaagagaatagggaccagagagtgcgtccccatcctagcaactgttgctagacgagggccatctcccggtaggagcggaaacaccttcctggatcgaggaggtccttctggtatcccatcatgcatagcgacttcgcctcgctaggaggcacgttttggcctctttggtcacgatcagccttttggctgcaaccaaagagcgcgcctcgtttctatagcaaccaccccaggtccacgcctagacggcgagtggcaagggtcaaaatagattcgcccagtagacgccctcgacctgttcggtcctcgccttcagtgcgatagacctttaagcgtcacgtgactcccctcgggcttgtcccctcctctttcccctccccaggcccaggcgagcgctggtgtggacgggaagctcccggcccggcgaactaactggagcacggagctgcagccggttgggccggtgtactttcccggtaactccttcccggcgtgacgcgcggaaccgcggacgcggcggggccaggccgactcagggatttcccctcagttccttctcgtttccagtcactgytggccccggggggagccgggagccaacagggccgggccctgggctctcggagggcggcgggggagggggctgtctcytgcagggttgcgacctccggcrggagcgcgaggcggggcttagacctggagcttgtctctgggagcttcttcctggtcctggatatgctgcccagagagctggcagcctacctgttgggcaggtgtttgctgctccgaggtcggcgccgtctatctcgcatgtcagctaaagaacttcccagaccaccgccacttcggccctctagctggaaggaactgacatggttaaataaggcagcgatcgtactgcatggtagaaataatagcactaacgaccatttgttgactgttgactctgggctcagtaaaccctttacatgcatttagtccccacatgatgatccttcaaggtggtagtattcattcccattttatgaataaggacgctgatgcttagtaagtttaaataatttgcccaaggtaataaagtagtggagaatagatcctagtcttcaacccatatgcttaaccagtagctacattgccttcacgtgttttctaggatataataggttgccttaacaaagaagaaactggtttgttttaggattttattcagcacgtatgcaattttaaacgttggtcatcagattagtcaattttgtgaggactcccaggcggcattaaacttgcacttacggaaatccaccactgttatagctttgcccttcttcagtaaggtgtcacagaagacacttgaaccttaaaactgtattaacttgtgagaaatcaagataaatgtgttccttgaaaaaaaacattgtagggtataacagcaatcataattgtggagtataaatatctgcagttccagcactaccctgttcattaaccagccaggattatttccaaaattcacaatgaattaagtcactgtactcaccagagatggagcttgaaacttttaaagaccacgcctgctatttggtctttgccgttaattcttcttcacatgtaaaactaaattttttcttgccgctttttctcatctgaggtttccattaataatgaccatattggccggcgcgatggctcacgcctgtaatcccaacactttgggaggccgaggcgggtggatcacctgaggtcaggagttcaaaaccagcctggccaacatggtgaaaccctgtctctactaaaaatacaaaaaattagctaggcagggtggcgcatgcctgtaatcccagctactggggaggctgagacaggagacttgcttgaacctgggagggggaggttgcagtgagctgagakcccatcattgcactccagcctgggcaacgagtgaaactccgtctcaaaamaaaaaacaaaaaaacaccatattactaatgattaaagagcagcttctcattttcttgtttgaatggtgtggtgagaaagaatagaattgaggcatactgcgtcttaactacacagttttttgagagtgtttcacgtccatgtttgtacttatttaatgcccaagaatgccacaactatctcattttgtasttttgtacatggtaaatcttacagtttcatgagtttgtttaacatgtactcaatgaagtattcttaaaccatttattttatttattcttatcagaataaatgaaatcatgtatttgagaggtagtcgtcctgattatcctatttaggttttctctcatttatgtattatttctgcatcccattcattttcattcatttctaaagcttttctagtcaaagtgttctggagagttgctattcttattactcatcttttcatctgtaatagttctcatttgtgatattcaaaagcagtagcgagatttttattttaagatacagttcaacagcttgacacttttcctgcaaaataccttttgttggttttgtttttcatctatatatcttatacctttacctaaaaagcaagactgtccaggtttctgccactgaaactcattgcctcttcaatcatttcagctctggaaaggaagagaaatggaagtgagaaagttgagcatttcctggcagttcttgatagttctggttctgatcctgcaaattctgtctgcgttggattttgacccatacagagtcctaggggtcagccgaacagccagtcaggctgatattaaaaaggcttataagaagctcgcccgggaatggtaggtgaaacaaagaaatagaggtttaacataagctaaacagtcttagcagggatgaagtctaaattatgactagcttttatttgtctctgtttctatgttcaatatatatatctgtctaaaatattttacgcaggagagctaatgttcatgttctataattgttagcgataagatccaaagcctatgtttactctgaaactcccttttaggaatactttggcttaaagaattgccttagatactgttagcatatttaatgttaaagtaacaagttttaattttaaaaaaatgtatatatagtcaataatggatatgctacccttcccatgatacattattcataaagtaactttatgagtgtaattgctaaacaggaacactatacaaccctattctctaaattattaatttctacactttgaaaaaaagttaagagtaatagccttttgcctccaaaaaaaaaaattcagaaaccaaggatagttgtctcttgatatccatgaggtcttggttccaggatccccagaaataccaaagtcattggatgctcaagtccctatataaaatagcatagtatttgcatataatctatgcacgtcctctcatatactttaaatcatctctagcttacttataatacctaatacaatgtaactgctgtgcaaatggttgttatactgttattgtttaaggaataatgacaagaaaaaagtctgtacatgttcagtacaatgcaattttttaaaaatatttttgaatatttcaaaatagaaaatattatattttggttggtggaatccatggatgtgaaaccaacagatatagagggctgactatatattactcaaaaaaaaaaattggcctggcatggtggctcatgtttgtaatcccagcactttgggaggctgaggtgggaggatcgtttgagcccaggagtttgagaccagcctgggcaacatagtgacacctcatcactatggaaaaaaaaaaaaagcccagaagtttgaggctgaagtgagctataatcacaccactgcactccagcctgggcaacagagtgagacccgtctcaaaaaaaaaaacttacagaaaattgtaattttgcctgtagttatcaggatagcaattagcagggtagcaataaatctaaaactttggacaaatatcatcagtttcttccaccaatgccttggccatgccaaagaagcagaagtgttggattatatagatggagggggagcagcagaaggaggaaaggacagaggtgactccaagctggctgtaccaaccatgaggaatggaagaaagtttgggacaggtaccatcactgagcacctactacatgctaatctcctggttctatrctttttatctcatttaaaccttataatgagcctatgaaggaggatatcagtatctcttttttttttgagacggagtctcgctctgtcacgcaggctggaatgcagtggcacaatcttggctcactgtaacctccgcttcctgggttcaagrgattctcctgactcagyctcccaagtagctgggactacaggcgtgcaccaccacacccagctaattgttgtatttctagtagagacggggttttgccatattggccaggctggtctcagactcctgacctcaagtgatccgtccacctcggcctcccaaagtgctgggattacagacgtgagctaccatgctcggccagtgtctctgttttatagatgagaagatggaggcttagagttggtaaatctgtggtacctctgggttccgtagtttgaccctctgcatcagtagtccattgctttattgttttttaatcatttacacatctaggcatgagtaagggtgagtgggctaatggttggctggggaggagctgaatgcgagtaggaagttatccagaagcaaaactgccacattgaggtgatgcatgrtacagactgcatgcgtgactgcgcctgacactgttctgcttcagtgaacaggtatattttagcattaaactggttgaaataaaggtaaagatcattgaaaatatatttttaaaataaatgttttagaccatattccatgagaaatccagaattggatgccaaagaagcaatctctaattatacatgacctccttccagggactctttataccaaggttatgttctacatcatttcagactcttgcctctttatgtttaaagcaggatatataaatctgcagcaaattcataaggtaacaacattcttttggacaaggcatagcctttgacaatattttaagaacacaagtgacagcttgagtatgtgggacctattaaaatgtatagctttgacttttctgtcttccagagctgaaaagggtgttatgatattaattaaatgagtcatattcttctcttttttaattagattctctctaggaataattcatcaccatagaagtgtattgagtgtgtcatccagtaaaagtctaaaattttactttacgtttttaattttgctctactattattttctgcggttttggctatgacaatgctttgtcacttggaatagtttaagttttgcttactaatggcttgatatacactgaaaatagcagtgtttcccagtttgacttttcagaatgagctatagcagggggaagtggttacttgttgagttggatctggagccttcctctgatacattttactaagtgtttcttagactgcttaagaattttactttgcttggtgaaaccatttgactttactttttcccttaggaaaactatgtttytctcccaataattaagttttatcgtaggtactttttgtttgttatccacattagcaaaagaaataactcctcccacccaaagaatggcagattggtgtgacgtggttatgcaataaactaacagtaaattattttgtgtaattctttgctgtattaccttctctatctttgtttttattcctttaagaggtaactagagagccagtagatactacacgcaatatttcctctactttgaattttaaagattgtgtattatattgcagttcctgaaataatttcatattaactgaaaatagcattggacaatactttcctatggctgaatttttttttttatgttttcaaccttgtggtgtcttcccacaattaggaaagtattccgtatgaatacagctgaaagtgctgtggtttcctccctgttcttcagccttgccctcctctgtttcaggatctgtgttttctaacctagctgccctcaagactctctctttggttcattctcctaaaaagccccttcctacccttcttctacagagttctatatgttaaatcttcatttgtatgattgcataatttttgatccactcagtcgtcagcctgatggtttggttgatgggttggttttgttggtatttttgtktttttttttgtcatccagaaatgctttggagtctccatctcgtttccttaagtcatgctgttttcattatgactagctgagatttttttcccccactaatactcatagcaaggattaaatggttaaggaaggaatgatttttaaactcagcagtcaacaatttggagtttccttatttgtagagaaatcagaatatgtggtataattcattcaaacacattcctgctagaataaatccattaagttgtagatttttttttattccaatgtgcttggtgtatcgttaatagtcatttgcttcccagtgaattgtttttctttccagaacctatgtcagaggaaatttactagaagttaccaaaagtgattatgtaaagaatactgtcatacaaagtctcttaaagtgaacattgaaaaatcagtccatataaaacactgatttaggtcttaggggctttcaaggaattaaacctagcccttactatcgagaactttaaaatctccaaagctggccgggtgtggtagctcacacctgtaatcccagcactttgggaggccaaggcaggaggatggcatgagtccaggaatttgagaccagcctggacaacatggcaaaaaatgttaaacatgtggcattgaggccgggcgtggtggctcacgcctgtattcccaacacttttggaggccgagacaggtggatcatttgaggtcaggagtttgagaccagcccagccaacatggtgaaaccccatctctactaaaaatacaaaaattagccgggtgatagtggcgcaggcctgtaatcccagctactcgggaggctgaggcaagagaatcgcttgagcctgggaggcagaggttgcagtgcgccaagattgtaccactgcattccagtctgggcaacagagtgagaccctgtctcaaaaaaaacaaaaaaacaaaaaaaacagtggccttgaaatctttatccaggtaaaaagcaatcgtaataataacgaaaaatgttctaatttgaaagtcaggcacaagtgcagtttgaaacctgattgttactaaatgaatttagtctatcctaaaagctatttctcatgtctacctgtgttatcagaagaaacaacagcattctagcatcctgatatcattctagcattgggatgaaacgttgccatcctaggagaagacatgggttcttatggataaacgacttagccttcagccagctttagcagtgtttgggagcagtgtacagacatgcaccatttcccaccttcctctgtgaaatgctgcagtattatatggtgctttgaaaacatgccctgctggagtgctttgggaaaaaatagcctgtttcaaagtttcattwattatagtcatgtaaaacaactgattgcctctatcatttattttaagaaactttcctaacaaaatagccctccgtctgcctctgtagtgaactctgtggacaaggacattaaatgactgtgcattaaaagttacatcctttctcaccgcctgcctgtttgtgtttcaggcatcctgacaaaaacaaagatcctggagcagaagacaagttcattcaaatcagtaaggcttacgaggtatygtgtccagctttgtgatgcatccattagctcttacaaaatatgccttaggaggtgatgagttttgtaaagttgtcagaaaggtcatgttccccatgcccttgatgcagtttctagattataatagagagaacaggctggatgcggtggctcatgcctgtaatcccagcactttgggaggccgaggtgggtggatcacgaggtcaggagttcgagaccagcctgaccaacatgctgaaaccctgtctttactaaaaatacaaaaaaaattmgccgggcgtggtggcacgtgcctgtaatcccagctactcaggaggcttaggcaggagaattgcttgaacccgggagtgggaggttgcagtgagcagagatcgaggcctgggtaacagagggagaccgtctcaaaaaataaaataaaataaaaaataatagaacatatttggccacatccagtatattggaacaagtgcctgaacacttcagctyttggaaaaactggcctattttaaaggctttaactagaattgtagaattaccctgagtatgtctgtatgtgtcactattgccttcttagaaatatgcattaaagaatcacataccaaatcgcctatatttattaaagtggcacgaggtaacaaatacatttaaacacaagattttcagtaattttccagtatgtcagctcaagtagattggtctggaatatgcatcaaagagaattcagtggctttctgatttgtatagggaatgcccttcagcagacagtgcttagctcatagaataacacgtcatcattctaaaacagattcctgaattttagacttcaaagttattttgtaaaacaaagtaaattaacagacaaggcactagactatagctatttggtgttcatagcttttcttatcttggtttgaattggtccaactcaccaggtatgaccaggtcaattttcttgtcattgagccctggtgatcaacattatgttattttatttgttttgctgaagtgtttaatgttgtggtagtttgaaatctttaatgccaagatgagcmtgagtacctaaactgaaatattttagtcttgaatgttctttaatgtttctctagtgaaagaagagtttctcattcttttgaatgactgcatttagaatatctaatcggctggacccagtggctgctcacgccctgtaatcccagcacttggggaggctgaggcatgcagatcgcttaagctgaggaattcaggaccagcctagacaacatggtgaaaaatacaaaaattagccaggcatggtggcatgtgctgatggtcctagctactcaggaggctgagatggaaggttgaccctgagagatggaggctgcagtgagctgtgatcacgccacttcactccagcctgggtgacagagtgagactctatctcgaaaagaaaaagaatatctaattatgtcataatcttttttcttttttcttaagagacagtctgtctctgtcacccaggctggagtacagtgatgcgatcacagctcactgcagccttcaactactgggctcaagcaatctcccactcacctcaccctcccaagtagctaggactataggcacgcaccaccatgcctggccgatttttttttttctttttgtagcaaagtcatgctatgtggtccaggctggtcttgaactcctggcttcaagggatcctccaaaccttggcctcacataatcgtgtcataatttttacatttcttttcttttcttttcttttcttttttttttttttttttgagacggagtttcgctcttgttgcctaggctggagtgcagtggcaccatctcggctcacctcaacctccgcctcctgggttcaagcaattctcctacctcagcctcccgagtagctgggattacaggcatgcgccaccactcccggctgatttgattttttgtatttttagtagagacggggtttctccatgttggtcaggctgatctcaaactcccgacctcaagtgatccacccgcctcagcctcccaaagtgctgggattacaggtgtgagccaccacgactggctgcatttattttcttcctatgtctttcaagctgcttacaaaaaagtcttttggatgaaccttttgttgttgtttagatttttttcttcctttatagattctttcaaatgaagaaaagagatcaaattatgatcaatatggagacgctggagagaaccagggctaccagaagcagcaacagcagcgagagtatcgcttccgccatttccatgaaaatttttattttgatgaatccttttttcacttcccttttaattctgaacggcgggactcaattgacgaaaagtatttattgcacttttcacattatgtgaatgaagtggttccagatagcttcaagaaaccctacctcatcaagatcacctccgattggtgctttagctgcattcatatcgagcctgtgtggaaagaagtcattcaagaactggaagaattgggtaagataattttattcactgaaagatatttatatagatgactttttttttttcaagatggagtcttgctctgttgcccaggctggagtacagtggtgtgatctcggctcactgcaacctccacctcccgggttcaagtgattctcctgcctcaacctcccgagtagttgggattacaggcacccaccatcacgcccagctaatttttgtatttttagtagagacagggtttcaccacgttggccaggccggcttcaaactcctgacctcaagtgatctgcctgcctcggcctcccacagtactgggatgtcaggtgggagccaccatgcctggccccaaagcaggttttttaaattgcctattctataaaccctttttgaaaatctttcttaaatgtattagtctgctttcttcaactctgtgactccgaagcaccaattttttacttattgtgagctgagccttgaagggggttggaagtcagctaaggaatcttcagtcacacactggtaaaaactagtgtgtaaaagcatccagtgtttaaagagaagtgtgctgtggaagagggcccagaactagcaccatccctgaccttgagttcaccatttggttgaagagaaaatatatacacagagaattaacactgacctcacatttgcaagcacagaataatgttttactgaaggagtagacaaagatgacaagaaattccttctgtattttctaactccttgcccatgaaacagataccttcgtttgaaacttttttctcagtcaactttcatgttccaattactgtattagacactaaaggatatataataataataatttttattgaacatttcagttcccttgcattgtggtaaatgctttctgtgcattatttttgtccccagagcaactcaatgaaggagagactattattatctctattttacaggtgagggaactaaggcattgaaggttaaggaactaattcattattacactacccataagcatcagtattgggttggacccaggagtctgaccgtcttaaacactgcgcgcgtactgcttcagaaataagtaaatcatggtccttgtgcccaggaaactcacataagaaacatacctcaatcatctcagcacatttagtgcttgctggaaggtgcaggcagagctaccagcgtggcccagaagttgagcatcttgaaatcaaatatcattttagggaaactcaatttggatgatcaggcagtgattacctgggtttggcaatttattcaccatgacttcctgtttaaaaagagagactgctgggcacggtggctcatacctgtaatcccaacactttgggaggctgaggcaggtggatcacaaggtyaggagttcgagaccagcctggccaacatggtgaaaccccatctgtactaaaaatacaaaaatcagccaggagtggtggcgggtgcctgtagtcccagctactccggaggctgaggcaggagaatcgcttgaacccrggaagcagaggttgcagtgagccaagatcgtgccactgcactccagcctgggtgacagagcragactctgtctcaagaaaaaaaaataaaaagaaaaaaaggaagactaattcctggccaggcgcagtggctcatgcctgtaaccccagcactttgggaggccaaggcaggcggatcacctgaggtcagtagttcgagaccagcctggccaaaatgctgaaactctgtctctagtaaaaatacaaaattagctggacatagtggcacgtgcctgtaatcccagctactcgggaggctgaggcaggagaatcacttgaaccctggagttggaggttgctgtgagctgagatcacaccattgcattccagcctgggcagtgagcgaaactctgtctcagaaaaacaaaaaaaagactaattcctatcttttaaggatttctaagtatataagagtctcatactgtctagaaaaaaagtcatcctaaatactggcaaaaataacgcatttttctgctttagctctgtgttcttgattttgtttcatttcacgttattttgcatcttgtggttagtgtaccagcatgtttgtatttagccacattcragtggcgtgttcttccagttggctctgtgccatcccctaaggcctattcaaaggtggagagaaaattaatgtgtatgtgcagctgaggggggaaaaaacttccctaaagggtgtgatatgtgtttaggattgcttagtgagagctgtttggcatctcaaattatgggtatgacagatgtttactartgcacggaagaccctctcacagcctcagtatagtatttttaattcccgagggtgtgcagattagccagaagcatcaatttatataaacatcaaataatgtttctgaaataagtcacatatgcctttttattttattttttttttttatttttttgagacggaggctctctctgtcgcccaggctggagtgcagtggtgcgatctctgctcactgcaagctccgcctcccaggttcacaccgttctcctgcctcagcctccctagtagctgggactacaggcacccatcaccacgcccggctaatttttttgtatttttagtagagacggggtttcaccgtgttagccaggatggtctcgatctcctgacctcgtgatccgcccacctcggtctcccaaagtgctgggattacaggtgtgagccaccacgcctggcttttttttttctttttcttttaagagacatcattctgtcacccaggccagggtgtaatagcataatcatggctcactgcaacctcaacctcgtgggcttaagcagtcctgctgcctcagcctcccaagtagctgagattagaggtgcctgccattgtacctgtctttaaatatcttttcgggaagaaaaataccacaaattggccaggcatggtggctcacgcctgtaatcacagcacttcgataggctgaggtgcacagatcacttgaggtcaggagtttgagaccagcctggccaacatggtgaaatcccgtctgtgctgaaaatacaaaaattagccaggcgtggtggtgcgtgcctgtaatctcagctgctcaggaggctgaggcaggagaattgcttgaacccaggagtggaggttgcagtgagccaagatcgagtcaccgcactccagcctgggcaacagagcaaaactctgtctcaaaaaataaaataaagtggccgggcatgttggctcatgcctgtaatcccagcactttgggaggccaaggcgggtggatcacctgaggttaggagttcgagaccagcctgaccaatgtggtaaaatcctgtctctactaaaaatacaaaaattaactgggcatggtggtgtgtgcctgtaatcccagctactggggaggctgagacaggagaattgcttgcaccagggaggcagaggttgcagtgagctgagattgcgccactgcagtctggcctgggcgacagaatgagactccgtctcaaaaaaaaaagaaaagaaaaaaaccacaaatgtaaaacaccaaatatttatcattctttattctatttctccaaccacagcctcccacgtagctaggactagaggcacacacgggcatgcccagctaacttttttttagactcatcacgttaatcgtcacagatcccagagccagacttcctgggttcagatcccatcaccgtcacttgccaactctgtcaccctgggacttcacctctccatgtctcagttttcttataggtaaaatagagatggtgaagattggtcttaaactccaggagatacgaaagagatggtgaaggctggtcttaaactcctggtcacaagcgatcctccygcctcagcctcccaaagcactggtattacaggcatgaatcaccgtgcccagccaacttttcagtttctaattcaggtttctgtgtgcgctcggtctggtataacgtatactgaatggcacagttactagaaaggcatatttcccaggatcagttcataaattggcattcaatctatatagcaatccctggtaaggtcatttagggtgagtcagtcactgagaaattgatccctctaatgttcagaacctggggcagaactggtcattggaggcagtaagaagtccaggctttgtggtcagctagaactagattcagatcctggttccactgcacacaaaccatgatgcctcaccctcccccagcttcagtttccttagccataaagatagcaatacttaccttgcagaatgattgtgagtatgaaaagtataatgtatataaagctctaggtgtgctaaagaaggcactcaagaagtgataatccctcccttgggcctttgtcttgtagccagttgacctccctaggtgatgtctcttctgtctttacgaatgaccaaatctcccaatgtatgtgcctgctttattctttttctttcttctgctcatataattctctgtatgcttccatttattgacattgttccatagttatttttaatgactgcagtgtgatatagtatactgtacttggctctagagaagagccaagaatccaatttggattcttgttctgcaattctgtcagctctgcaacctggaaaaagtcactttacctctctgaacctctctctgtatctgtaaaatgagggaagcggactatacaattcctaaggctcctcctttcctgcccttgagagactgcaacagtcaaagtcaggtagcctacagagagcttggtttagtctgctcagcagttttaaaacattaagtttgggatccctgccatttactcagcaatttcattttaggaatttactaattagaaaataagcgcacaagagcacaaagatgtatgcacaaagatgtatgtacaaagatgtacaaggatgcccgtcagcattccttataatgttaagaattaggctaaaagcaactttaatattgtgctttataataagaaatatatgtatattttggtgtttgttcccagttcctggcacagatctcctaacacccttgagattgcctgatcaataggggtgctaagataatcttttgctctcgtatttgatctttgactctgattcctgagatggagcacctaatccttggaatttcctgcaggatgggagcatcttttgttctattgaggcgactcttagtgggcccctgtgtgggagctggtcaccagaaaaaacaaaccatgattagaagtttgaaagtttcaccctcatcctccagaaagaggagaggggctggagattgagttaataattgatcacgcctgtatgatgaagccttcataaaaatccctgaactctggctcggtttcctggggggtgggctcagtctrcaccacctcccctcagccaagcctacagtagagggcccaggcatcctcccgtatgggagaggcgtttgagtaaggagcctcacctggggtgtcctagcctcacatttactggcaaaaaaaatgaacatatatatatatttaatccctgaactactgggtttgagagttcccaggtggctgaacacatggaggtgcctggagggtggtgagccctgggagggcaggatgctcccacccttccatataccttaccatgtacctctcttccttctggctgatcatctgtctcctttgtaatatcccttatacctaatgagtaaccataaggaatgttcccctgagttctgtgagcagctcgagcaagttagttgaacccaaggagggtcatgggaccctttgatttatagccagttggttggaagtacaggacacaacctgggacttctggcgtctgaagtgggagcagtcttacgggactgaacccttcacctgcaggacctgatgcttcctctgggtagatagtgtcagaactgagttgatacccaattggtgtctgctggaggatttatggggaacccccacccccacagcrtgtggtgtcagaagggaagcattgagttgggcatagtggcacgtgcctggaatcccagctactcaggtggctgaggcaggaagatcgcttgagcccaggagtttgagaccagcctgggcaacatagtgagaccccatctcttacacaatgagtgtcagggaaagcattgtgttgagtgtgagtaggaaaaacaggttggtttttcctctctcacaacttcagtgtgcaacaataaatgaattaaatagattgatggcccagtttcagtgagctcctactatgtgccaggctctggtctggtgttggggatacatcagtggactacaaagggatccctatcttcatgaggcttacattctagaaggggagacagacaataaacaattgacagaaggaaagtgggtggtaccttagaagatggtaaacgctgtggaaaaagttaaagtgagcaggttgtgtgtggaccctgagtgtggggagtactgttttaaatatggtgccaaggtaggccgcattcaggacttgaagttggtaaagaagtcagctacgcagaagtcacggagatgcacacttcaggctgaaggaacagccaaggccctgaggcaggagcatccrctgtcttcatagcacagcaaggacgctggggactggcgcaggctgttggaggagtggaagaagagggcatggggaaccaggggccaaacacaaagggtcttgttggcctctgtgaggattgtgcattttattccagctgaaatgggtctttgcagggtttgggcagaggagtgatgtgatccatttttatgttttaggaggagcagcctggctgctatgttaagaacagactgtcaggagacagggagaaatagggggagagcatttaggatattattgcagcaacataggcaggagagataatgatgactcagagcagggcatataatgaaagtgatgaaaaacagttgaattccagacattttctaaagagaaaaccaacaagacttgccgacagattggatgtggggtgcaacagataagagaagccaaagatgacgcttacagtttttgccctgagtaactggaaggatggagctgtcatcaactgaaatggcaaagacgtgggtaggacaggtctgtgggaggagattaggggttcgtttttggaaatgttaagcttgagaagtctagtagacatccaaaagaaaatgtacatttatcggcctttaatattgaatgtgtctccagtgttagcagagtaactggccctccaaatatatggttggatgaaagaacaagaaaagttgttcaagtattaagtgaaataagtatgagatgaccccattttgttttatgtatatgcatacacacacacacacacacacacacacacatttgtaactcttcttacatattgccagattgctctacagaaaaactgaaccaatctagaattccagcagtgaaagaatgctagacagtctattaggaaagacatctcctatgaggtcgggatttcaatttcacaccaaaaaattacttagcactttttccagctgccatggagacataaaaaggcttcatttggatcttccattcttttcaggtgtaggaattggcgtggtccatgctgggtatgagagacgcctggcccatcacctaggggcacacagcacgccctctatcctaggaatcattaacgggaaaatctccttcttccacaatgcagttgtccgtgaaaatctgcgacaatttgtagaaagtcttcttccagggaacttggtggagaaagtaagtatctgtcaaggaaacyatggctgagaagtagtttaagaggtacctaggactgttaattgcccagaacatyttctgtagtcctctcaaacctgagtttcattgtgaggaaggcatgacacttattaattaattaattactcaaactaaatcgtttaagtgaagtctgtaggagastaataattgaaacagatgaagtacagagactgaaagaattaattcctattaatacccatcttgcagaacttacactgtcataggaatctgagcctaaaatgacagtgcctattttctaaacaaaaaaattaaatcacatgttagaaagaattagggatttctttctggctcataaatttgttcatgtgaagatatttgtctttatgcaaatttaattatatttggttatatgtttaacgatcatatctatggaaaatgccagattccatgaaatcaaatattatttttgaaacttcagaaacttacagtgacaataatatgaatgaatttcacaaagaaaaggttgaaatagagaagccagataaagttcacattggtctattatttccatatttaagcacctaatatgtttttttcaatatcttaatttagggatcaaagtaactaggaacggactctcattttgctttaaataattcattctcttaagaatacagggaaagtgaacataaaaaattttcatcgtatttctacatgtgctattcctagactgtcctactgggatcattatctataggagaaatatttgttggaattaacttaaaagtttgtcagagaatattggaggcttctaaaatggtgatagattgtcctgatagatcctcaaacatttacataaaatatctcttctgtgcccggcatagattaacatagccgtttcaagcagctcccaagcgggtggttatttccagtatgttggagcccatcgtaatgagttgggaaaggcttcctggcagaagtgacccttggaccaggttgggttgcaggcaggcagaaatctggagacatgaaatagcccgctttgtaagaagttttcactggtgagcagcagaggagggggatggagaggttattaggaatctccctgtgagggcctcagagcaccttcacgctcctttaaggaacttgggccttggcccacatggagccgttgtaggggtttgagcagaagagtgaaatgatcaaatttgagttttatataaatcattctagatgcagtatggaaagataaactttttttaacgactaagaaaaatttctagctagataatttattcatgtttttaatttctctcaggaatattttaagatatcagtggaggaaagtaacaattcagataacaataaatgaaattatataatgtatagagggggtggaccagcttatttttatttacgccgtttaaaaagagcaagctggcctggagtggtggctcatacctgtaatcccagcactttaggaggctgaggtgtgagcatcgcttgagtccataagttcaagaccagcctgggcaacatactgagacccaatctctacaaaaaatgcaaacattagccaggcatggtgccatgtacctgtagctccagctattcaggaggctgaggtgggaggatcacttgatcctgggaggtttgggaggttgagggtgcaatgagccatgatcatgccactgcactctagcctgggcaacaaagcaagaccctgtctcagaaaaaagggtgaggggcaagctgggagactgaggtgtgatagatagatgggagactgaggcatgatagatagatgatagatagatagataggtagatagatagatattgaaaggggcagttgtgtgttattttctgctggctagtatattaagaagtatactctgtaattaagcaagaaccaactctggaagctcagtttttataatatggtcagtaattgtttcagacaggattatgatttcagtctgtaagagttcaatgaaaatrtgaaatcaatatcaccattcttttaatagctttagccaaatgaagacaaaaagattagttatctgcatttttattttttgcaatcttttacacttacttgatttgtttattttctcctgactggagtataatacaattgttaagaattaaatattgagactaacattctattttcaatttaaggttacaaataaaaattacgtcagattcctctctggctggcagcaagagaataagcctcatgtccttctgtttgaccaaacgcccattgtgccactgttatacaaggtactttctatgctaggatratggtttctttttcttttcttttcttttyttttttttttttttagcagaaagtaatctctgagttggaacttatagcctatttgtcttttttgtaagaaacagtttcatccatgagaaatgtttgaagaccagaaattttacataaccatcatacattgagtactgattaatgccagttactgtgttagtgctttctatgcacatatcatgtaatcctcagaagaacccagtgatggagatactatccctgtttcttttttttttttttttgagacagagtctcgctctgtcgcccaggctggagtgcagtggcgcgatctcctcggctcactgcagcctccatctcccaggttcaagcgattcttctgcctcagcctcccaagtagctgggactacatgtgcgtgctaccatgcccagctaacgtttctatttttagtagagacagggtttcaccatgttggccaggctgctctcgaactcctgaccttgtgacccacctgcctcagcctcccaaattgctgggattacaggcatgagccactgtgatgggcttttttttttttttcggagaccaagtctcactctgttgcccatgctggagtgcagtggtgtgatctagactcactgcaacctccgcctaccgggttcaagcaattctttcacctctgcctccagagtagctgggactgcaggcacacaccaccacgctcggctaatttttgtgttttagtggagatggggtttcaccatgttggccaggctggtcttgcactcctgacctcaagtgatccgcccacctyggcctcccaaagtgctgggattaaaggcatgagccaccacgcctggccactatccctrtttgcatagagcaagatactgaggcttagagcagtcatataacccacccaagttctcactacagcatggtgagcgcgattcccactgacttcagacctgccctgtgaatgattcccccactacactcccagcctacctacactccccactacctctcatgtcactgtgacatgagacggagaggaaggtgttatcagtggcatggtcactgccatcttacctaattacggtacaggtaatccccaaactcatgcctcctgaccagtacagatttcaagaagatcgttattttgctttagctatgaaaaagaagagagttgtttgtatttactttgttggtacagtttttgcacatggaacaccatagaatggaagtatacaaggatacggaagacctagtggagctgtrtaagctggcatgtacctctctgctcagtgatgtgaaaaagccctacttgatttgtcatttacatctttgctgtagttttattttcttcctctctattatgccctaacagttgactgcctttgcatacaaagattatttatcatttggatatgtatatgtgggtttgagagggacggaagagatgacaaggcggtacaacatcaatatctacgcccctaccctcttggtctttaaagaacatataaacaggcctgccgatgttatccaggtacgtgagggtcaccttggttaagattttcttcacawtttatcccaagattttatgtaaataaacagcaaaattgaacaaagtggctgaaggaaaggatcttccttcagatgcacaaaattttttaatgaatttttttatctaacttggtaccgtttgctttaaaatttttaatttaaaacgtttaaaaattttagcacctttaaagggctcctgttggaaaaccaacaatctttttccaaaatgaatttaaaagttaartgtaaaacagtaataaaaaggaataagaagaagccacaaactaactgagagaatgtacagatgaatatttatctgatcttaaggtaggaaagggttaaaaagcattggggaaaaatcttggaaaatcttgataacttgactctaaattttatgtttttatgtaaatactttaaaatgtaaagttaaaaaactgggggaatatttataacaaatattaaaatgttgatatttttaatttctaaagagcttttaatcaagaaaatcataaaattctgagaagactaataaccatttttaaaaattaaatctcacaagtaatcagagaacattaaccttttttcacccatccaactgtcaaagattttctaagttaaaatagtactgttgagggtatagagaaacaagtactatcttgctagaggcagtccactctaatggcagctcaggtgtcctgtgaacacagaagggtacctgaaaccatggaaaccagatgggaaagtggaccgtaaagaaagaagagcaggtttagaaagataagaactttggctgtggacatactgaattagagctgcctgtaggaaatagaaggggagaagtcctttctacagttgggtataggaatcgagatcttaagaaaagcatacaggctggggatagaaactggtgtatcatcagtaaatggttagtggttgaagtcctgagtagggtaagatcttcccggcataatacygtagtctcccctgatccaccccacttacccctttttcagtttctgaggtttcagttacccacagtcaaccaggtccaaaacataggtgactacagtgcaagaagatattttgaagccgggcgtggtggctcacgcctgtaatcccagcactttgggaggccgaggcgggcagatcacgaggtcaggagattgagaccatcctggccaacgtggtgaaaccccgtctctactaaaaatacaaaaaattagccgggcgtggtggtgggcccctgtagtcccagctactcgggaggctggggcaggagaatggcgtgaacccaggaggcggagcttgcagtgagctgagatcacgccgcccactgcactccagcctgggcgacagagcaagactccgtctcaaaaaaaaaaaaaaaaaaaaagatgttttgagcgagggggaccatgttcacatcactttattacagtatattgttagaattgttctatttaaatattgttgttgttaatctcttgctgtgcctaattgataaactttatcataggtatgtgtataggaaaaaaacatagtttgtatagagttcagtactatgtggtttcaggcacctactgggggtcttggaacgtatcctctgcagttaggggatgactgctgtatgtaaagtarggccaaggaggccaaggacaaaactcagaacagccaccggcacmcaagacaagggggtgcctgatggagacgagaaggtgctgcaagtcaggaagaaaacaaataccagtgtccgaatagaaaagagaagataatctcaatccagggtaaatggatgaggatttcctaaattggtctttyggaacagtttatagttctgagaattatatttatttatcccactggggaaaattgtaaatcaaatacatttacaaaattattggtagaatggctgctttaccagcttgctctttgtggatatcaagtgtatgcttaacaaactcagttttcacaacagcaggtggcttaatgatcactagtagcaccagtggtttcctgttgctctaggtaatttgttgtcattgctatatggtatttatggccattataatttattgaatcattcttccgttggtggacattgggggctttgaggaatagtgttgcaatgaatatcataacctaagtacagagttctctaggacagcagttttcagaatgtggttgatagactcctggggattctcaaagatccttcaagagaaagtctgtgagatcatatcaagacacgatttgcctttttcactgtgttgacatttacactgatagtaccaaagcagtagtgggtgaagctgccagtgccagtgcatgaatccaggcagggcaccaggccacctaccatcattgtgtgcttcacccccaatcactcgcagcaaaaacaaaccactagattcacttcatgtattttgttttcttttgtttttggagacagaatctcactctgtcgcccaggctggagtgcaatggcatgatctcggctcactgcaacctccgcctcccgggttcaggcaattcttctgcctcagcctcccgagttgctgggattacaggcacctgccaccatgcccggctaatttttgtatttttagtagagatggggtttcaccatgttggccaggctgttcttgaattcctgacctcaggtgatccgcccacctcagtctcccaaagtggtgggattacaggcgtgagcctccgtgcccggcctcaccttatatctttgatgaagcagtaagaagtgttaattttattaaaccttaacccttgagtgcatgtctttttgatggatttaatattctgtgtgatgagctgggaagtgtgcataaagctgtcctgctgcacaacagagtacaaatgtcctgaggacaagtgcttaccttgccacttttcttaatggaatatcatttttacttggaagaatgacagacaactatggttatttagactcgggaatttggcagacattttctctaaaacagatgaagtgatgtggcactttaaaacaaacaactggtggtatttattgccagtgataaaattcaggcttccaagaacattagaatttcgaaaaatttgtactggccatcatgacagcttctcagaattttctgatgagattggttcatcaaagtgatgtggtttttttttttttgcttttgtttttgttttttagaggatctcactctgtcactcaggctggagtgcagtggcacagactcggctcactgcagttccgacttcctgggctcaagtgatccttctgcctcagtctcccgagcagctgagactacaggcatgcaccactggctaatttttttaaaaaattttttttgctgaggcaggcatatcatctgaattcaggagttcaagaccagcctggccaacatggtgaaaccccgtctctactaaaaatacaaaaaagccgggtgtggtggcatgcacctgtaatcccagctacccgggaggctgagacaggagattcacttgaacccaggaggcaaaggttgcagtgagccaagattgtttcactgtactccagcctgggtgagaatgagactctgtctcaaaaaaaaaaaaawtttttttgtttgagagacagggtctcactttgttgactaggatggtcttgaactcctggcctcaagtggtcctcctgcctgggcctcccaaagtgctgggattacaggtgtgagccactgcacccagcccgttctttttttaataagtataataaaatatgttggccaggcgtggtgactcaagcctgtaatcccagtactttgggaggctgaggcaggtggatcatgaggtcaggagttcgagaccagcctgcccaatatggtgaaaccctgtttctactaaaaaaaaatacaaaaattagctggcgtggtggcatgcacctgtagtcccagctattcgggaggcggaggcagaagaatcacttgaacctgggaggcgggggttgcagtgagccaagatcgcgccactgcactccagcctgggcgacagagtgggacttcatctcaaaaaaaaaaagttactgtttggaagatcagtggaccaatattcacatactctgcattcagatgaccagtgcagggtattatgaaataatacatgagtaaaagatccattataagtgcaaggaacacagatttcttcttttttttattttaatttttttgtttttaatttttttttaaattcttgtcaacaggaagtcatcttctcatttgtatatgaaccttttggatgccctcattatgatatgcctacctgttatgtgtctttttattattattatttwttttttttttttttggagacacagtcttgctctgtctctaaggctggagtgcagtggtgagatctcgactcactgcaacctccgcctcctgggttcaagtgattcttgtgcctcagccttcggagtagctgggactacaggcacaagccaccacacctggctaatttttttgtatttttaatagagacagggtttcaccatgttggccaggctggtctcgagcgcctgacctcagatgatccgcccacctccgcctcccaaagtgctgggattacaggtgtgagccaccgcgcccggcctgtctattaagtcttttacccattttttaattagatatctgcctttctgtaattgatttgtaggggttatttatatgttcatctctttttttcctgtttttttctcatagtcttttgtttatctccgtggcaaatatcttcacccattctgtggcttgtcttttgttttgttttgtttttttgagatggagtttcactcttgttgcccaggctagagtgcagtggtgtgatctcagctcactgcaacctccgcctcccgggttcaagcgattctcctgcctcagcctcctgagtagctgggatgtaggcacactccaccacgcccagctaatttttgtatttttggtagagatggggtttcaccatgttggccaggctggtctcgaactcctgacctcagatgatccacccatctcggcctcccaaagtgctgggattacagacgtgagtcaccgcacctggctgtttttattatttttatgatacycacattttaaaattatttattgacatataatacacatgcagaaagatgcacaagtcagaggtgtgaagctcagtgaattctcacacaatgaacacatccatgttagcttcacttgatcaagaaacaaaatattgtcatcagcccagaaggcccctccctccccctacctacttacctccttcccaaaggtcagcactatcctgttttctaacagcatagattcgtctttgcatttttggattttatccaaatggaataatgtagtgtatatatcttgtatctggtttctctcagcttatgtttttgagattcatacatgtcattatttggagttttatcttcattcttgttgttgaaaattgcatggccaggcacagtggctcacacctgtaatgccagcactctgggtggtcgagacgggcagatcctttgagcccaggaggtcgagaccagcctgggcaacatggcaaaaccttgtctctacaaaaaatacaaaattagctgggtgtggtggtacacacctgaagttccagctacttggagggctgaggcaggagaattgcttcagcccgggaggtcaaggctgcagtgagctgtgttcgtgccactgcactacaacctgagcaacagagcaagaccctgtctcaaaaaaaaaaaagaaagaaaattgcatgataggaatagactatggtgtgtttgtccagtccattctattgttgacagagtttttccagtttttggttatttgaataatgatgccatgaatatattattgtatttgatgtctttttgatgaacataaattcttttagtatattcactcatatcaatattttcctttgtgattggttcttccttgtttctatttaagatatacttcccctacatcaaaaatcatgaaggtattcttctcatagagcttctaaaagctgtatagctttgccttttatatttaagtatttaaaatcatttggaatagtcttgatatctgatagaacaaatctcctcactttgttttttagatttggggaaaggttttttttccttcaaaagcattatagctgttggtcttttgtactttttgtatatattggtcttttgkactttttgtatacattttaaattctgtcaacttccatcaaaacaaaccaacccaaaaaacttactggtgtcttattgggtttakactgattgttaagtcggtttggggaggatagagatcgtataaaaggcaaagctatacggcttttagaagctctgagaagaataccttcatgatcttgatataggggaagtatgtcttaaagtgattctatccttagaaaattgggccttccaacctttgaacatgatatatctgtttcatttgtttaggtcttctgtaatatgtcttcataaattttataattttctctggaaagaacatttttttcaacttatttctaggtgcctcctattttttatcctattaaaaagctttttttttttttttgatagtttatgctgcagaaaaaatttttttaaaaaagaatgtaggccaggcgcggtggctcacacctgtaatcctcgtacttttggaggccgaggcaggtggattgcctgagaccaggagttcaagatcagcctgggcaacgtggtaaaaccccgtctctactaaaatacaaaaaaaaagaaaaaaaaaagccaggtgtggcagcatgctcctgtagtcccagctactctggaggctgagacaggagaactgcttgaactcaggaggcggaggttgcagtgagccaagattgtgccactgcactccagcctggctacagagcaagactccatctcaaaaaaaaaaaaaaagaggccgggtgcggtggctcacgcctgtaatcccagcattttgggaggctgaggcgggtggatcaccaggtcaggagttcgagaccagcctggccaacatggtgaaaccccgtctctactaaaaatacaaaaattacctgggcgcggtggtagatgcctgtaatcctagctccttagaaggctgaggcagagaattgcttgaacccaggaggcagaagttgcagtgagccaagatcacaccactgcactccagcctgggcgacagagtgagactccgtctcaaaaaaaaaaaaaaaaaaaggtaaggccaggtgtggtggctcatgcctgtaatcctagcactttgggaggccaagtcgggtggatcaggagtttgaggtcaggagttcgagaccagcctgaccaacatggagaaaccccgtctctactaaaaatacaaaattagccgggcgtggtgttgcatgcctataatcccagctactcaggaggctgaggcaggagaatcacttgaacccrggaggcggaggttgtgatgagccacgatcgtgccattgcacttcagcctgggcaacaagagcgaaactccatctcaaaaaaaaaaaaaaaaagaatgtaaagggagccgggtgcagtggctcaccctagcacttttggaggctgaggtgggaggaccacttgagctcaggagttcaagaccagcctgggcaacacagtgagactttatcttttttttttttttttttaattttggaaaaaagaatgaagacagtatctttttgttgttttttctgtttgctggtataagtaatacagttgttggttgttttgttttgttttgttttgttttgttttaagacggagtcttgctctgtcgcccaggctggagtgcaatggcctgatctcggctcactgcaacctccaactcccgggttcaagtaattctcctgcctctcagcctcctgagtagctgggattacaggcatgcaccgcaatgccccgctaatttttgtattttttagtcgaggaggggtttcgccatgttggccaggctggtctcaggtgatctgcccgcctcggcctcccactgtgctgggattataggcgtgagccaccgcgcccagccttgattttgaaacaaaaactttgtatcatccagcaaccttgctaaactcttctattaacttaaataatttatctgtaccatcttttagatcagctaactatgtaatcatatcatctgagattaatgacaattttacttctttttttttccagccctcattttatttctttttctgacattactcctgacagctgacatgatgtggaatagaagtgtagtaatcgggggctgtccttgttcttgatttcaaagagagggaaggctttcagcatttccccaataagtgtgtttgcagaaggcttttaaaatgtggataccctttatcaggttaaagaaggtccttctactccttgttgactaaaagttctaaccacaattggtatgatttttatcaaatactttttctacatccattagattattctgatttttcttctttaatctatattgtgctaactcatattaattcattctctaatgttaaacctaacttgcactcatgaaataaatccaacaagattatgatttctattatgctttcaatatattgctggattccatttgctaacattttgcttaggactttgacattcatgttcagaaatgagattgacttctaacttttccttatcgtgatacccatgtgttgctttttctcttctcaggaagactttatgtgagattgtcttccttgaaagtttgattgaaagcatctgtaatgccatttgggccttgagcttgggtttctgggtttcgctttaaggaaagatttttgactactgattatttaggttttctgttttaacttctgcattgtaggtagtgattccttcttgtcatctttgagaatgattattttatgccttctcttttgttttcatggttggttttaccagaggcttgtcgattgtattagctttttcaaagaaccagttttgtctttgttaattcttcttcttatattaatatattcatttcttgtttcattaatttctatttttatctgtattatttcctttctacttttatatttttgctgtttttgacttgacagagatgtttatttcattaacttcttttctattatgttaattgtaaaattccccttcaagtactactttatatgtatctcagagttcttataaatagtatttttcatcagtcattaaagttcaaaatattttctaatatctgataggcgttcttgttttggttttttttttttcttttttagtcagtcttgctctgtcacccaggctggagtgtagtgatgtcatcatggctcactgcagccttggcctcctatgctcaagtgatcctcacccttcaacctcccaagtagctgggactacaggcacatgccaccatgcccagctaacaactttttttttccttttttttcttttatgagacagggtttcactcccgttgcccaggctggtatgctctcccagcctcaagcagtcctcctgcctcagcctcctgagtagctgggactaaggccacgcctggctaatttttgtacttttagtagagacagggtttcactatgttgcacaggctggtcttgaactcctgacctcaagtgatccacctgccttgacttcccaaagtgctgggattacaggcatgagccaccatacccagcccttttttttttttttttttttttttcttgagacagggtctcagtctgtcacacaggctagagtccagtggtgtgatcctagctcactgcagtctcttaagtcttgggctcaagcagtcctcccacctccacctcccaggtagctgggattgcaggcatgcaccaccatcatgcctggctaatgtttttttatttttagtagagacaagatctcattatgttgcccaggctggtctcgatcttctaagctcaagcaatcctcctgcttcggcctcccaaagttcggggattataggagtgagccactgtgcctggccttttgtttgtttgtttttaattttttgtagagatgggatctctccatgttgcacaggctkgtctctaactcttgggttcaagggatcctcttgccttggcctcccaaagcatttgggttagaggaatgagcctccatacctggccgtgtttcttaatttccaaacataaagggaaatgtttacatttctggtttgcattttaaatggaattctaggttaattaccttgtggtcagaatacctgctgtcaatgatttcaatcctttgaaatgtgtgaaagttagcaataaaatggtcacacggttttgtaacctgccttttatactttgcaacattgttgctttgggatttatttttaattgcccagttcgctacaaatcctgaatggaaataattttgcctaaaattcaaaatgattgacttttcgttttgggtttttgttttgttttgtgtttggttttgttttgtttttgagatggagtctcgctctgtcgcccaggctaaagtgcagtggcgtgatctcggctcactgcaacctccgtctcccaggttcaactgattctcttgcctcagccttccaagtagctgggactacagacacacgtcaccatgcctggctaatttctgtatttttagcagagacggggtttcactatgttggccaggctggtctcaaactcctgacctcgtgatctacccacctcagcctcccaaagttctaggatttcagatgtgagccaccacgtccggccatgactgacttttttaatttgtcagcataaaacagtgaataaaaattctccagtggaaagtgtacttgattttccctttgacccgaaatagctgcatcattgctttcagccctgcattgctgaaatagatcaccacatgtttattcgctcaaacaggtctgtcttgtttggttatattactttagccaaggtcagctacgtttttattaagctggtaagtaaagaaagcccatctatttgcattgagaacactgcataaaatctagctgattcttggtttttctctaggcccgaggtatgaagaagcaaatcattgacgacttcatcacccgaaacaaatatctattggcagccaggctcaccagccagaagttgttccatgaactctgccctgtgaaacggtcgcatcgacagaggaagtaaggacttaaggctttgcctctgcttgttattacaatagaaggatcatgattcattttactatagggtgactagacatctgccctgtaacattgagaacttattcttcatttaacaaatactgggccgggcatggtggctcatgcctgtaatcccagcactttgggaggccgaggagggcggatcatctgmggtccggagttcaagaccagcctgaccaacatggagaaaccccatctctactaaaaatacaaaattagccgggcatggtggcttatgcctgtaatcccagctactagggaggctgaggcaggagaatcacttgaacctgggaggcagaggttgcggtgagccgagatcatgccattgcactccagcctgggcaacaagagtgaaactctgtctcaaaaaaaaaaaaaaaaaaaacactgattagtgactgtgatggtaatcatactaatatgatgtattagtccagggcactttagcaccaaattgtcagatgtgccagcctgtcctagtggtcagagaagatttccctaagatgtaacatttcagctgagacctgaaggatgagcacagtttagccaggcgtctgggatagactgggtcactttacagaagcacagaatatggaagagtgactgtccctactaaagcattccacacagggtgagtctttggaggtcttgggaaggagcaaggataacaattaaacagtagggaagtacagagtattgaggaaatggattggtgggaatcgggaaggctaagttacatgtattcaataaagtaggaagagttattatacaaagtatctaaaaagtctagaaattcagggaatgtattcattacaccttctcaggtgaatgaatcagtagctttaaatttagggctgtttcatctgtaaaaggtatctggatatggaaggaaaacatatcaatcatgtaacttgaaaatataaaacataatttccctgtgtgtctaggcttttcagattcctttatagtcttaagagcgaagaaaaaaatgacttaaatataaaaaaagaatatcctggactgtaaggattgttgtttacacagccttcaaaaaatatcccaaatccacacacttctcactttttttaaccactgccaccctggaacaagccaccatcgtctcccagcgagacccccctggcagccttctaactagtctctctgctccattccactcttgtaccctccaggcagatgtccacacgtcagccaataatgtttgaaaatgcaaatcagatccagtcactccccatcctggggtctttgcacttgtagtctctctacctgggatgctctgaccccatttcctgtcataacaatgtcaccttttcagttggcacttccctgaccaacctgtctgatggagcctggcttctacccactctggcctctctctgtccccttttcatctttttttttttttttaatatatagcacttgttgatacctgtcataatatatctgttttctgtcttccccactggaatataagctccatgagggcaataatattgtctatattacctgacatatactaagtgctcagtaaatatttttgggagaatgaatagctaaactttccattggaaccttgcaaaggaagccgttcagaatgaggctcagtggcctctggcctgagagagatttgaccagccctccctatactggaagaactaggacaaatagtttctaaaaggccctgccggccaggaacagtggctcacgcctataatcccagcactttggggggctgaggcaggcggatcacttgaggtcaggagtttgagaccagcctggccaacatagtgaaaacccgtctctactaaaaatacaaaaactagttgggtgaggtggtgcacgcctataatcccagctacttgggaggctgaggcaggagaatggtttgaactcaggaggcggagttacagtgagccgagatcacaccactacactctccagcctgggcgacagagcaagactccatctcaaaaaataaaatgaaaggccctgctgcatcagagattcagtgaccaaccccttaaattcctggcaggcacgatggctcatgccagtaatcccaacactttgggagcctgaggtaggaggattgtctgaggccaggagttcaagaccagcctgggcaatataaacaaaactatatatatatagttttcatatatataaaatttcatatatataaaattttaaaattcgtaaatgtggtaaagaagtttggtttgggaaaaacatcacagattgggaagagaaacagtttgttaatgacttggaaatcctcccttagttgaaatgtcagctttcactgggcacagtgtattcacttccataagatgagctcctcgtcttcttcaccttcacttgccattataggtgctggccctgccatcagggattggttataaagttttgtctttttgttgtgcaggtactgtgtggttttattgactgctgagactaccaagttgagcaaaccctttgaggctttcctgtcctttgccctggcaaacactcaagacacagtgagatttgtgcatgtctacagcaatcggcagcaggagtttgccgacaccttactaccagacagtgaggcgtttcaagggaaatcagcggtaagccacagagtctctcctcatcccaggctcttcataaccatgtggcacttgattctgtttccttcttccttgagagtgttgaatacagattctaggaaatctgaaactctgaagcctattttcaaagtctactcttttgtttttcctttttcttgatttttttttttttcttttgagacagggtctcactctgtctcccaggctgggagtgcagtgacatgatctcagctcattacagcctcgacctcccaggctcaagtgatcctcccacctcagcctcccacatagctgggaccacaggcacacacaaccacgcctggctaattttttgtatttttttgtagagatagggtttcgacatgttgcccaggttggtctcaaactcccgagctcaggcaatcctcccgcctcccaaagtgctgggattacaggcatgagccactgctcctggcctaaagcctactcttaaaacagtttttgacctggtctttttacattctggatgtcagcctcaggcccccacagaaaccatgttttctatcagtgaacggtaaaggtcatcagtgcttttcaccagttttttactaaggcaagtctggtcttgcagcatcctagatcctagattttacaaatccttaggccactggtaatgtgctctggaaatttctgcccccctctgcctctttaacttcatcctggttgatctctcctgcctttctcctgcattgtcatcacttcctacagaaacaagaaattctcctctgacttttcatcattttcgcaatcatggaaaatctctctaaaaaacaaaggtttccattaatattaagtcaaggttatagagcaaagtctattgagaaaaaagagctttaacttttaacaaaagcttaggaaagtcaccataaaagttatttcttaggccgaacgcggtggctcacacctataatcccagcacttygggaggccgaggcgggtggatcacttgaggctaggagtttgagaccagcctaatcaacatggtgaaacctcatctctactaaaaatacaaaaattagctggtgtggtgcacacctgtctgtagtcccaactactcagcaggctgaggcacgagaattgcttgaacctgggaggcagaggttgcagtgagccaagatcgcaccattgcactccagcctgggagacaagggcgaaactctgtctcaaaaaacaaacaactgggccaagtgtggtggctcacagctgtaatcccagcactttgggaggccaaggcaggcagatcacgaggtcaggagatcgagaccatcctggctagcatggtgaaaccccatctctactaaaaaaaaaaaaaaaaaaaaaaaaaaataccaaaaattagccaggcatggtggcaggtgcctctagtcccagccacttgggaaggctgagccaggagaatggcgtgaacccgggaggcggagcttgcagtgagccaagatcacgccactgcactccagcctgggcgacaaagcaagactccgtcaaaaaaaaaaaaaaaagcaaacaactgtaacttaaccatgcttttgaaacttctgatgttttttctctacttttcttccaggtgtctattttagaaaggcgcaacacagcaggaagggtggtgtataaaacccyggaagacccttggattgggagtgagagtgacaaatttatcctcttgggctatctcgaccagctgcgtaaagatccagctcttctgtcctctgaagcagtgcttcctgacctgaccgatgaacttgcccctgtgagcatcggggctgggaagggtgggacaccaggagggcttgtgagtacacagtgctggtggcggatttctgctcagagcagaggtccagcagcagcactgtgttgcagggtagagggactctcccttccggctttagtcctgaccatcatccattttctctctacataggtttttctccttcgatggttctactctgcttctgactacatctcagactgctgggatagcatttttcacaacaactggtagggatattgccaggctgaatttctttttctctgttaatactgatatcactgtttttcttttgaaaagagttcatcattattaaatttcaaggtacacttgatggggcaagtggaagaacgtttacacattttctattcccctttttctttctttcagtaacttcccttttttttattttttactttttttttttttgagacaaagtcttgctcttgtcccccaggctcaatctggggatcactgcaacctccgcctcccaggttcaagcaattctcctgcctcagcctcctgagtagctgggattacaggcacctgtcaccatgcctggctaatttttgtatttttagtagagatagggtttcaccatgttggtcaggctggtctcaaactcctgacctcaggtgatccacccgcctcggcctcccaaagtgctgggcttacaggtgtgaaccactgctcccggacattttttattttttatttttttttgagacagagtctcactctgtcactcagactggaatgcagtggcacgatctcagctcactgcaacctctgcctcccaggttcaagcgattctcctgtctcagcctcccgagaagctgagattacaggcacccaccaccatgcccagctaatttttgtatgtttagtagagacagtgtttcaccatgttggtaaggctggtctcgaactcctgacctcaggtgatccacccacctcagcctcccaaagtgctgggattacaggcgtgtgccaccrtgcccggccacttccctttttttatattggctgactgaccctttcccactggctaggaaaggatcacccatggctgccattctgggcagcagagcctgggactgtctcttcatcagggaacctctggtgcccagcacagggcctgacacacgtggagtccagtgtatagatgtaaaaggaatgagtgaattaacctcaagagggatacccactcccacctactgatgagaccatgagcccctgaaggacagaaccacatctcattcgtgtttgtgattcctggcacccaacacagcacctgacaaatgacagcctttgatgggtgttggtaggtacataaaatttcagaacaccagtcctagatgaaatcttgaaagatcaattttatctccctactccacccctctgggctacatctgaatttttctggccagaaaaaaatcagtaaagttgaggaaataattccacaatgtcagaaaattcttccatgtttacaccttaagtcctttattatcccttttattgtttcctcatgcagaacttattgagcatagcctattatactgagatacaaaatcaaacttttagaataagctgtctgtgaattagaacactgagcaatctctaccttcccctccaccacctccacccgccaagaaaagctctgtttgcctgaaattagtaagcgtttattggtgtgaagagtttttggtttgggatttttattttatctttttttagctggagagaagaaattttaacttgagctaatagtttgttaatttggttttaggmgggaaatgatgcccctgctgtccctgatcttctctgccctcttcatcctcttcggcactgtcatcgttcaggctttcaggtaaatgtcctgtggcttctcggtgcaccaccatggttggtgttgacactttttttgtaaaactccttttttcttactttagcgactctaatgatgagcgagagtcaagccctccagaaaaagaggaagcccaagagaagactgggaaaactragccaagcttcaccaaagaaaacagcaggtttctctaacaaaacaccagactcacctccccggcacctgcccsccagatcctgtcatctgataacgcagcattggaacatagagtgtagagaagractctcatgcacctcctcccatgtaaactgtggctacagggaaaagtcactgtgatttgtgtttactaagaccctgtaggtgtttagatgccttagatttcataatgaaggcagaaggaaagaagcctatcaggcaagtgttaggtgagccagaagcaggacgtggtttatccctgtaaatgtcaatgaacgtaaccagtcttgtgcgcacacacacccagcagcaagaggccagggtctccgagacaaagaacatagactgaatgatagttgtcttcttcattctgtcctagagcaacttctgcacctgaaaagcagcatcaagcagggcacagtggctcacgcctgtaatcccaagacttttaggaggcctaggtgggaggattgcttgagcccagggtttgagactagcttaggcaacatggcaagaccctgtctctacaaaaaacttataaaattagctggatgtggtggcaggcacctgtagtcccagctacttgggaggctgaggtaggaggatcacttgagcccaggaggtcgaggctgcagtgagccatgatcatgtygctgcactcaagcctggaaaacagagcaagaacctatctcaaaaagaaaaagaaaagcagcacagaaaggctgtttgtaggtcagggattaccaagtcaggccatccccatcctaccaatgtgttagactcaagaatagtgaataacatacctagtctggttagaacatagcattttctttcagctgtttcttttcaaagtaacggctttccccctatcctgacagcatcttaactcctcaatatttctccacagcaagattcctaaaaaaggctttgtggaggtaactgaactcacagatgtaacatacaccagtaacttggtacgtctgaggccaggccacatgaatgtggtcctcatcctgtcgaattctaccaagaccagcctactacagaaatttgctttggaggtctacacatttactgggtaagcatgtgtgtgtgtgcatgtatgtatgtgtgtgagagagagagaggcaggcacactgaaattgcacgcttttctctttggtcttgtggggcttyatccatacagcaagatgctggctgtgacctttccaatccagacatctgagccattgcgacagggacctcttttcccacttcacttcgtgttttgttggttctgaacagaaaagcttgaactcagtgttattccctgagccctttcagttactgttctctagcccttgtgtattttccagaagagcaatgttaagttccaccgagcaagcgatgggggaatgggtgattgaagtgtcgcagctgctggagaggcactggctcccacagaaggccttctttttctctgtgttcaggccccatccaacacaaagcgttttcctattattttaagtctcactggggtatttattttctcagcaattaaatgtgtcaggaaatgccctgagtcctcaattctcttcttcctacaggagcagctgcctacacttctccttcctgagtctagataaacacagagaatggctagaatacttactagaatttgctcaagatgcagctccaatcccaaaccaatatgataagcatttcatggagcgtgactacactggttatgtactggctctgaatggccacaagaaatacttctgcctcttcaagccccaaaagacagtcgaagaggaggaagccatagggtcgtgcagtgatgttgactcttccctctacctgggtgaatctcgagggaaaccttcctgtggccttggatccaggcccatcaaaggaaagttgagcaagctctctttatggatggaacgcctgctggagggctccttacagaggttttatatcccatcatggcctgaactagactgagaggattttccaaagagatttgaactcttcagactttttaacatgcccctgtgaacaggtattttcaggactcaaactaccacaatgaacagagtatagattttagattgctcttctagaaccatggctagaagaatctttcctttgtcctgttctaacctaggaatgaaaaacaccaccagtttgaatcgcctagatgaaaatcttttcctctgggtgttatttttccccactgaatgccacaccattgaaaatagactgctcatcccctcttcctttcttgtccytgtcccatgctcaccccaccctcctgtcctgtgtcttggagaagcacagggctccaccctgcaagcggcatctggcggaccctcatgagcctgtcgtgcaggccaggtcattggccccttccccaatcccggccctgctgtgctgctgccatggcgcatgctcctaactctgaacaacccacggcagcttctagccccgcatctggaaaaaggcccctttccaagcaatctcacgtttactggttgttctgggagtaagtggctaaatgtatattttgggggtatcccccaacaacagtttgttggccacaggttgaaaaggaaaggaataaacgggagttctgcatgtgagttctcaagaaaaggaaagggaggctgagcagtggctgaagcgatgcagccttgagacacgctgtgagcatcccatccgccgccccagcgctgctggtagccaggggaggggtctgcacagcgagaagtactgtgatgactttgagccgttgacatgtatgtcttcagatgcctttctgcctctgtcgattttagggtatggatattaggagccataacttgtaatcttgttctctgaacgtagagataagctgctataaagccagtagatgttaaactgaagagaaattattcccacctgctatgagtcaggcttaaggaatctcttcaatagtgtctctttagtaaaataccaaacatgtctttgtatcaaggaacttaaaatttctcaacaattgtattttgaacactgttaccctaaaagtgctgtctcttcaagtcatcttttgcaggaagtgagccaagatttgttctagactcccattttgcaaaaggcttactttccacttctgggctgtattttgatgtctcatcttcattgttttcactcttaacttagagctgcttcaccagtattggggtcagactggccatcagcacctgagcgtgctgagctccaggtatagtggaccccagggtgcctcataccagccagttagagagcataccttttatttttcagggcagaatgaccagtggttctgagtttgagtttggacagcttcaaagagtggtccgttcaaatgtcaaagcaaggtgcctttggtggctttgtgaagggtgaaaatcagtgatgggacatttactaagtatttcttttttttttttttttttttagttgttgagacagagtttcactcttgttgcccaggctggagtgaaatggtgcgatctcggttcaccgcaacctccacatcccaggttcaagtgattctcctgcctcagcctcctgagtagctaggattacaggcatgtgccaccatgtaattagcccggctaattttgtatttttagtagagacgggatttctccatgttgatcaggctggtcatgaactcctgacctcaggtgatctgcctgcctcagcctcccaaagtgctgctgggattacaggcgtgagccaccactcccggctaagttagtatttctttaatcttaatgctttaaactaagccacttggatcctgaataatttaaatcttgagctacattggtaagtaatawattatttaaggccaggaattcctgtagttttcatggagtctgtagctttattaaaaaataaatcactgccaggcttcattcttccatatgatcctctaaaaatggacacttcctctgaatgctgtatctcatggcacctggtccaactagaaatggtcaaggaattcatttggctccttgatacatcagtcctcaatattactttctaggtattttatggccagattgcttatatgagtggtcttttggtttggtagtaggtttttatttttaatttctgtactaatgaaattcctgactttaatttctgaaaaccaaaaactctccaagtgtatttatttatattttttttaatagagacgaggtcttgctatgttgcccaggctggtcccaaactcctggcctcaagcagtccttccaccttggcctcccaaagtgctgggattatcaatatgagccaccatgccagatttgttcatttttaaayatttttatctcttcaagtcatcttttgatcttttaaaaagcaccttcaaacagctgcaccttccatttgcactaggaaatgaaggtagtgatgggattggcaatgttcctggcagatgtttcagcccaaaagctcttctacagaccggtttagagctggtgccctatgagaatattagggagcttttattttaaattgaactttacccttgtccatgcaaggcattcctcctgaatgcatccatgaatttgtttacttttgcgtcaaacatatgagccattgtcatgctcagcctgtgccaccattgctctgtctgatgtatgtaatcatacaagacctgattttggttctaacacagtggtctttgactatcaacattgatgtttttagagatgggttcttctggttgatasagactatgcattgcgtttagcagatggggtaaaactggcctaaaacaagtctttgcagaatacatgccaatttccaaaaaaaaaaaaaaatttgttgctcaggtgttgcacaatttttatctaacactgaggctatcagctccaactaaacaacatttcagtgggtgaggctgccctaacttccattaggggccatggtctcactgccatcacttattagccatgagaatttggttgtagttttcaggtaggttggtttcttcctcatttgcagcttgttgatacttgttcctttttatttattaacatcccaatcaatttgcagctgccatcattacataaatatttttctgttataaaaagaagtgtgatctgtttttttagtgatttcctttgtttgggaatagagattggaagcacatactcagacctgttttgttaactagaattctttaaaagctgatgccaaacatctttacagaggaactgtagttcacatccacctgtctgacattgtcccctaaaaacaagtgcagtgtggcagctgctgaatctgtctgttcagtttgtcaaggaggataattatgcttgggagagatctgaaaagaaggtgaatattttgcacttttgatactcttaggaacaaataacttatttggcaaattgtttcttttttatgttttgggtgttgtttttgttttttgactttttttgtattgtgaacaggcactgaagctgatgttattttaagattacagaatggaaaaagaaataaactattttaatgtctgataattatggggtagcccttgcattgcaagatgatgatttgattatggacacattatcaacagaattgaatttgcatggaactcaagacacgcttaagatcaccacagcataactgcagatttcaggaattacagtcatagagggtacatcaacttgaagagtagattgagtcttacaggaagtgagttacaataagtaacattaagagcccagctgccagcctggccaacatggtgaaaccccgtctctactaaaaatacaaaaattagccgggcgtggtgacgcatgactgtaattctagctactcaggaggctgaggcagcagaattgcttgaacccaggaggcggagattgcagtgagctaagatcgggccactgcactccagcctgggggacagagcgagactccatctcagaaaaaaaaaaaaaaaaaaaagcccagctgacattttccagttttgttttgttttctggggtttttttgttttgttttgttttgttttgttttttagtagagacggggtttcaccatgttggccaggctggtcttgaactcctgacctcaggtgatcctcccgcctaggcctgggattacaggcgtgagccactgggtccggcctgctttttttttttttttttttttttttggagacggagtctcactctgtcacccaggctggagtgtagtggcatgacctcagctcactgcaacctccacctcccgggttcaagcaatgcccctgcctcagcttcctgagtagctgggactataggcacgcgccaccacgcccagctaacttctgtattttcagtagagatgggttttcaccatgttggccaggctggtctcgaactcctgacctcaagtgatctgcccacctccgccccccaaagtgctgggattacaggcatgagccaccgtgtccagccttaggttttctagtttagaagacattttgtgtacccttctaggcctctgagcaagaagtttcttcattaggctctccgtgttactttatactttttacttacgttcacagtggtcctaaaaccaagatgcagccctaagcacctcataggagaagctgtattttttttttttttttttgagatggagtcttgctctggcacccaggctggagtgcagtggtgcgatctcagctcactgcagcgtccgaggaggagctgtagtttaaaggaagatactcaatactctaggaagcagatcatcaaaattttaaaaagcggctgggygcggtggctcatgcctgtaatcccagcactttaaggaggctgaggcgggcggatcaccttaggtcaggagttcaagaccagcctggccaatgtggtgaaaccctgtctctactaaaaatacaaaaattagccaggcgtggtggcaggcacctgtaatcccaggtactcaggaggctgaggcaggagaatcgattgaactcgggaggcggaggttgcaatgaaccgagatcatgccattgcactccagcctgggtgacaagcaaaactctatctcaaaaaaaaaaatgtttaaaaggaagatatagaaatatggaatgcttatacagtattatttcatagtttttttaaatgtcatgtttctaatgtttagataatcttgaaagaaattctcctcacttcccctttatcctccatctttcatcaaaggaaaaaaaatcaaagcagtacaagtactcctttttttttcccccaattaatccaagttccttagaaatgttgctgtttgggtgagaattctactgattatcccgacttcacagccagcaatgacactttcagcagaaagttttcttggcataaactctttagttctcagactgcttactcataagttcttcttgagaacttgtcagcgacgcaatctgttttgtcttgaagagcacaagactcagacggttgtcactttggggagagcacatagcatctcaaacagcaggttagccgccagcagggctgtgttccctaagaaaaagtaaaacctcacatgaataccctgcagacgacccgctgagccaagccttgggactcctcagctttctcttccccttgtgcctccttttccagagccctgtcttgtgcacccctctagggtgcccgccagctgtgaacacgcttgcccaggctctctgcctccatcaagcatcatttgggaatcatattttaaaattcagaaagttctttgtttactctgagaacagatttttcccaaaggagaacctataataatgatgtgtactgtattatctatcctctgaggtcgataggcctaattccataagtttgtctacattaaaattattgggatggcgtctgctttgaagatcttaaccagctaagttcctatttgataaatattaacatatattatttatgctttagaattcactttgcaatgaaacatcaaaggagacggggattgggccaccctgtcactagactacaggctggtttctttctcttctgctgattggtgggcaagctaatgatacttaactacctcctgggggttttgttagggttaatgagctcatgtttgtaaggtgtgcagtaataggtgtgttttcttcaccattggacatgctcagctgcttccccaagtcatataagggactcatctttttttttttttttttgagatggagtctcgctctgtcacccaggctggagtgcagtggcgcaatctcagctcactgcaacctccgcctcctaggttctaagcgattctcctgccttagcctcctgagtacctgggattacaggtgtgtgccaccacacctggctaatttttatatctttagagagatggggtttcgccatgttggccaaattggtcttgaactcctgacctcaggtgagctgcccaccttggcctcccaaagtgctgggattacaggcttgggccaccatgcctggccccattttctacttattaactagcttcgtgtaatttaagctaccggctgcccatggatctcagtctctttgcttactcaccagaaagatcatacggtggtgaaacttcgacaagatcacagcccatcacgttcaggccttgacaacccctgatgatctccagagcctattcaagatcaagactgagttgtccacagtggtaatcatttacagtgaaaagcacccagtagagcttttcccagcccacgccaccctttgacttggaattggctttccctccataaacatttgttgactgccaggcacactggcaggcctcccagagaaacagataatgcgtacacagtccctgctcctcagggctgcatggtgtggtgatggagacaaggaaaccaatcgtttcaatgtcatgcaccaagggcttcaaggaaagcaagcccagaatggtatcagcataggtaatagcctggagaggtgggtaaggcttccccaaggtggaaatacccagttcaagggataggccaggcagagggaaaaacacaggcaaaggcaccaagatgggaaaagttcaggtagtaagatgtggccagaagacagagtaagtgagggagactgatgggaagagagtgaccttgtctgaaagggttcccatcctgcaggtgaaaagcccagaaggttgctaagcagagggatgaggaatgtgtttcagaaatccctcatgagaagagaggatggttacagccatttcaagagagagagttatggccaccctcctttaagatcttagaggatgtaaggtacttgattaggtttaagcagtcttcattcatttactctcaaatgtctttgagtgcctactatttgtattaggcactgtcctaggctccaaggacaaggtagggaacaatacataggtcctgcccttggggagattctagtcataaccattctgcccccgtgcatttactcccagcacacattattggagctttatttgggtgtttctaaaactcttgagcttaccttggcaggtaattgtgccatcacatgcacttttatttatttatttatttatttatttatttatttatttatttttgagacagggtctctgtcacccgggctatagtgcagtggtatgatcacggctcactgaaggcttgacctgccaggctcagttgatcctcctgccccagcctccctagtagctgggactacaggtgcacactagcacaccagactaatttttatttttatttttagtaaagatgggatctcactatgttgcccaggctgggctgaaactcctgggctcaaacgatccatccaccctggcctcccaaagtgctgaggatagtgcctgagccaccgcgcctggcccgttgtatgcacttttatttaaatttaaccctaaaaagataagtttagtgtttttgtttgttttgagatggagtttcactcttgttgcccagactggagtgcaatatcatgatctcggctcaccacaacctcagcctcccaggttcaagtgattcccctgcctcagcctcccgagtagctgggattacaggcatgcgccaccatgcccggctaattttgtatttttagtagaaatggggtttctccatgttaggctggtctcaaactccctacctcaggtgaaccacccgcctgatgccttggcctcccaaagtgctgggattacaggtgtgagccactgcgcccggccaagtttagtgtttttgtttggttggttggttggttttttttttgaggtggagtcttgctctgttgcccaggctggagtacagtggcacgatctcagctcactgcaacctccgcctccagggttcaagcaattctcctgcctcagcctcccaagtagctgggattacagacgcctgccaccgtgccgggctgatttttgtacttttagtagagacagggtttcaccatcttggctaggctggtctcgaactcctgaccttgtgatccacccgcctcggcctcccagagtgctgggattccaggcgtgagccacgacacctggccaagtttagtgttctttttttttttttttttttttttttttgagatggagtttcactctttcgcccaggccagactgcagtggttctatctcggctcactgcaagctctgcctcccgggttcatgccattctcctgcctcagcctcctgagtagctgagattacaggcacccgccaccgcgcccggctaatttttttgtatttttagtagagacggagtttcaccgtgttagccaagatggtctcgatctcctgacctcgtgatccacccacctcagcctcccaaagtgctgggattatagacgtgagccaccgtgcccggccaagtttagtgttcttaagagaggatactataatgttgttcctatgaactgttgttttcatgacagatgaactgaaggcaggaagagcaaataaaggacaaaataagggactattatatcccagataggaaatgaaggcccttgccaaaatcaatcacccttcagtaagagggtattcaaacttatcctcagcccagagaacagaaaaggcctaggtgctctgctcttaaaatcctaccttggcagccaggcgcggtggctgacacccgtaatcccagcactttgggaagccgaggtgagtggatcacgagatcaggagttcaagaccagcctgaccaacatggtgaaaccccatctctactaaaaatacaaaaattagccgggcgtagtggcatgtgcctgtaatctcagctactcaggaggctgaggcaggagaatcgcttgaacctgggaggcggaggttgcagtgagccgagatcgcaccactgcactccagcctgggcgacagagtgagactccgtctcaaacaaacaaacaaaaatcctatcctgattcctaaagattcgcttcaagtcccaggaaaatgggtgttaagtgtctccacccccaggatcttcactggtggaatctccttacctgactaggagtgagaccagcaatttcaggtgtccctgtccctggcgcataggcaggatccagagcgtcaatatcaaagctgatataaatgggtttgcctcccatctgctgcctgacttcccccatcagaggaaccagcgacttcatccagcagtcttcagccaggactacccggaagccctgcagagacagggactgaggtttctgtctggcagcatttacagggcatttcctgtttgccagccccatgctcagctctgtgtgcacatgacacttgaccctccatctccatgaagagggaactatcctattttacaggtgaggaagggagggacaatgagtggtaaggaagcagggtcaaagctgactgatggagttggaatcagagagaagctttgctaaagcaagagtgggaaacagcagctcacgctagcaccttttgaattgctctgtccagaagactggccttggcacgctctaaaagcaagggatttgggtctgttccattggggtcttgtcatacacgtctatctgagagccattctgcctagagggtacgaggaccagaactaagaaggtggcaactcatcttgggtccggacttcctcccctcttttttttttcttttgagatggagtctcactttgtcacctaggctagagtgcagtggcgcgatctcagctcactgcaacctccacctcccacgttcaagcaattctcctgcctcagtctcccgagtagctgggattacaggtgcgcaccgccacacctggctaatttttgtatttttaggagagacggggtttcaccatgttggccaggctggtctcgaactcctgacctcaggtgatccacccaccttagcctcccaaagtgctgggattacaggtgtgagccactgtgcccggcctcctcccctcttctaagccagcaccgtccgaggggttggtcgatttctgcttgtctcccccgcccagcgatagacttcccatggcccataaaccaacttcctcactcctatgctccttatgcccctgatgatgcaaactcagccttgtatccctgcttcagacttgattagtaaagcccccgctcaatccctggctgccactggtgaggcaacggagaggaagacattttgaggggcaagggtggggggcattcggtctgtcacctggctccggttgtatctgtagggatccaaggtcgtggaagagccccggatgccaatctgcaccacacgcttacagtccaggagaccctcatccacacaccggcggaagggcgccccgtggtagagcttctctcct

SEQ ID NO: 97834 - DNA, 19059 bp, Homo sapiens
gccagcccccgcggcggcggcgaggggccgggcgaaagctttcggggcttccgcagcaggtacggcccccgccccacccccggccagtgcgagctggcccggagccgccgaccttcctcaaggtgcccgcaggcatttcctgggcgatcctggtgcaaagcgaaggcgcgcgggaagcgcagtctggctgcggcccagcccgggggcacccgcggtgccctgaccttggacaagtcctgggtctcggggggctgcgagccagaaaccacggggacgctgtggccttaagaggccgctggcaagtgcagcctcggagtttccagaccccaaccctgggccctcttcgcaggggacaagtttacccgacccccaaaggcagtccccggagacttcaggcaaagatgggaggaaacgctaataaacaataagcataagtgcgattaaaaaaaaaaactgatctcacgaataaccagaatcatgcaaattaagcagtgactccacctgcccctacccccaacactcccagatcgaccccagccattgctggctttgagctggaatgcgggaagacaggcgtccacacgctgcctgcaacttaaattgctgcatgctttttgcaagataatttggcagaatctattaacgttaacaatgttcgaactccgtgacccagcaatctccccttctaggaatgcagcccttagaaaggatgtctcagttctctccactaatggaccaagagatctgtggagggaaaaacaaacataactggatacaacccgatgccccatcaggcgggagtggccaagggtagggaggcatctgcttgctgtggaatattatgcagctgttaagagggggaagtggaggatgtggggttaatatccatcagggaccctcatctgttgctctgtgaataaagcaaagaaggggggaactcttatctgtgggtatatttgatacaaatccctccagcagtggcacaatgagcacctaacaggtgccagccgctggggatacagcaggcagcgaggtacacagcgcctgctgctggaggaagactggccatgagccagcagcccaacaaaccagatgacatcagatcggtgctgctggggccagggggacacagagcagtggcgttccaggtataagggaccccgaataggtgcctcagagcagaaggcaccagagccaaggcccaaaggcaggggaagcctgttcacctctgcctatgtgagcatcggtgtgggggccttttctcctgtctcatccccatggtcactgcagaggagacacatgcctctttgctccttggcatgcttcgtcctgttccaagccagcattttttagacttaataaaaccaacccatgtaaaaaggcaaacggcccctctgggctggccagacagcaggtgtcccttaagcctggaattcctgcactctgtgccccgtgcagcctcttcgcccagttttagaaatttctgcagctgcccacctgctaccccacaaaacctgaagggcttaagtttctgtttctggaagggatagctgcagcccctggaggcagacttggggggagggagagacttgggggccacactcaggacttcctctgtcttcagcaactgcagcttctcagaaggccaaccctcccctctctcaccctcctggctgagagcctaacctgcttcccaggtcccccatgggaaaggaccccctttcccctttcctgaagggggcagcccctccccccaacacctgtggttatttctcgtcaggtgggatgagactgagaaaagaaataagacacagagacaaagtatagcgaaagaacagtgggcccagggaactggtgccagcatatggaggacccgcgccggcactggtctctgagttccttcagtatttattgatcactatttctactatttcagtgagggggatgtggcaggactttagggtaatggtggggagagggtcagcaggaaaacatgtgagcaaaggtctctgtgtcataaataagtttaaggaaaggtgctgtgcctggatgtgcacgtaggccagatttatgtctgactttacacaaacatctcagtgcagtaaagagcggtattgccgccagcatgtctcacctccagccataaggcagttttctcgtatctcagtaaatagaatgtacaatcgggttttacaccgagacattccattcccagggaggagcaggagatagatgctttcctcctatctcaactgcaaagaggccttcctctttcactaatcctcctcagcacagaccctttacgggtgttgggctgggggatggtcaggtttttcccttgtcacgaggccatatctcaggctgtctcagtcgggggaaaccttggacaacacccaggctttcttgggcagaggtccctgcggccttccgcagtgcatcgtgtccctgggtactcaagactggagaatggcgatggctttcaccaagcacactgcctgcaaacacattttaacacagcacgtcctgcacagccctaaacccattaaaccttgagtcaacacagcacatgtttctgcgagcacagggttggggctagggttacagattaacagcatctcaaggcagaagaatttttcttagtacagaacaaaatggagtttcttatgtccacttctttctacatagacacagtagcagtctgatctctttctttcccctacactttccctccacaggcaaggtcagaactgcagatatgagatccagagggcagggctgcctatggcaagcagtgagcctggcactggggcggctccggcctggcgccgctggtaaccctcagctttctgaggtgggtgtttttgtccccagtgtgcagacagaagatcattttatttttgtttttattctgttgagacagggatcttgctgtgttggccaggctggtctcaacgtgcagatagatcagaagttgggtgacagaggtgtccagtcatgggcccagcaatccttccaccctcccagagcgccggccctgtgcgagcctgcctggggcaaaatgacagtgtacgggggccaggcagctgtgacggggacagcagcagcagataacagtggggaggtggccctcaaggccttcagacctaaatgtcagggtgagaccccccaggcaggggctgattgggagccttagtgtcccccagagcaggtgcacaaggagaggggcttggaaggtgccagcctcccctccagctgacctcccctgtccacagcccctgctctccctggggcccacaggggctgctttggcagcatccaggcaggaggctgcatgacgttaccaggccagtgtttggtccaggttcctcagaaatcacacctggttacacgtgaaccactgggcctggagggggcttcaaaggaggcccaggtcttttatccacagaacatgacccggctcagcaggtcaggcacagggcagactccaggcagggcactggactctatccttgtagtctgctcctctgcagagtgcagccggaggcagcattgcttcctcccagtgccctgcccctgagttctgcagagcccgaagaggaagcgggctgaggtcaggagagggacaggggctgactggggatcacagagcacagtggggtaggaggctgtgctgcttagaggggagggactgcagtcacgtggtccctgccagggatttgggcacagcagcctccccagtgggcatccttcctgcctgttcccacctttcttcaaatcagccattggttctctgaagccggtttactggctttaattcttaattaagagatagggtcttgctatgttgtccaggcagaactccaactcctggcctcaagcagtcctccctcttcagcctcctcagtgctgagctttgggggtttattggctttaaatcctaatcccactttgacctcactggctgtgacttcaggcaagttatttaacctctctgagtttcagtttccccatctgtaaagtgttccctccctcctaggatcctggggagaagtcaatgagatggcacagctgggcatatacagcatcagctcttgttaggggagccccaatacaaactctgcacagggaatcatcagctgaggtaggggggattggttctgcttgaggactcaggctggggactggggcaggctcagatggagcaggtgggcagggctgaggaggctgcctggaggaaggggcactggaggagttgaccagccagtaatagacagagaggcaagagggaagtcggaaccaagggaaaccaccgccgagtcaccaagtcctaccttaggcccttataggcacccggccctgactccacaccaaccacagctgagaggctggggaagagaaacccaagagaagtggaaagtcagaatcccccaggggagaaattagggggtgactcaggcgggtgcatcatcaagggagagaagcatccgctggaacacaggttcgggagctgtggagggggctgtttcaacgttgagagcagaaggcagggaggctgtaaggcagaagtagaggcagctggtggccagcgtggtggccccacagggacaggagcccacagagagtgggaggccatggaaggcctctcaccagcttactcctgggggctctcagccgcagctagggcagggacacagaggggctgaggttggacccctaggtttccatgatggaccctgagaagccaatgcaagggccacaaacagcctggcctggcctgccccagaggcgagagagttgagagtgctctacaggctgccagggctccagaggggagctcgctctgcaggagcctggccacctcatcttaccaggctggagtggctgagtgactggggagggtgccctagggtcattgctaactggcttgggttcgggcgcaggctaaaccctaggctgggtaggggggtctctgttcctctccaagctctggtcctgagagctaagagctggaggaagaaaatccgtgtcccctgcccccgctcccctgcacacacactccacagaggagccagctgggaatggtgttgctgagacagaacgccactcccgcttccctgttctgcccatcctccagcagcacctcctccagtctcctgcccaggctgctcaccagacccaaaagtgggcccaagtcatccagttctcattatgccttggttcgcaggaggggacacaggacccctactccctcctagaagcagctctgcactcaggacaacgtgcccccgtcgggggaggcagggcctgggcggaaggccacttctgcagacttttccaggcccccatctgctgcacagagctctggctgaccctagcccaagccttttagaaccgccccttgacctgcgattccttttctggaattcattttagggcccagtcaggggtgttcccagagcagtctgcaataacaaaatgtctatggcgaagtgtcctcatagaggactgggcagtgagccacgggccagccctctggtgaacccccaggggccgtcaaaggggtccgggacagcagtgacagccaggccttggctcctgccgcccttcaaatgtgcctgggtgcgacggcaacccgcggccggcggggcggggggaccttttgtttgtttgttattatttgtagagatggtgggggtctcactacgtttcccgggctggtctcgaactcttcagctcagaagaacctcccgcctcggcctcccaaagcgcgggatcacaggcgagagccaccgcgccggccggccgccatatggattttgtccagtctttcgatcttccagcgaccagcaaatgtaaacagagcagctcacatgagggaagaagtcgcccaggaaacgtcctctgggaggggcgggaagggcagcctggcgctcccaggatcccgtgcgcggagggggggagggggagggggaggcggggcgcgacgtcatcagcgggcgcggagccggaagtgttgtggccgccgccgccgcgcgtcgcggaggcacgtgtggagccccggcagcaggagcgtcgcaggtgagactccgcggggtacagggtggcagggcgcgggtgagggtgacccgggccgggcacggcgcgcagggcctgtccctccagcctcgcatgggcggcccccgccggcccggcctggccccttgttgcctctgcatcggctgggcggtgtttgcgtggacggccagctccgcgtccccagccccttactggggagccctgaatcctctgtcataccctgccacctagcccccgtgggggagactggggtgaggaatcaagcctggcttggaggtgacctcattgaccatttgcctctcccccgccggtggacacctcgcaaaggcgcttcctcatctcacatcttgggaatgggagtcaagctcctggagaagggtgatgggagggtcgggtcctcactccgggaatccttgggaccgaactccgccattgccaagcctcagtcttttcatctctgatttaggctyatagtccctgtctcttgtcctagaccaagaaaggcttcagaggccaggccagagtgcagcgctattgggctccctgtcaggcagtggcagagactgaggctgagctagccacaccccgcccatgcccactgctgggatgyaggcctcgaagccttctacctagaccctaggccctcatcctgcctcctgacttgctcatgcctacacacacccctccccaggtccttggcccttgccagacattagcaccatgagcttcgtggcatacgaggagctgatcaaggagggtgacacggccatcctgtcactgggccatggtgcaatggtggcrgtgcgtgtgcagcgtggggcacagacccagacccggcatggtgtcctgcggcactcagttgaccttatcggccgccccttcggctccaaggtgacgtgcggccgaggtggctgggtgtatgtgctgcaccccacgcccgagctctggacgctgaacctgccgcaccgcacgcagatcctctactccacagacatcgccctcatcaccatgatgttggagcttcggcccggctctgtggtctgtgagtctggtgagttcctcaggctgcctcagtttaacgcagaaattgacacaaaggtggaggtcagagcctccagcctgcccttcctacagacasatgtggctcctcagtttctattttcacatctttccgggatgctgacagcagggwgtgaaggtggaggcagagaagcccgttaggaggctggtgctgtaactggagtgagaggtggtgggaaatggaccaggaggagctggggaggactggtgctctagtgagggtcctgcttgccttggtggggcgtggccagcttgatgcttggcgctgtcctaggtactgaccgtcaacctctagtcctccgtgctgatggtgaagcagagagagttgccccttctggaaagaggccagggctaccccgaggagctcactgtaggtggggagccttccccatcctcatccatgatcagatcctcacctgctaccaatgaatgtgagcaccattgttgagtccagggcctgggctgtgggaacccctgcacatatacaggtgctggggccgcccagtgtggcgattgaagccaagattggccccaggcgctgatgcatctaggttgttggtggcgtgttcctcmcgggcaggagagctagggtccaggttcacgaagagtgcctagcactgccatgctggctttctgagggctgcaggtcaccatgtccctccctggggtgtctgggtgggaggggtggagagcaggacttagccaactccatcagctgctgctcctgtgcatcctgtggygggtgctggcctctccgcccctgccccactctcgcgagagagctcaatcaagcagcaccttctcctggcctcctcagatatgccaggtcccctcctaggaaccgtgaacwagagagaccaggttcctgccctcgaggagggggacacagcctaggtgagcatctcagtgccgctggttgctgtgaagcctgtgagacagggctgcgtgtctgaggggtacccagagtggggactctccagctaggccaggcagggaagacctctctgaggaggggacatttgagttgaaaatgatgaggagggacctacgaagagccaagggacagctctgcaccaaggaggagccgtgccgaggccctgcagttggagcatgctgccgagtcaggctcagtgggggaggcagaggggctgggagtgaggttggaggggaagcgagctccaccccggaggctaacaagtctgacttgccccttagtgggaagggggcatggccaggctttgcagaggggcgaggcagcaggctgggggcacccaggggaggggctggacaggtggggagaggggctggcccctgaaaggaatgtgggaggtggcaggacgtgggacgggatagagggagtggaggcacctccatgggtctggcccaagcacttgcgatgctcagcgctatttgggttccaggcatgggtggcaagtgtgcagtggctgctctagcaggagtctccagtggaggggcctggggatgggagtggcatcaggtagatggcccctgaagctggagtgggaggagggatgcaagccttgaccctctccataagacaggaagtcaagcagaggggccatcttgagggaagctggggagggaagctgggggcaggtgcgctggggaggactggggccgtgtggctggtggccaggccctgcgtcctgagtccaaccaggccagggcagagccccagcccctgtgtggtgggggcaggtttgggcaggcttggtgggggtgggctstctcaaggggaccaaggagcttctggggagaggtgggcatgaggaccggcagggtgggccactgttgacggggattgaggaagtgatgggccatgcatggamtaagacagggctgagtgatgggatggcctccctgtcccccttgcacagatttccccggaggctccaggcagctgggctgctctcattccctatacctgcgctaggcaggatagggcagggttgccactggcctcgcctgtgcccacaacagacagcacggcatacacagcctgtcaaccccagctcacccctagacagggtgcccaacccagggctagcctggggctttaggcagccaggaccatacagccctggaatgacgcccacctgtagcttggggtcctcccaagccctgtgtgggtctccagggtgaggtgggggttgtttcctgggaggctgtgggtcccgagcagtcccaactgatgccttgcccatcccttcttgwcctgccaggcaccggcagtggctctgtgtcccacgccatcatccgcaccattgcacccacgggtcacctgcacacggtggagttccaccagcagcgggcagagaaggcccgggaggagttccaggagcaccgtgtgggccgctgggtgactgtgcgcacccaggacgtgtgccgcagtggctttggcgtgagccacgtggccgacgccgtcttcctggacatcccatcaccctgggaggccgtgggccacgcctgggacgccctcaaggtcgaaggtgcatccggggttccgggagaggtacagcctgggtgggggtggggcaagggtgcaggactgagctcctgggatctcagaggggtccagagaccaagccacaccatggcagtggccaggccagggccccactttggcctgaggtgaggagtgggtcaggctsgccaggggaggcagagctggggakgatggtccctggctgggccctgctcctggtctctggcctctcccaaccccctgatggaggaaggtggcagcgccacccaagtgcagggcaggcccggccggaggrgtctggagtcccctccctgctgtttcccaaarcctctcctcccccaggctctggagcccagggagctggccccttttagggaagatgctgggtgcggaggcggggcagccctggggaaggtcgggcctcaagccagggaggtggctgggaggcccagggtttttcccttttctggagaaggagcagctcaggcagcaggggccccttccttcttcccagctgagagttgtattctgagagggttgaagggtggaggtgctgggcgccccaccccacctcaaagatgagccgaggcctggtgcgaacagcaaggctgtggccgggggtcccctgctggctccagcccagccctgactcctgggtcctggtctctgctgaggtgggtagctgtggggatctccacaccctgcctcctaggcttcctgctctggggacacttctgggcctggaccatagtcccagggaggctgaacccggcagagcctcccctggggcccccctgctgcctttgtgactccttcctccagcgtggctcggggaacccgcgcctgcctctgggacctgtccctttccctgcgagctcccccttctgggtccaaaggctcctggctcattcatgggcccggcatctcctgccggccacgggagcccgctggggaggatgcggcatgctcagcctctgtgccctgtctaggctgttgtcacayagcaggtgcctcctctaaccccgaacctcctggcggccccgtgttagggtacagctgaggagaccaarcctcagggacgtttgaggacacttgcctgggccacatacctctacccggccctggcttccccaggtcctccctgccaggacagggacccgggctgggttctcattcactgcaggccaggccragtgaagcccgtggctgccctggtgggaggcggcagggaggggctgtcatgctcgggctctgcttcgagtaggcgcctcctgttcccgggagcagcgacagcctctaatttcctgtgacagcagcggcccccgcaccgccccackctgccgtgctgtcagagctgctccgggcccagagctccagcagccctgtggaaggcaggagagcagtgcccgctgtgggccaagtgagacaatggcagcgcgggcttgacccggtgcctggcacatgggagggcctggcatggctaagctgggtgacatgaacagcggcgccaggccccatggggggctgtcagttgagggccaggcccctctgccctgcagtcccagctcttggagagcttgcagtctgtgttggggctgtcttaggctggcctcagaccctagggtgggagtccagggatgctagggccagacgggccaggctctgccacccctgccctctgaccctcgggtcctgtttcccacaggcgggcgcttctgctccttctcaccgtgcatcgagcaggtgcaacgcacatgccaggcgctggcagcgcgcggcttctcagagctgagcaccctggaggtgctgccacaggtctacaacgtgcgcactgtcagcctgccaccgcccgacctgggcacaggcacagatggccctgccggctccgacaccagccccttccgcagcggcacgcccatgaaggaggccgkgggccacaccggctacctgaccttcgccaccaagaccccargctagggggccgcctcccagggcaccagggagctgggagcactgaagggctgggcagggaggccagaggcaccttatatggtcagcgatgcctgccagacacagacggtggggtggggcttgggggcctcctgggtggccagagtgggacagcaggaagggcggctgtgatggaggagcagtgctggggctgggcctcagccattcctgtccagccctgtggcccatcccagctgctgtttgttgccaatatgaagtatccactgccacaggctcccctgggtgttgaagccaaagggtgcaggtgggggagtctgaccccctcccaggtgggcctaagcaggaagggggtggaggagggaggrgggcattgaccctgagaccacgctgcgtctgacccctgggcccccacggccctggctgccccacggggcctgagaccatctcgtgcttctccagtccccgggccgaggctccagccttggccagaagctggggtgagctgacccagaatccctgccctgctctccccagcgctaggagaccaggccagcccaggaaccagggaggtgaccctgctctctggcctcctggctgatgtcacagcactgagctcagcccaggccttcgtccactcatgtccaagaggcggggcatcccccacccagccagagcccctgacatgggctgcactcgctgaggccaggcagcgctgcggagaggagcggcagagtgggttgtctgccgcaggcaaccaggcaagtgtgtcggggctggggtgtgaatgccagcctgtgagtcccggaactatgtgggtacccctacccctcacagaagccaagggcatggaggaggtccctccacagtgacaacggtgtggggtaggggaggtgcattcaggacaccacccagggacagtgcctatgtgatcacctcytaaaggctaagcttaggggcatttcccaaagtggggacagagggcaggacgcccaggctgggggctctcctcgcccgccctggtgtctgacagcctcaaggaaggagcagtgcctgtgtcagccatggggcccttggagctgccrctggtgcctagggggcctgggtttctgcccaggcagccagtggctgttgggagcctctgtttcccctgtgctgggggccttgagtgctatgctagcaggggcctggccccaagtgtgagtgatgagcaataaacgtaccgtccccctctgttctgagtgatccctagcagccaaggccacccccagctgctgtctaggccagccctacctgcgctctgcccctggtccctgctcctccctgtcctggtttggcatgataggcgctccagtctccaggacaaaggggcaaatgtgtggccacccccatctggctgcagaaaaggccactccttcctggggttggggtggtccaggagtgctgggccttcttccacagtcctgggctggaattcagtgtggctgcctgggttacttgtatgcgcccctgaaggaagggtccactccaggccgcctggtccctgcgaagtgtcacactgtgggtcaccgggggctgtggctaatgtggtccgggaggcctgtgtccctgagagttgctcagccctgctccgagggcttgtcctctccttccaggacccagcttcccttctaaccttgttactcacctggggcacagaggaggggcccccagtcaggttcaacatggaagtgggtgaccctaatgccaggagctttggggtcaggctgtccctggggtgtcatgaactgggtgacgcacacccctgagatctcagttcccccaagcctgccctgcccctcctggccacagcaaaggcctgcatggtgtctgatgggtggacaccgggaggtgtttctttgaggcgcagctccatggtttataggacacataggcctcaggcaccgtagggtccaggttgtgcccattttccagccggggctggttgccctggtggcagccctgggtgagtcaccagggtccgcacatggagagcgggaggtcccagcccacccttagttgtcacatgggacagagttgctgtgtcaatcccctcggccctgctgctctgccctgcacacaggcccccatgatgaccttgagcctccaggcatccacccccaccgtatggccctctagacccagctgggcctcaccccactccctcagcttggatcctcacgtggcctggagccagcattaaactcctgtatgtccttcaagaccccttcaaatgtccttttctcagcatgcttccccagacatctaatgcccaggcgggagagtcctgcacaccatgtcccgaaggagtccccatagcagaggagcagaaggcaagcagcgccccagttctgtgatggggagcctgactttcagaggtagagctgggcccatggccgtgagtgaccgatgagcaggcccggatggtcagcgcgagtcagcagcacgggctcatcatggggcacggattcaccagaaactccctgcctggcccagtgtgtactcgcctgtggccctcagattttccctggcaattcctccccgctcaccctgctgtcctgcactgagacagtggcacatgactcccagctgcccaagccctggaaggtcccagaccctggctctgactcagctgcttggagggtcctagtcctgggaactgccctagagccgagattagagtacccctccctcaggaagccccggggtgtcagctgctcctgggcctcactctgccccacccatgcctgcctcagggcccagcccctcacccaagagccccagaggcctgggcccaacctgggcttcacgggtggggaccagggcagggtttctgggtgggtggagggcagcaggccggtgggggcacaccctgtctagtagcatgtgatgaggcagggttgcccctgagggcccaagaggccctcacccctgcagcctaggtctggggctgtcccctccactccctcttctctgcctccattgcggctttgctctctccacccaccacctctgggccagaagatggaggataggtgggctgccaggggacccgagtcccccaacagtccactgcacaggtagggaaactgaggcacagagctgcaactccggaatcctggccataagtggttccccagtgcatgaccctagagggcagagagttttcaggcagagtcctggaaggttcctcagaaaaggagacacctgtgcaggtggacattggagaagggtgggcaagtcatgcaggggggtgggaggtgccccagaagcagtgggtggagagggtgcacttccagcctctgggctggcaagtgccatttccaaagctgctctaagcagggtgggcactggactcagtgcccccacagccccggggctgttgggctcgcacgccagcctggaggggccttgagcgagagggtccccagagaggggcctggctcctgatgccctcaggagggagtgagcaactgccgggcctcgcgccctgtcctcaccagccacagagggtgggcgctgtcatcagtatgcatgggttgagtgcctcccacgtgccagcccctgcccattcaggacgcccaggcctgcccttcggggctcccaggagccagacccagatctgggcacacagtgcagagtgagctgtggctgcgggagcggtggtggcctggaccctgtgtggcaggtgtgggtcggtgtggagtgggggagtggacgggcctttctgtctcaggagctctgcgcactgcccactcctggacactggaacttagcctcgagagaagtcgcttcccgaggtggccagcgggttggcagcagacaggctgggtgccaggtgtgtgcaccccggagccagcgggttgggccctgcccccggtgggtcatcagtgaacaaggaggggcacagtgggaccagcctgctgccctgccccagcagtggccttgccagcccatgggccctccccacgcggagcctctgtgcccaggggagcctgtgtggcccagcccggtagccaggacgagggcgtttcaaagtcaggccgcctccaaagcagtggcgttggtgggagggaataacttgctcccaccaggctgagaatagctcagaattgggtcacgctcaccgagatctccggtcacagcctccagcctttgacaataatcagctttctccccgacatctgtcccttcaaagagggggcaggccagtgcaggcacttctagaagcagcaaagcagaggggacgggagtggggaggggcgtcctcacctcctggccccccatggcaggccccctccctcccatgctcccaccccatgctcccttccgtgcctcaggtcccaccagcttcccgcgcagggccaggtaggggagcaaagcacggcagtgccccctgacagatgaggacaccagctaggggctgcggggagggtggcgcctgtgcctggccctctggtgctctgccacccatgcccctcagctcctgagacttaggggcctgcatgccactgccccaagccgccctcctctcgcccctcccggtctgtcctgggctcttctaacgtggttgaagggcatgggtcagagcaggccgtcctgctccgccaggcttttgggggcttgtttcccccagcccaggacttcaccccgtgtcttgtttcctatccattttcccgtgtcgggccctcctcatcccagagcagccttgagagggctgaggtgggtggtgtcacaggccctcagagcctgcatctgtgctgtcacctgcgtatgctgccaccaggtgggtgctgaagccatcctcgtagcagcatagtaggtgcctcctgcacagagagatagatatgcctaccacatgccaggcacgctgattttggttctttaatcttttttttggagaccgtcttgctttgtcgcccgggctggagtgcagtagcgcgatctcggctcactgcaagctccgcctcacgggttcacgccattctcctgcctcagcctcccgagtagctgggactacaggtatccgccacctcgcctggctaattttttttttttttttttttttttgtatttttagtagagacagggtttcaccgtgttagccaggatggtcttgatctcctgacctcaagatccacccacctcggcctcccaaagtgctgggattacaggcgtgagccaccgcgcccggctggttctttaatctttaaaaacccacaaggcagttcccgtgttctaggtgacgacaccattgctaaactttagccacaggtatgttcctgaagtgcccgtgacactaagcatctcaagatgtggcccctggaccggctggtcagcgtcgtccccaccccacccctgctgagccgaaactccaaggcagggcccagggggccccctttccccaagcctccaggtgctctggtactcaaatttgagaatcactgctggaagacccgggagtctcgcaaacatttctttttatttcttaaataaaaacccccgttattaactgaagcggcagctctctggcagcttcctgcaagcagctggttgatcctctgaggctgcactgtcagttgcagctcagtttcacccggtgtggctggactgtctgcttctgagccccagaccctgtcgctccctgctgctcccctgtgaatgccctcgtgctcccagagagaaactgaggcagcaacagcaggtagctgtgcgcagaccccgctgggccccagtttgaataaaccaaatgtcttttacaaaataggacagttgggaagcttgaagcttgagtggccgttttgtgagtttaaggagtggccacatttgcgagcatgctgacaaagtgctggggaatgacagggtggctgagatccaactctgaataacagggttggggaggaaggggagtagacctcaaaccaggctggccacagactcctgggagctgcgtacaggattcttcacacgattctgctggtgcatttctttgacaatttccaaaagtttttatttttgaaaaaaggagactgggtgtggtggctcatgcctgaggccaagatgggaggatcgcttgagcccagcctgggcaacacagggaaaccctgtctctacaaatgattaaaaaataaaaaaaggagagatgccccaggccagtggccagcactggtagctggcaggacccagcctgtcacccagggtgctggcatggcacatgtaggctgaatgcagtccggggcctggcccctgcctggaagccctgggcctgcagagacacgggccctgcagaggaatgctgggccagctgtgggtggggggctggccatggatggggtggggacagtgggggcgacaggcttgttgtgaagcaacaggcacaatagacgttctgggtgccaggcaacggggaagcagacgcttcttggcggggaaaccctgaggggcccaggccacacctgtccctcagcaatgtggcgtgcacccccaccctcaggccattgaggctcactggctgcctggcccctcagggtgaagggcagccaccctcctggtggggcttcaacactccctgatgccagcccccacccaactgaggacctggtcggagggtgcctcgatggctcctgcagccccgagctctggcctgctcacctcttcgtggcctctgtctcggggccgccggcactccccgcctctcctgcctctgactgtgcctgcctggctggtgcccccaggtgtaggcaggccctcatggggttcagaacagggcttggagttctggtggagcctccatcccctgccacccctctcctggccccagactcagtagcccccagccctgccagccaggctctgccagagccacagggcccctgtggctgtccctgtccagtggctcccttcaggctccacatcctccccctccgtggatggccctgctaaggagctctgggcccagctggtggccaggagggaggctaggaggttgccgtgcccggtggccttccccacctcacagacggttcttgagcttctgggcacagcggccagccctcgccctcccccaacacacgccctccgtccctctgcctcagcccctgcctcttgccccagccctgagggtagaggtcggaccccagctgctgtctgcagtggcacccagggtcccggctaaagcacacattccgtgtgggccaagagtgtacacagttcctttccgtcctgggtgagccaggcgtacagtaggcgctccgtgaacacacagtggaacccgccgggcagtgccgccaccctccggtggtctcagcccccgctgctctgtttgcatggcttttgccactctggtctctgccacccgttcctcgctggcctcactgggccctttgccccac

SEQ ID NO: 97835 - DNA, 34016 bp, Homo sapiens
gagataaatatatttatgtactgtcaatactactgccctaccacaattccaagtgttatattacagaagtcagagtcatactacagattattttgggagggaaacttttaaacaaaaaaaggcaaacactttagaaaagtctgaatcatcataaataaggatatttcatagtttaaaatatcttcttacttaaggcaagcatataaggtctttataaatttccaagtaacttatttattaaaagtattaaactatctcaccattctaaatcattcaaaccatgtatttatgaactggtaaaaagaatgccactctgtaagcagaaaccaccactgtttaataattctagaaaaatcattttttttaaaaaagctgaatgactttgagcttatatatttggcttacaaaaccctctttatacaactttgcaatgtaatcactatagcatacttcatgatgctgtcatggtaggcaacgatattagctttcgggtaaaactgcagtacactttccttggcaacctggaaaaataaacaacactgaattactacaatatttctgttcctatctgaaatctgcttctggaagccacaatgctgttatctacttacatagtaccttatttatattaaacaccaaagaagtccaaaaatgtgagaaaattgcattagggttaagctacacttataaaattatacttttatacttataaaataaccggagagccccccctgacccacgtaccaccaaacacacttctacatgaatggcaagcttcagcaaaaatacaacatgaagtaaccaagtgtcattcattcattcacttaacaagtatttactgagcatcttgcatgtaccaggaactatacaacgtacatgtcaagcaagagagacattaatcaaataacaatccagattaagttcaactacagactctgataaatgccatgagaatgacaggaaaaggccaggcatggtggctcatgcctgtaatcccagcacttgggaggccagtgtaggaggatcccttgaggccaggagttctaggctgcagtaagccatgaccgcatcactccactccagcctggggcgacagagtgagaccctatctctaaaaaaaaaaaaaaaaaaaaaaaagaaaagaaaatgataggaaaagtaaagtaaaggttgttatgagagaaaaaccaacctgacttagtctaaaaggtttaggaaagtactcctggaggaggaagccaaaatatgaaagaaaaagagaaacaagtgggggtttgccaaacaggttgggagacaggcaaagggaaaagatgttttaagactctgaatcaccaaggaacactaaaaaaactaaacaaagatcgggggaactgtcttgtttcaactaggacagcagcataacgctcctctagcccccaaacatagcagtagtcaacctctagggggtgtaggaacacaaggtgcatcctaagcaaagcatcagaaacttaaatataaagaggccatgaaagttacaccatcacgggattatttcctttttagaacaaaaaaggagggcttaatctttagtcctttacttgatatatctttatccttcacaatctctcagctgaaatgagagcttcacccattttttccctcctatatgacaggcaggattaatctggtatcacaaatagaagctccatcaagttatagaaatggtatgagaaatatagttacctgtgcctttgatcttccaacatgtttcttttgaaacaaaaactgtctgttgaggttgcttacatcaatagtatccagatcaatctacaaatgcataaaccccagataaatgacaaacgtttacgtatgtttgagctgtatcactactctcagcacctgtaatccagaacttttgatatctgctacattagtggagaaagcgtttttcgaatcgccataccaaaattgttaaactgataaagaataatttaatgcatgtaagaatctagatttaatgtcagagataaacttctcaaaaatactttgaaagaatggtatattttgtttgtttaatcatcctggaaaatatttcaggaaactccctggatgccataaaaatatgtgaattcattaaaactatatgtgctgtcgaggtaaacactaactgaaaatatattaacatatttctctacaccgggagtggtggctcatacctgtaatcccaacactttgggaggacaaagtgagagaatcgcttgagcccagaccttcaagaccagcctaagcaaaatagtgagaccctggtggctacaagaaatagaaaaaataaaattaggtggcacatgcctgtagtcacagctactcgggaggctgaggtggaggatcactggagcctgggaggcggaggttgcagtgagccgagatcgggccactgcactctagccagggtgacagggccagaccctgtctcaaaaaatactaaagtatttctctttcaatcgaattactctttcaagtacaaaatattaaatttaactatgccctgttctttttctttgttttttgagacagggtctccctctgttgcccaggctggagtgcagtggtgcaaacacagctcactgcagcctcgacctcccaggctcaagcgatcctcctgacacagcctcccgggtagctgggaccacaggcgcacaccaccacgccccgctaattttctttttttgtagagacggggtttctctatgttgcccaggttctgttctttttcttaaatgatacatggcaaacgtttattgaatttttgctgcctcccttaattcaagccttcatccatacacaatttcatttactattaacctgagaactgtgaaaggaaacttttacacatggttaaaaaagtatcatgttttaagttttatctaatttttgcttaaatatataatacataaaggaaagaaacaatgactcagtcggccacccgtacttttttgttcattccatgtttccactagcccttaagacactttaaactcacaccgaagggccagtaacatctccaatctctaaaaagtttgcattagtagaaataacgattcaaaatagcactggcttgtcaacgtacaccaatgcaaaaggcacagtcctaacgtctttaatgaaacaagcgagtgtaccgtctactgtgagagcaatgacagtcacgcagcctgcgggagccctgccactcgctccgtgacccagggtaagttactcaaccccattgcgtctccctttcctcatctgttaaaaataaagcagggtggaaatagcgtttgcactcctcgggtggtatgaagatggtgcgcgttccgtgtgtaaacccgctcgtgaccagcgctcgggacgcgttggtcgctatcattgccatcctccgccccgcgtcgttacttcggagttacgacagggacctcaaaattaaagtcacaacatccgcgagggactcaatcctctcccgcatctcctaacagccgggaatttgttttgaagggaggataagaggcggcttcacgcccacgaagcgccacacattggcgctgccggggaggcgggggcccgcggcctcctcggcgtccggagccggcccagcgagcggaggcccgccccgtgcccaaagaacagtctcctcccgcggggggggcacaacccgagcctctcagcctgcccccgctccgcaactccggtcccgggctccgggccctgagcctcagagcccctggagccccggaacccccgaatcccagcccccgcaccacagcccgccattcacgcgcgcgcgcccggccctcaccaggtcgatgtgggagaaaccggtgagcacgagattcttgaggagctcgcagccgatgccgcccgcccccaccaccagcacccggcccccggccaccgcctcagccagctcccggggcagcccccgcgacagtgccatggcgggacaaccacgagccgcggcggaggcggaggcgggagaaccgagccgcggccggaagcgggtgggggaagggcggcctggtttccgctcctgcgcactacagcctccggcagacacaggcagggcacatcgcgccggggtgtgctgcagcccgcggggaccggcaggctcttgcaaagggctggcgacctccagctgagaccggcggtgttattcccacaccagcataggcccgccatcagacctaaaaagtctaagggtcgccttctagcctggggtttcaactcccagccaagacttccttacaggttagaaaactgatgtccctatacgtaaagagctcttacaaattaacaagtgtcacccccaaaaaaatataggcaaaggatgtgaacaggaaactcacaaaaaattggacaatatgatcaataagcgtattaaaatgtaaaccataaaagaatcgcttgaaccctggaggtggaggttgcagtgaaccaagatcgcaccacttcactccaggctgggtaacagagcaagactccgtctcaaaaaagaaaaaaatgtaaaccatgcaaaatggtaagattttcacctgccgggcgcggtggcttacgcctgtaatcccagcactttgggaggccgaggcgggtggatcacgaggtcaggagttctgaaaccagcctgactaacatggtgaaacccccatctctactaaaaatacaaaaattagccgggcgtggtggcgtgcgcctgtaatcccagctactcgggaggctgaggcaggagaatcgtttgaacccaggaggcagaggttgcagtgagccgagatcgcgccactgcactccagcctgggcaacagactccgtctcaaaaaaacaaacaaacaaacaaacaaaaaaaaacaccgaaacagctgggggtggtggcacaagcctgtagccccagctactcaggaggctgaggcaggagaattgcttgaacccaggaggcggaggttgcaccactgcactccagcctgagcaatacagcgagactctgtctcaaaaaaaaaaaaaagtttttcacctactaaactggtagaaagaaaaaataagtaacacttatcaagggattgggaaacaagcactccaacacactccaggtaaagattccaaagcaaagcttctctagagggcgtggtggcttgcacctgtagtcccagctactcaggaggctgaggcaggaggatcacttaagcctgagaggtcgaggctgcagtgagctatgcccttaccactgcactccagcctgagagacagagcaagaccctgtctcgaaaaaaaagaaaaaaaaaccctaaaattgtgcacaacttttgactcattcattccaattctaggaaactgtcctgtagcagttatcattgatttaaaatatatataaatttagttacagggatggccatcatgggaataaaaattggaaaatacaagtggctaaaaattgtataaagcttttgatgtatatttaaaaaatagagcaattataaattatgttgtgggaaaaatattaatgggaaaatgctccaaatataatgttaaatgcaagaaacaagcccaccccatgatcacctaggcctcattatcctcatctacgtaggcagagcatgtctgaacatggctgggagtgtttttatactgctgttatggggctgaagggaaggggttgatcatgttaaaaataaagaaaggggaagactggaaggcagctggataaagggacagtctccagaacggagtaaagaccccttcctgggatactgcaggagcagaagatgggagtgggtgagggcggggacctgggctgatgaacatgggcaggtctaaacagccagggtcacagagcaaaaacctccagcagctagagcaggttcagtggcttgatcaggtgccagaaacagcataggaagcactggagtgcacgtgtcagaggtgtacacaagaggctgaccactgctcttggctctttcgctgctctcctcccccctagaatgcccaccagaacggctgtgcagacaacaccagccctctggactagagaggagctaccttcctagctgccactgtgacagctggccctggaccctggaagggcagaccaacccacagtcaggaggtcctggcccggccccggccccggcaccagcacccaaaggcaaaaaggcaactcagaaaaacagaggttaataacttgtgagttaaaataaggtacatacaaacatatttggatgtaaacatttgttttaatttatattaataaaaggaaatgctctacttaaacaataattcatctgggtcttcttgtataatacaaaattcttccatgggagtctgatgatttgggggccagcaactcttctcacatgtgtaaactagaattgttccaaattccacagaaagacctgaaaaataccacatattcaggcttccagcaaaaagagttatgagactgatgttactaaaaggaatgattttaccttataagctgaaaaagtaattaggtaaagcaaaaacagtgcttactgctttcagctataacagaatcacagtctatcctataataagtgaatattgataacaaaaaagcaaaattaatttaaagtggcaggaaaatatactttaaaaataaacaaaaatttcagcaagtgttcattataactgtctagctatctgatgttgaaaatctatattaatctacatggttcatgtgatatacatagcttttggctaggtgcggtggctcacaactgtgatccctgcactttgggaggccgacggggaaggacagcttgagcccagcctaggcaacatagtgagacacctgtctctacaaaaaacaaaacaaacaaacaaacaaacaaaatatatatatatctcatatagcctgggcaacacagtgagactttactaaaaaaaaaaaaattcactgggtgtaacggtgcacacctgtagtcccagctactcagaggagactaaggcagaaggatcacttgagcccaggagataaaggctgcaataagctatgattgcaccaccgtactctggcccgggtgatagagcgagaccctgtcttaaaaaaaaaaaaaaaaagaagagagaaatatatatcataggacacactactgccgagaaaggataaggattcaggcaaaaaatataaaataaaccctaagagtttacagaaaattatcaatgaataaagccattaaaaaaagataccaagaaaacataagcaataagaactcctgatattagaacagaaaagcaggagtcaagaggatgacgkaggcaatgatttgcagcagcaaaggagaaatacattgtttaaaaatgtatgcattggctgggcacagcacattggctcatgcttgtaatcccagcacattgggaggctgtggtatatggatcacctgaggtcaggagttcaagaccagcctggycaacatggtgaaaccccgtctctactaacaatacaaaaaattagctgggcgtggtggtaggcacctgtaatcccagctacttgggaggctgaggcaggagaattgcttgaacctgggaggcacaggttgcagtgagaagagattgtgccactgcactccagcctgggcaacagagtgagactctgtctcaaaaaaaaaaaaaaaaaaatgaaaaaatggcagagtttaactggtatatgacattcctctaggagcatctgactggtaagggaaaagcgcctcaagtgagcaagtctacaactccagtaaacacactgcgcatgcggcctctcccaagtgctggagggccactatgcatgtggacagcccaccccaagggaagaaacaagagaagtaacccaagacccrggaagtataaaaccccaagtcaaaggtcaaatggacacttgaatctctcaggttgcctgcttggccctcttccaactatatttacttcctttcgttcttgctctaaaactttttagtaagttttcactcctgctctaaaatttgcttcggtctctcctctgtcttatgtgcctcggtcaaattctttcttcggaggaggcaagarctgaggttgctacagacccctacagattcaccgctgctaacagtattgtggcaaaaatgttagtcacaaagggggaaaaaatcagaccaccctcatacctctacaaagctacattccatgcaaaagacatttctatatgagtgaaaaatctcagagactagaatgcccataagcccttccagaaaaatatatttcccagtgagactgaaccaccaagaaatgacaggaggcaccagggcaaagggctggcagggctttcactgtcagaagacaacacaggggtctatacaaggttctgaaaagagaaagtgggatttaaaaattttatacatgggttgcccctcaaatatgaagccacattaccatgcacaatctgaagcaagatacctctgagccctccttaaagctattacttgagaaaatccagctactgcaaaaagaatcaaaataaaacaggaataaaaaagctcactctaagagtggtgataaacactgaatccatttacacatagaactaaggctatccaaatagctgtgataattatgatactggccaggcgcggtggctcatgcctgtaaatcccagcactttgggaggtcgaggtggacggatcacttgaggtcaggagttcaagaccagccaacatggcgaaaccccgtctctattaaaaatacaacattagcagggcgtggtggtgggcgcctgtaatcccagctactcaagaggctgaggcaggagaatcgcttgaacctgggaggcagaggttgcaatgagccgagatagtgccactgtactccaggctgggcgacagagtgaggctccatctcaaaaaaaaaaaaaaaaaaaaagatactgggtccaggcacggtggctcatgcctataatccaagcactttgggatgccgaggcaggtcgggagcttgaggtcaggagtttgagaccagcctggccaacaacagtgaaacctgtttctaccaaaaatataaaaaattagctgggtgtggtggtgggcacctgtaatcccagctactcaggaggctgaggcaggagaatcacttgaacctgggaggcagaggttgcagtgagccgagatagcaccaytgcactccaacctgggtgaaactccgtctcaaaaaacaaaaaagatactgaaatatttcaaggtaggaatagggtataaatttccttatctactatggtaaggagccagatgcatactatctaaaactgaaacacagaaagaatgttattttctgttaatagcagaagcacctttcagaaacttgggcctcttaggtaaagaacctattaccaaaagtccaggccaggcgtggcagctcacgcctgtaatcccagcactttgggaggctgaggtgggcggatcacaaggtcaggagatcaacaccatcctggctaacacagtgaaaccccgtctctactaaaaatacaaaaaaaaattagctgggcttggttgcgggcgcctgtagtcccagctccttgggaggctgaggcaggagaatggcatgaacccgggaggcggagcttgcagtgagctgagattatgccactgcactccagcctgggcgacagagcaagactccgtctcaagaaaaaagaaggaaaaaaaaaaaaatccagtaactgcttcacttatacttaacattccttctgttaatttgtacaaaaatttgttctaagacttttaattaccatattagtgaattttcctattttaggaaaattattttcgtctagccatccatacattcatctgacttgctatttgtctttatgtcaaaaatgattgttggaataatggttattaacattgataatagttttaatttctggccaggcatggttcatgcttgtaatcactttgggaggccaaggcgggaggatcgcttgagtctaggagttcgagaccagcctgggcaacatgacgcaaccttgtctctacaaaaaatacaaaaattccatcctggccaacacagtgaaaccctatcactactaaaaatacaaaaactagccgggcgtggtggcgggcacctgtaatcccagctactagggaggctgagggaggggaattgctagaccccgggagctggaggttgcagtgagccaagaacgtgccactgcactccagcctgggcgacagagagagactccatctcaataaataaatcaatcaataaatattaaaaaaaaaaaaaaaagactggctggattataaatttctttttttttttttgagacagagtctcctcactctgtcgccaggctggagtagagtggtgcgatcttggctcactgcaacctctacctcctgggttcaagcgattccctgcctcaacctcccaaggagctgggactacaggcacgtgccaccacgcccagctaattttttatattatagtagagacagggtttcaccacattggccaggatggcctcgatctcctgaccttgtgatccacccgccttggcctcccaaagtgctgggattacaggcatgagccaccacacctggcctaaatttcttaaaataattttttaattcccaaattttctgtaatttgcttatgatattttataagtaaacaaaaggtttttcatttatttaaaaataatgccagaaatccacaaactcaaattaataaagggcttctcacctaaattagcactcttgagcatgctgaccagtgctggcataagctgaaactcaaatatcctttggcctccacactggctgcaggctgggagctcggtgacttctgatgtagggcaggtcaaaaagagtggctctccactccaggaatacctaggacaaggaaacaaagaaccccraatcagagccacacaagtcgcattctagcatctaaggccatgctttgcaacctttctttgtttcttgcagaaatctcccagaggcccaaaaacctagcaccatggctgtaaagcatagcaagatatctggaaatcttgtcagtgttcgattcaaagtctcaaaggcactaaagycaatgttcaacygaatctaggtaaagctgcaacaaagtccagactcagctccactgcagattaaatggaatcagccctccacatcactggccttacagaggaaagggcatgccttagagaagaagtccccaacccccaggccatggacccccaggccatggaccagtactggttggtagcctattaggaatagggccatgcagcaggaggtgagcaacagccaagcgagcattaccacctgatctccacctcccgtygtatcagcagcattagattctcataggagcgcaaatcctattgtgaactgcacatgcaagggatctaggttgtgtgctccttctgagaatctaaagccttatgatctgaggtgaacagtttcatcccaaaaccatgccccacatcccccacctcagtctgtgaaaaaattgccttccatgaaccagtccctgatgccaaaaaggttggggacctctgccttagagggaggaaacattcacttcagtttttgggtttgtttttttttttttagataaagcctttttctgttgcccaggctggagtgcagtggcacaatcacagctcactgcagccttgaccccctgggctcaagcaatcctcttacctcagcctcctgagtagctgggaacacagaggcgcatcaccatacccagctagtttttaaaaaaaaaatttgtagagacagggtcttgctataatgcccagactggtctcaaactcctggcctcaagtgatcctcccacctcagcctcccaaagtgctgtgattacaggtgtgagccaccacatccagctcacttcaatattactgttgttcgatatgtaatttctggtaaatcattttaaaagttactaaacatgcaaagaagcaggaaaatttaccccataaagaaagttaatgcaaggagacccatggacaagatgataaatttatcagacaaaaactttaaaataccagtaatgaatatgtaaaaaaaaaaaaccaaaaaaaaaacctagtggacaaggtaggccgggtaccgtggctcaggcctgtaatctcagcactttgggaggctgaggcgggtgaatcactcgaggacaggagttcgagatcagcttggccaacatggtgaaaccccatctccactaaaactacaaaaattagccgggcgtagtggcaggtgcctgtaatcccagctgtgggggaggctgasgccgcggctgcagaatcgcttaaacctgggaggcagaggttgcartgaactgagattgctccactgcactccagcctggatgatagagcaagaytctgtctcgaataataataataatacaaaaattagccagacatagtgtaataatacaaaaattagccagacatagtggtgcacgcctgtggtcccagctactttggagagtgtggcaggaggatcacttgagctcaggagtctgaggctgcggtgagccatgactgcaccactgcattccagcctacgcaagcaacagaacaagacccaatctcttaaaaaaaaaaaaaaaaaaaaagcaacataaagagttaaaaataaaagacaaaaaaggaacaaaatagtaaactaaaaatactcaaagtcactgacaagcaggttaaataaaaggaatacagagacaaaaacaaaaaaaccccaccaaatggaaagtcaggtgtggtgacagatgcctataaccctagcactttgagaagctgagaggctgaggtgagggaactgcttgagtccaggagttcaagaccagcctaggccacatagtgagacacccatctctttaaaaaaaaaaaaaaggaaatggaggaaaaaacaataacagaataaaattaacccaacatggtggggtgcggtggctcatgcctgtaatcccagcattttgggaggccaaggcaggcgggtcacctgaggtcaaaagtttgataccagcctggccaacatagcgaaacctgtctctactacaaaaaattagccaggcatggtggtgcgcaccagtaatcccagctactcaggaggctgaggcaggagaatcgttgaacctgggaggcagaggttgcagtgagccaagatcgtgccactgcactccagcctgggcaacagagcaagactccgtctcaagaaaaaaaaaacaaaaaacaaaaaacaattaacccaacaataccaatgattacattaaagggactgcatattccgtgttaaaaaaaccataactgttaagttgaacttgatcaaaatttaaagccatctgtcagaatctgtttgagtgctaaaaaaaattaaattgaaaaaggacttgtactcttgaccatatgaagaattcctacaactcagtaacacaaacaatatggtgagagatttgaatgacacattatccaagatgatatacagagatggaaaacaagcacttgaaatgatgctcaacatcatttgccatttggggaaatgcaaattaaagccacaataaaatgccactacacaccttcttaaatggctaaaattaaaaactgaacatcccaagcattagcaaagatatacaggaagtagaattcttaaaaactgctagtgggaatagaaatggcataaccactttggaaaactggcctgtttcttaacaagttaaacatgcatatcccatataatacaaccgttctattcctaggtatctacccccccaaaatcagaacatgtcttacaaagagatgtaaacaaatgttcacagcagctttatttataatagccaaacactggaaataacccaaatatccatcaactggtaaatgtatagtggcacatccatacaatggaatacgacacagcggtcaaaaggaatgaactattgatacatgcaataagaatgaatcttgaagtattctaagtgaataaaaccagaccaaaaaaaaaaagtatatcccatatgaccttatatactttcacaggaaatgcactaaggtgcaacagaaagatgattggcggttgcctggggactaggggagcagcacaggacagggtaggcaagaacttgcgaagaagtatgaggaaactcctggcagagaggaatatgtttactgtcttgactgttgtgatttcaggggtgtatatggatgtcaacttatcaaagtgcacactgtaaaaatatacgcagtctgttgtatgtcaattgtatctcaataaagctgctgaaaaataaatgtaaacagacacacttcactacagaagatacacagatgtcaaatgagtatatggaaagatgcacaacatcatttgttattaggaaaatgcaaattcaaaccacaaggaaataccaccaccaccacctactagaatggctacatttaaaagactgacgatatttttaaaaccaccaccaggctaggtttctcaatgtcaactattcttatactccctgtattttagtatttgcatatttagttcttatttcattaaggaaaaattcccaattttatctttgaatagtttctgatccatctattgcgttctctattttggacaccaattctcctcatagtaaatatatttatcaacccttcaaagataccatcttctctctgaatgctttctctttttcttctgcattcactggattagctcaagtctttcctctataccagtactttgatctttagccaagtctattatgttccttaactttttttttctttttttttttgagacaaagccttgctctctcgcccaggctggagtgcaatggcgcagtctcggtcgactgcaacctccgcctgccaggttcaagcaattcttctgcctcagcctcccgaatagctgggactacaggcacccgccaccacacccagctaatttttgtatttttagtagagacagggtttcaccatattggccaggctgatctggaactcctgactttgtgatctgcctgccttggcctcccaaagtgctgggattacaggcttaagccaccacacccggccagtgttccttatattctatatgtattagatatgtaatgtcatggggcttggtttctttagcaattcaatttccgattcatacatagttactttattttctcacctttgagctcttgttttatggaatccattcttatgaagttcttatacattttgaagcatctgctgggactgatgtgctccttggattatattttattttattttattttttgagacagagtctcactctgtcacccaggctggagtgcagtggcacgatctcggctgattgcaacctccacctcccaggttcaagcgattctcctgccttagtctcctgaacagctgggactataggcacccaccaccacgcccggctaatttttgtatttttagtagagacagggtttcaccatgttggctggaatggtctcgatctactgacctcgtgatccacccgcctcggcctcccaaagtgttgggattactggcgtgagccaccgagtccagctggattatattttctggcagacttggttcttgagccttttctatgttctcttcatttccttaactgttcttgccacagtatgattacctgggtggcatgctatttttcatctagctcacacctaaagggggcaactcagttaagaccatctatttgctctgaaatgtctgcagaggttctcattgatttcctgtccatctcatatgaggcctgttttcctctctctaagagtactgtccatttcctctacatttctgtaggtggtaaaagaggaaactggggtgaggagatagttcttctgggactggatgcaatctttattagaatacctgggctttgctttttcctctgagacagtgtaaaatgctgtatgttgagaaagatcccactcgaatggaggcgaaattgcycttaactttccaatcattgctctgactcatggaacaaaggaatgttgcttctgagaggcaatccccgtcctttcctacaccacctccccaccacacccagttcttcagccaacagctgggtccaccatcctccacattaggagatgcaaactctcctcctgtgtgcttccttccagacataatattattaactgaaaattcttaggccgggcatggtggctcacacctgccatcccagcactttcagaggctgaggtgggtggatcaccagaagtcgggagttcgagaccatcctggccaacatggtgaaacctcatctctaataaaaatacaaaaattagccgggtatgttggcacatgcctgtagtcccagctactcaggaggctgagacaggagaattgcttgaacccagaaaatggaggttgcagtgagctgagatcgtaccattgctctccagcctgggggacagagacagattccgtttccgaaaaaagaaaattctttgtggactcatcagtatattttaggcaggtgagagaaaaggcctgtggaattagaacttgcacttaaccatgccggaaatttctgtacctttctctgcaaagataacttagttacataagtgaataaatatatatgttaaacactcaagaactctactagacatttatggatattatatcctgggctatcactttgagttttatggtactaagcccttttcctttgttcagtgctgatacaagggaatttcttttttaatatttattttatttggcctgatttttagcttttagattcactgtggtaggtatcggggaaaaagaccatttgagctaattctgcccactttgtctggacctgtttttactatgtggctatttttataaattatacctgctgggtatgtcatttcctctgaggcctttctgatagcctacctaaaatagctctattttttcctcatttatcacttatgggaatcatacaggtttgtttttaatctcccccactagtcacagtggctcaagcctgtaactccagcactttgggaggctgaagcgggcasatcatttgaagtcaggagttcgataccagcctgaccaacatggtaaaactccgtctccactaaaaatacaaaaagtagtcaggcgtggtggcgctgtaatcctagatactcgggaggctgaggcaggagactcttaaacttgggaggcggagattgcagtgagccaggatcacgtcactgcactccagcctgggtggcagggcgagactccatcccagaaaaataaaaataaattaaaaaataaaaataaatatatgggccaagggtcgtggctgatgccggtaatcccatcactttggaaggccgtggcaggaggatcacttgaggccaggagtttgagagcagactgggcaacatgatcagatcccatctctacaaaatacattttttaaaaattagccaaacatggtggcacactcctgtagttctagctacttgggaggatcgattgagcccaagaggtagttgttacagtgagcaatgatcacgccactgcactccagggtggacaacagactgagaccctctctctaaaaaaatatttttttaataataataatagtccaggcacagtggctcatgcctgtaatcctagaacaaactctgggaagccaaggcaggtggatggcttgaacccagaagtttggaaccagcctggccaacatggtgaaataccatttctaaaaaaatatacaaaaattagttgggcatggtggtacatgcctgtagtcccagctacttgggaggctgaagtgggaggatcacttgagcccaggaggtcaaggtgcactgagctatgattgatcacaccactgcactccagcctgagcaacagagcaagaccctgcccccaaaaaaaaaaaaaaaaaaaaaaaaaaaagccaggcatggtggctcacacttgtatctcagaactttgggaggctgaggtgggcagattacgtgaggccagcagttcgagaccagtctggccaacatggtgaaaccccatctctactaaaatacaaaaaaatcagctgggcagggtggcgggcacctgtaatcccagctacttgggaggctgaggcaggagaatggcttaaacccaagaggtggaggttgcattgagccaagatcacgccactacactccagcctgggcgacagagcgcgactccctctcaaagaaaaaaaaaaattaaataataataataataaaggctatgagaacatggacttcatctgtgccgtttcttgctatatctgcagcacctacaaataccagcaactggcatgcagaatagacttcgtaagtatttgttagacaartgagtgcactttaccttactgaatcctcctacacatcctataaagtaggtattaggtcctataaagcaggtattaggttctctcttggtttggggaatactgtaggttttgcttttctcatattttcctgtgttttccaaackaatatgtattcctttataatcaaggaaaacaataaaaggaactgtgcctttytttacctcaaaatctgctcctgacaagcagcaattcgcttcatgaatttgtaaaacgtctgatctccacttttaattatggtcttctcatatttttcatcaccatcattaggaaggctaaaaacagaagcagaaaacacttttgaatgtctatatccagaaaattacagcatttgcaagacaaaacaagataattttcttttaaaaaattttatcaggscaggcgcagtggctcacgcctgtaatctcagcactttgggaggccgaggcaggcagatcacaaggtcaggagatcgagaccatcctggccaacatggtgaaaccccatctctactaaaaaatgcaaaaaattggctgggcatggtggcttgcgcctatagtcccagctactcagcaggctgaggcagaggaaatcgcttgaacccgggaagcggaagttgcagtgagccgagatcgtgccatgccactacactccagcctggtgacagaatgagactccatctcaaaaaaaaaaaaaaaaaaaaatcaatcacgcctttaatcccagcactttgggaggccgaggtgagcagatcacctgaggtcaggagcttgaaaccagcctggccaacatcttgaaaccccatctctaataaaagtacaaaaaattagccaggcgtggtggcgggcgcctgtaatcccagctccttgggaggctgaggcaggagaatcacttgaacccaggagatggaggttgcagtgagccaagattgcgctattgcactccagcctgggcaagaagagtgaaactccgtctcaaaaaaaaatttctcaggccggtgcagtgggctcacgcctgtaatcccagcactttgggaggccgaggcaggcggatcacttgagctcaggagttcaaaaccatcctgggcaatctggcagaaccttgtctctacaaaaaaatacaaaaattagctgggcatggtggcatgcacctgtggtcccggctattccagaggcaaggctgtggtgagccgtgagcacaccattgcactacagcctggataacagtgtgagaccctgtctcaaaaagaaaaaaaaaaaaaaactgtcaaagttaaaaaactgtaaaactgtcaagtaattttttttttttttttgagagggagtctccctctgtcacccaggctggagtgcaatggtgcaatcttggctcactgcaacctccacctcctgggttcaagcaattctcctgcctcagcctcctgagtagctgggattgcaagtgtgcgccaacacgtccagctaatttttgtatttttagtaaagacaaggtttcaccacgtcggccaggctggtctccaactcctgacctcaagtgatccatctcggcctcccaaagtgctggaattataggagtgagccaccgcactcagccaaaaactgtcaagtaaatatttttgatatttaaattgtgtacatgtagctctgcagttccctgcccaacccttctcccaagccattttcaactcttgagtaattatttacaatttaaaaagtcgcagggcacagtggctcacacctgtaatctcaacactttggaaggccgaggcaggtggatcacgaggtcaaaagatcgagaccatcctggccaacatggtgaaaccctgtctctactaaaaatacaaaaattagctgggcatgrtggtatgcacttgtaatcctagctattcaggaggctaagggaggagaattgcttaaacctgggaggtggaggttgcaatgagctgagattgagccactgtactccagcctggcaacagagcgagattctgtctcaaatatatatattttcatatatattttttaatatatatattttattatttattttawatatatatatatatatatatgtatttttcatctgggtgcggtggctcacgcctgcaatcccagcactttgggaggccaaggagagtgggtcacttgaggttaggagtttgagaccagcctggccaacatggtgaagccccatctctactaaaaatacaaaaattaaccgggtgtggtggcgggtacctgtaatcccagctacttgggaggctgaggcaggaggatcatttgaaactgggagctggaggttgcagtgagccattatcacaccgctgtactccagcctgggtgacaaagtgagactctgtctcaaaaaaaccaaaaatttttttaattagctgagtttggtggcacacacctgtagtcccagctatggggaaagctgaggccagaggatcccctgaggccaggagtttgaggctgcagtaaaccatgagcaggctgggcgtggtggctaatacctgtaatcccggcactttgggaggtcgaggtgggcggatcacgtggggccagaactccaagaagagcccggccagtatggcaaaagcccatctctactaaaaagaaaatacaaaaattagctgggtgaagtggcgcacgcctatggtcccagctactcgggaggctgagacatgagagctgcttaagccggcgagggagaggttgcagtgagccgagaacgtgccactgcactccaacctgggcaacagagcaagactgtctcaaaaaaaaaaaaaaaaggccataaccacaccacaccactgcagttcagcctgggaaacaaagcaagatcccatctctaaaaaaaaaaaaaaaaaaaagaagaatactctagtctgaagaaacccaccaaaaataagcaaatacataaaaacttaagaaattaaaaaataaaaaatcctgccrggcgcggtggctcacacctgtaatcccggcactttgggaggccaaggcaggtggatcacgaggtcaagagattgagactatcctggtcaacatggtgaaaccccgtctctactaataatacaaaaattagctgggtgtggtggcgcgcacctgtagtcccagctacttgggaggctgaggcaagaaaattgcttgaacccaggaaggggaggttgcagtgagccgagatcgcaccactgcactccagcctggcaagagagcccatatcacacacacacaaaataaataaataaataaataaataaataaataaataaataaatataaaataaaaagtccttataaccatcaattctattaaggattattttcaaacaccaacatgtcttcatgcattccccttcatcattattctgaaaaagcctacaaatgaaacagttctggtaaagaaccaggccatttctccaaatattctattgtaatttttttattctaatagtaaaaaatgctgggtgcagtggctaaaacaaatttttaggccaggcacaatggctcacgcctgtaatcccagcactttgggaggctgaggtgggtggatcacctgaggtcaggagttcgagaccagcctgaccaacatagtgaaaccccatctctactaaaaatacaaaaattagctgggcatggtggcacatggctataatcccagctacttgggaggctgaggtaggagaactgcttaaacctgagaggtggaggttgcagtgagccgagatcgtgccattgcactccagcctgggtaacaacagcgaaactcaaaaaattttaattggtcagacatggtggtgtgcacctgtactcccagctacttgggaaactaagatagattgcctgagcccaggagttcaaggctgcatgagctttgatcacaccaattcactccagcgtgggtgacagagtgagaccctgtctctctcagtcaatcaataagcaaaaatgatcattcttacctctttagagagctttggtttataaagcctttcaagatctaccctctcgcttaactctcaaaaaatcatgggatgaaacagagaacagagatatcaccatcactctcattttacagaattgaggatctgaaagcatctctgaggtcctgggccagttctggagccacagccaagagtcaataaacaaatggcgtttttcttttcctttttccattttttcaccccaatcttattatcccagatcaaatggtagttttctaacttgcctgtctctgctataaagacatattagaaayataaaagaaaatttaagagtcagtgaacgcgtcttctataaatacttgccatctctaacttctgtttgttcatcttcactttcttaacggcaattataaatagagcagggttttcaagctaactcaagttggctgataaggaagtgaagcaaaaaggtcctacatacaagttctgcctgaaagtttccccaggtcctgtggtgaaactgaagggtaactcttgtggctgcttcccaatccagtcacctctcaacctcagcagcacacatcctcacctttgggaaagcaactgatccatggcaatgccttctctctgctgatagtccctcaraaggctgtgggcatgatccaggttgacaaagtccctgtaatcatcctcatctgcaacacagatgtagtagggcaggaagagyggcagcccaggaggcacaggatgggcagcacccaggacagcatcctgcaggcggaggtcttggagccragcagtccagtctacgtctttggcactgctggcatcattcccaaaatccaaggtaaactgtggtgaaggcccctcctcagtatcacttccccagtcatcagcaccttcacaccagtcctcagctgcaaggctgtttccctgtttctggaaaaatactcagtgaatgaggtccgagcacatttgggaggtttattctaatccttcggctccagccacccaccgccgcgccttccagagggagccttcacaccatccccttcccctctggtacactccaatcaaactttctagaccctatgtactcaaaagcacgttggaggtgacttaaaatacttgtctttcctttttggggtgagtgtgacagatatagtacaggggttattcaaccatccgttccaatatctttctgttgtgcttcatgtattgcaggaactgaaaagaaagaactacctttcccagaccccttagcagctagggtttcagatatgattaggggtctgctaatcaggtctactagagagaaacatgaacttgagacagagtgaagtagaaagaaagaccacatagcaaaaggtagccattgtgtagacacagacagaacaaggctttggagccaacggttcggtggcaaagacagcctctagttcaccagatcacacctaagcttcctgacagcaggagaggtggcatagcagctccttcacggccagttctgaggtgtgattctggagggcattcctggagcctcctccttcagcctatccacttactaaaaacctcactcctgtgttaagtctgtctcagcttaaaagccaggcatggtggcacgtgcccgtaatccagctactcaggaggctgaggcaggagaatcgcttgaacccgggaggcggaggttgcagtgagccaagatcacaccactgcactccagcctgggtgacagagcgacactcggtctcaaaaaaaaaaagaaaaagcaacagcacttttctaattatctgcacctgaaccctgacaaatataggcaaacaccactgtcttcaactttttatttaagtactgctaatactatgcctagcaaacatcaagaactgggtgcaggccgggcccagtgtctcacgcctgtaatcccagcattttgggaggttgaggtgggcggactgtttgagtccaggagttcaagaacagcctgggcaacatgacaaaatcccatctatacaaaaaatatgaaaatcagctgggcatggtggcacgtgcctgtaatcccatctactcaggaggctgacgtgggagaatggcttgggcccaagaggcagagatcatgccactgcactccagcctgggtgaccagaatgcaaccccatctcaaaaaacaaacaaacaaacaaacaaactcagtgtatatataaagacacatttacagtcaaagggaggctaaattgtgttctgcagctaccaacttgcctgccttttcaataaattcagatttcatcttatgaaatgtgttaatacatatatagctctcataaagtatatttactataaagacacgtatacattatcacatacaaccacatatatgtacacacccatatatattcccaaacaggaaaatcagtaaactgtgtgtctcaagaccttcagtgtaagtttaaaaaaactactatatatacaatggaatatttttcacccttaaaaaaaaaaaggaaattctgtcatttgtgacaacatggatggaactggagaacattttgctaagggaaataagccagacacaaagacaaatgctgcatgtattcacttatatgtggaatctaaaacaacctcaaagaartagagagtagagtggtggttaaagaaatctggagtggccaggtgtggtggctcacgcctgtaatcccagcacctcaggaagccaaggcgggtggatcacgaggtaaagagatcgacaccatcctggctacacggtgaaaccccatctctactaaaaatacaaaaattagctgggcatggtggtgtgtgcctgtagtcccaggtactcaggaggctgaggcaggagaattgctcgaacctgggaggcggaggctgcagtgagccaagattgtgctactgcactccggcctggcaacaaagcgaaactccatctcaaagaaaraaaaaaatctggagtgagccgggcatggtggctcacgcctgtaatcccagcactttgggaggccgaggcgggtgggttgcctgaggtcaggagttcaagaccagcctggccaacatggtgaaaccctttctctactaaaaatataaaaattagctgggcgtggtggcgagtgcctgtaatcccagctactagggaggctgaggcaggcaggataagcgcttgcatccgggaggtggaggttgcagtgagctgagattgtgccattgcactccagcatgggcaayaagagcgaaactcggtctcaaaaaaaaaaaaaaaaaaaaaaaggaagaaagaaacctggagcgggaagaataaggagatgacggtcaaagaatacaaaacctcagttattcaggaggaatgtgggttttttttaagttctactgcacagcatgaatatagttaataatagagtattgtggctgggcacaggggctcaagcctgtaatcccagcactttgggaggccgaggtgggtggatgacaaggtcacgagatcaataccatcctggctaacatggtgaaaccctgtctctactaaaaatttaaaaaaatgaaaaaattagctggccgtggtggcgggcgcctgtggtcccagctactctggaggctgaggcagaatggtgtgaacccaggaggtggagcttgcagtgagcagagacggcgccactgcactccagcctgggcaacagagcaagactccgtctcaaaaaaaaaaaaaaataagagtattgtgtatctccaaattgctagaggaaatttcaaatgttctcacaagatgttaagtatttgaggtgatgaatgcattaactagcttcatttaattattccacatgatattcatgaatcatagccatcactttatacctcataaatttatacattattataaactgtcaatttacagttaaaaaaaaaagttgaagaaatccaggaggaagtctccatctcccttttgtttttttggcaggggacagggtctggctttgtggcccaggccggagtgcagtggcacaagtgtaggtcactgcagcctcaacctcctagactcaagcaatcctcctacctcagcctcctgagtagctggcactacagttgcgtggccatcatgcctggctaatttgtttactttttatagagacgatgttttgctatgttgcccagactgctctcccaacgttttttttttcttttgttttgttttgttttgtttttacggagtctgtcacccacgctggagtgcagtggcatgatctcagctcactgcaatctctgtctcccgggttcaagcgattctcctgcctcaacctcccttgtagctgggattacaggtgtctgccaccatgcccggctaattttttgtttttgtttttaatagagacggggtttcgccatgttggccaggctggtctcgaacttctgacctcaggagatccgcccgcctcggcctcccaaagtgctgggattacaggcgtaagccaccgcgcccagcctggtctccaacttctgagctcaagcaatcctcccacttcagcctctcaaaaaacggtgggatcacaggcgtgagccaccatgctgggcctccatctccttttaacaaaggagttagaaaataaaaataaagtaaaatagaagaaaaaaaaaactctcacaaaaccttaagaaaggccgggcgcggtggctcatgcctgtaatcccagcactttgggaggccgaggcgggtggatcacctgaggtcggcagttcgagaccagcctgaccaccatggcgaaaccccgtctctattaaaaatacaaaattagccgggcgtggtggcatatgcctgtaatcccagctactagggaggctgaggcaggagaatcgcttgaacctgggaggcggaggttgcggtgagccgagatcgcgccattgcactccagcctgggcgacagagcgaaactccgtctcaaaaaaaaaaaaaaaaaaaaaactttacgaaaatagcattttatggttcttcagaaaagcaaaaaacactccagtgtacttcaaagaacacggctttaaagtctgccccaaactattctctggaaaatatcctcaaatgacagaaaaacaataacatgccaatcacaacctttacctgagcgtcctgcgcctctctctctggcacctgcaggcactgggagcggaacaccttccagcttcggggtgaagacaaagggccgtgagggctgcaccccgactccrgcccgccggcccgccccagcccgctggaaaggacacccctrgagcagctctgggacttccccgcctacctgcgcgcaccgccggtgctacagccggggcaggcgcacgcgaacacgtgcagcagacggtgaaacggggagccttccagcgggcaatacacctgcacgaccagagcgagcggctgcccgcagcgctgacacacgggcctgggcgcagccacggtgggcagagcatcctgaggggacagaggaggcgctcagaccccgactccccccaggacctcgcccactccctccgcacccttcagcagcacccatcgaccccagctccggcacccgccctcaccggaatgccgcccagcttgctagcagtccaggcacccggccctgtggggctgccgtgcaccrgcgcatctcgaaggcccagcagcaccggcttcagaacggccgccatggccgccgggcgaccaggtgaaaacgcaaactacggcggcctctctgcgcacgcgcaacgctacgctaaaatgataaccccgctcccttactaggatccgatgcggaggcgtggctttaaggcgcgtgcgctcaggtcccagagccacagaggcgccgctggcgtcaggggctcgaaatcccggagtcccaggcattatgtgccccttaatgcgctgtgataggaagtacacaccatctactaggaagtagttttgccaaaaagctaactttcttttttcctttttttcctgagacgaggacttgctatattgcccacactggtcttgaactcctgggttcaagcgatcctcccgcctccgcctcccaaagtgttgcgattacaggtgtgagccaccagaaaaaagccttcccggaaaataaaaattttaggtgggataatggtattatcagtcattaacaagaacaataaagttttttaaaaagttaaagtttttaatttttagagaaacacatcaaaatgcttatagatgaaatacctccgatttgctactacataattaaggtggtggggtgtaaatacagtaagattgaccatgagttgataattgttgaaatttggtgccaggcacatggagatttattctatttgggttttatatgtttgagatttttcagtttttatttttgttttgttttgttttgtttttgagacagagtcttgctgggtcgcccaggctgaagtgcagtggcgccatctcactgcatctcagcctcccaggttcaagtgattctcctgcctcagccccacccagtagctggggttacagacgcccaccaccacgcccggcgcccggctttttttttttttttttttttagacggagtttcgctcttgtcgcccaggctggagtgcactggcgtgatcccagctcactgcaacctctgcctcccaggttcaagcgattcttctgccttagcctcccgagtagctgagattacaggcatgtgccaccatgcctggctaattttgtatttttaatagagatggggtttctccatgttggtcaggctggtctcgaactcccaacctcaggtgatccgcccaccttggcctcccaaagtgctgggattacaggcgtgagccaccatgcccggccttttttgtatttttagtagagacggggtttcaccatgttggccaggctggtttcgagctcctgaaatcaagtgatctgcccacctcggcctcccaaagtgttagtattacaggtgtgagccaccgcgcccagccacacaatacagttttttcaattcctgcagcacaacatgggtgaatttcaaaagcatcatgggaagaagccagacacaaaaggcgccattctggtaaacgcagaacttcggagggaaaaaaatcagttcaatggtagtcaggagttgggatgagggagtaggactggaccacaagtgtcaggaacttttgagggtgaggaaaatgctgtatatctcatctgtaatggttctaagactgtatatacacttgtgaaaactcataactgtataccaaagaaaggtgaatcttactatatgtaaatcacaccccaataaacctgactttttaaaaatgcaggctgcaaaaacattattttaggattcataacgtggtatgcaaaagaaatgaatgttttcaaggatttacacctcaaaggaggaagcaccagcctttgtgaggtttggctctagcccagcaaggatctggagatgaaacccatttactcctttttttaccacacttcatcctgatagctttaaaaggccctgtgatgctgggcacagtggcttgcgcctgtaatcccaacactttcggaggccaaggcaggaggatctcttaagcccaggagttgaagataagcctgggcaacacagtagtattaccaggggaggatcttgactacaagtcgtccaggttcttggaatattgaacaaagaggtggacaaaacacacaaagcaacaaaagaaggaacaaaagcacagatttattgaagcaaaagtacattccagaaagcgggatgaggctcaagcaagtgccctgtgtagaaaatctggggtttaagtaccctttagaggtttcctatttggttacaccctatgtaaataaagacttggcctgccaccagtcagaggctgaagtgaatgctcctttgtctccagaccctattctctggcctcagtgggatcctatcactacaaaaatttattttttatttttcttatttttttttttttacaacagtacactgatctacaaaaattttaaaatgagccgggcgcggtgactcacgcctgtaatcccagcactttgggaggccaaagcaggcggatcatgaggtcaggagatcaagaccatcctggctaacacggtgaaaccccgtctctactaaaaatacaaaaaattagccgggtgtggtggcgggcacctgtagtcccagctactcgggaggctgaggcaggagaatggcgtgaagccgggaggtggagcttgcagtgagccgagatcacaccactgcactccagcctgggcaacaaagcaagactctcaaaaaagaaaaaaatttttttttaaatgagctgggtgtactggcatgcatctgcggacccagctacttggaaggctgaggtgagaagatcaccttagcctgggaatttgaggcttcagtcagctatgattgtatcactgcagtccagcctgggcaacaaagaccctgtctctaagaaaaaaaaattttgaataggctgggtgtggcggctcacgcctgtaatcccagcactgtgggaggctgaggtgggagatctcttgagccctggaattcaagaccagtctagtctgggaaacacagcaagacccgccttgctgggcgcggtggctcacgcctgtaatcccagcactttgggaggctgaggcgggcggatcacgaggtcaggagatcgagaccatcctgactaacacagtgagacactgtctctgctaaaaaaatatataaaaaattagccgggcatggtggcaggtgcctgtactcccagctacacaggagtctgaggcaggagaatggcgtgaacctgggaggcggagcttgcaatgagctgagaccgtgctactgcactccagcttgggcgacagagcgagactccgtctcaaaaaaaaaaaagacccgtctctctacaaaaaatgaaaaaactagcagggcatagtggtacaacctgtagtctcaactacttgggaggctgaggcaagaggattactggctgcagtgagctgtgatcatgccactgcactccagtctgggcaatggaacaagaccctgtctcaaaaaaaaaaaaaagttgtcaaaaaaaaaaaaaaaatgggccgggcgtggtggctcatacctgtaatcccagcactgtgggaggctgaggcgggcagatcacctgaggtcaggagttcaagaccagcctgcccaacatggtaaaaccccttcactactaaaaatacaaaaattagctgggtatggtggtgtgcgccgtgtaatcccagctactcgggaggctgaggcaggagaatagcttgaacccgggaggcggaggttgcagtgagccgagattgcaccactgcactccagtctgggtgacagagcgagactcaaaaaaaaaaaattccagttttcaatatctgccttttaaagcaaaagaactacctgagcgtcttgccaggagatggcagtcatcctcggtcttgtccaggaattcacccgaaacaaacataatctcaatgcagtttttagaaccatcgagtgaacagagtatccaatttctccagtcacagaggtgaggagtggaaaacagtcttgggatttggtgacacaggccaagttgccgtcctgactgattgtgcccccaccccactattgtcttctcagggcaccttgctccactctagacccgctcaccacttagtgttaagtgtccgcagaggcacagcctgcgtcctgctgagcgctcctgccctctgctacataaagcaccatcacaggaaaaaaaaaatcagaggctgagcctacaacctcctccgtggcatctttatttttctacatgggatgtgaacaacgtgaacatgggtcagaaaagtcagctgcacaaaaacacttcagccaattctaacacagagggagcatagacatggaggggctgggggttaggctgggggagaccagccttccctgctaagggctcgtggtccaagcccacaaccagagggtgctctgggtggtgtccaggaacatgcagtgccggctccggggaggagggacgagaagagaaaggggagtcacagaggaggctgcagatgagcacgagtttattggactctggcctcgcgctgctgcttgatgaagttgatgagcccattggtagaagcgtcgtgagaggtcacttgagcactgccatcaagctcaggctctattttcttagccagctgctttcccagctccactctgccaagaagggaagggaagggaagagtggtatgaggaaggctctaacgttgctactgaaatccctgagccgacacaaaggtattcccggccctcccctaagtgagcaactcacccccactggtcaaagctgttgatgtcccagatgatgccctgaacgaagatcttgtgctcatacatggctgcagaagtgacagacagggcacatcagggctccacaagcccattccaacctaccccaagccaggacctttcccctactcactcaccgaccaaggctccaagcatgaatggtgtgagcttggtgaacacaatagagttggttgggcgatttccttcaaagacctgcagaaaacaccaaggaatgtctccaagagagtcctgatccctaaaccccttgaagggaagcacaccctgccccagaggctgagacgtgcaggtctgtgaggacaggccctcccattctgtaggacaagccaggcacgccccaagcccctgcctggtgccatagcttcacacctccaactccagcatgcaccccaaagccaaatgcagaagtgctgaccttatgtggcagcagcctctcaaggtcctctggactcttgcccgcagcctggagctcctttcgggcctcctccgtcgattttcccctcatcagggcctctgtctgggccaagaagttggccaggaggatctgatgagcgagacatcagttatgcttgagagcactgtctgggcttcaggcagagggacaagaccgcctggtacttctcagcaggggtcagtcccagcctgggtcactcgctgtacagctcagttggagcgagggggacacatccgatgacaccacaaggcagggaacagtgataactgctctttaagaactacacaccagtggccaggcgcggtggctcacgcctgtaatcccgacactttgggaggccgaggcggatggaccacgaggtcaggagctcgagaccagcctgaccaacatggtgaaacccgtctctactaaaaataccaaaaaaaaatttagctgggcatggtggcgcatgcctgtcatcaggcaggaggctgaggcaggagaatcacctgaacctgggaggcagagggtgcagtgagccaagatcacgccactgcactccagcctgggcgacagacctagactccatctcaaaaaaaaaaaaagaactacacaccacttgctaggggtcctgctcacaattttaccaacatctatcttttaagatcctaagaaggtagctgggcgtggtggtgtgcaactgtaattccagctactccggaggcttaagcacgagaatcacttgaacccaggaggctgaggttgcagtgagtcaaggtcgcactactgcactccagccggggcaacaaagtgaaacggtgtctcgaaaaaaaaataatactaagatcctaaggaggaaaggcatcatcgccctgttctagtagagccttgggttccacaagtccacagtgctggatcacagaactatagacaggaac

SEQ ID NO: 97836 - DNA, 33673 bp, Homo sapiens
tactgacactgtgcttttacaccaactctaccccaaatcctgagccagccttgcgtgggctttagaaggtccatacatctggaaaaagacataaacctttgcacatttgtgcattttggggagaaaacagtccacagttttcatcaggttctcaaagaagttggtgaaataaaaaaaaaagataaaataaaatattaaaaccctctgccctgacccaccctaacctcagtacagatataattcacctgtaatctaaccctaacattaacccaatcctaacaccaatcagtctagaattgaatccaatcctaataggcctgactactgagaaccagaatctagagggctggtgttacagctctttcctcccaaagctccccacccccacctctgggcctggagcttcagtcttaacttgctctgtgctcaacctctggtgatccacagtttcctctgcctgctgtcctccccagctgaggagttgggggttcttggctttgacccaagaccttacagcaggacctggctgtcctcactgctctgggacacctgcttactgtctgctcaatctctgtagcctcctccctgggcatacgttccaggaagtcactgtaatgcttcaggccgatggcctgctgggttgtcagggaggcctggctgcggatgtcttccagacttcggaagccctggaaaaaagcagccagatgggaagctgtaaggatccaggaccaatgaagaggcatgagtgagcacacacacaaggcttccatcgccccagactctagggaaggctagaggcaggaccaacctaggggcagttgggtctgtactcagcaggacttgggaaaggcagggagcatgggaaacatgccatcatccagccctgccactatcctaagatgctcgttcatgattccatcagtctgaggatggaccttgtcatcttcatccttaccaagctgccctggtgattgtgggcagagccaggattgggaaccactgctctagacacgcagtgtcaaggcctggcctcctcaggaaggcccttgctggtctggggagactgagaaacatacttcttgtccctgtctactccttcttaaggataccaagcaacaaggctgttctgggagctgaggggtctatatgagtcctggtccgcttgaaaaatggtctccctatactgtgggtgcattcccatcagagcacagcatagggatctggggcagagcacagcacacatctggggcaggaactctgagacacagcaaaactgaagtaggggctgagccagggtgtgacctgttggtaccacatctgggcagtcttggtcccagctccccagatgttggagaagagctccaagacaggcacgctctcactgatatggtccagcttccgcaaatgcccgctctccaggatctctatgattttctcagccatccgcttcccaatcccagggatactgcaggcctcctagaggaggaggaggcagaggcaagaaagaagagtgaggagatggaagaggtagagccagtggaaaggaagctgactcctctagcagatgctgacataaaagccagcctggctgcttggcaactgtgtggctgtgtaaagcttgggtgtagttgaagatgagaattttggatagaatgagggctgggtaatttgtcttttggttcccagaaggatggagaccagcagtaagaagtagaaaataatgatgatattagtcaccaccaccaccaccaccatcatcatcattccaacagcaagagctaacatttactgagggcttactctatgtcaggtcctgtgctacagggaccatttcatttaatagtagcccctttttactaatgagaaaactgatgctttgagagtttaagtaacttgtctggagtcacacagttagtgaatgacaggaaccagagttcaaaccctggtctgttaggcttcagagtccaaacttcttttaaacaactttttaggcgggacacaagggctcatggctgtaatcccagcactttgcagggctgagccgagggtagattgcttgagcccaggagttcaagaccagcctgggtaacacggcaaaacaccatctctgctaaataaatgaataaataaataaataaacaaaattaaaaataaaaaacttttaattatgttaaaaaattcaaaagtagagagatccatataacccccaagtatcgtacatctcccagcttcaacaactatcaagattttgccaatctgctttcatcaattttccttttttttcttttgtgcaagtcctagaccccataaaatcttcaccactgtacctgaaccccactggggttactaaccactggccagtaaagacccctcctcccactctagcccctgggtacctggtacgaggtgacaggcttatggaagctcttgagggcattgatggccttggcatagcccagggccctccacttgtctccctgaacactgtaggctttggccagaacttccagcttctctgtgatatggaggttgtgattggtcgccttctggcttgagggctgtgcacagacccacttatccaggacagcaggggctgggctaggctcacaatctccctcaagggaggtggggtagtggccactgatgagggcttccagatcagctgcactaacctgggtttcttccccatcactggcttcatcatcagagatgggcttgggatagagaagaaaagaaaacaataaattcttgttctccaagagaagggatccttaaaggtgggggtcatcttctttgtgcggggggagggtcttctagtcagacctaagaatgaggcggggccttctgcatcagacttggatctccttgggtgtgaggccacgttccctttggctccacgcagtgcctagccctaggatccccagtggtatgtgttagatatggcctagataaatgcagcagtgatgagtgttgggaagagctaaatggcttcacaatagagccctcctctctcaggggcctgggactttctgaacagccaccaggcccaccccatttctgtgatctgcttcctaggggaagggagttctgagggatgggaggctcctgacctgggcttgggtgtttggtgcctcttttgccttttggggaggagacacaggcctggtgggaggaggaggaggagaaagggctgtctgaagcagggcctcatgggtgccaggaggaatagaagcatcctgctctgccttgctgggctgtggatggtccaagtacctgtggggatggtgatgggaggttaagacaccaaaggtctcaccctgtatctgtccccagtccttctgtactctgaaatacttggtttcccagtgtgtccaattaagaaaacgagttttttgaggtttttggagtttctcttgagacagggtcttgctctgtcacccaggctggagtacagtggtacgatcaaggctcactgcagccttaacctccctggctcaatcaatcctcccacctaaacctcttatagctgggactacaggcacaccccaccatgcctggctaattttttaattaatgatagttatttttaataattcaagaaaagagctcaagatgctactagaaaacatttgaaaaaaagactgggatcagcccacctactggggatgaagatgctgaatccagctacatccaccagcctcctctcctgaaggcacaagctcagccaggctgacttcaccagctgagcacccgggggcagctggggtagtctgagaaggcggagggctcgctcatagtccatgccttcatccaccacaatgtgagtgacacctgggccctgggcagggcatagctggccgccatgctgaacaatctgcttctcaaagagttctgcccgggctcgtccaatgccagtgcgcacaacatgggcccgaagggagctcagccactctgtggaaggaacatccagatgactactgttgtaactttttaatttttatctgccaccccctggccacgacataacttctaacatgatctgaatgacgtgttcacagtcccctaccctgaaaataagcatttcccttccatccagacagctttccttctacatatagcaaattttctcacaggccagcacttgaatgtaagggacaaggattttcatacgtcctgttccttggtgcaatctagaagtgtctggcacattgtaagtaacctgtaaatatttgtttaatgaatgcctcctcccttcttactttgttttttgtttgtttgttttgttttcttttgttttgtttttgtttggagacagtctcactctgtcgcccaggctggagtacagtggcatcgtcttggctcactgcaacctccatctcccgagttcaagcgattctcatgcctcagcctcccgagtagctgggattaccggcgtgtgccaccatgcctggctaattttttgtatttttagtagagacagggtttcgccatgttgcccaagctggtctcgaactcctgagcacaggtgatctgcctgcctcggcctcccaaagtgctgagattacaggcaagagccaccgcgcccagcctctctccatactttgaatcctttatcatttattctttcaacaaagcgcgtttcttgcccttacagtctgacagacccgacaaccctgcctccaaagcctctgccatttatttgccaatttggctgcaaaacaactaacaacaagcctgggtaatggaggggggtttctgtcccagtcctcagggcaaaaattatactggtcattccctgagggcccagggagtcttttctgatggatagaggtcttcgggtagaaaagaaggtaacacagcaaatagcctgtccaagacccaggaccaagcttagcacaaggtagatacaaacagacctgcaggccctggacaggcagagtcagctccaatatctgattctggacataaacaacgtagggctgaagcacatgaaggctgtgggttcaagcacacgagggttctgagactgggtcagctcaccttctgcttcttctccctcttccctcctaggaatctttgcaagtacttttgatgatgcatcagcatgaattttctgccgcttgggaaatgccttcaagatacccctgggatccattgaagtatggctggatcccggcctattggagcgttggtcagggctgctgcacgtggaaatccagaattgaggccctccaacccctttgcctatggaggtagggtctttcctgaccaggctttgggggtagcagcccagtttggggaagcgggtcgggggagggggtctcttcaaacccggttaaacttcagtggtttagcctagcttcacactccccagcctttcgaagttggagtattacgggaaatgaggggaaggctggtgccatcgggggtacttttgaggagtaggaaacgacaccattcctcagaggggttgcgctaaagattcagcacagccctgctgcggcccacttcgaagggctttaccaaatgggatgctgggctaggaaatggagctttaggggatggagcggagcctggggaggacctgcacataaaccccacatactatttctctacctccaacacagactcgcagaggaaggaggaggactttcgggggtgagtgggaacgccctgcacctgtcctggtctcagcctctcgacatgggggtgctcagcgccgcagctgcggggagatggggcacggccgcagcaggtgtggggagccctccgggaatggaggagtctcgcagctgcgggtgaagtcccgggcaggtgcggtgtactcgccgtgtacgcagctggcgcaggccagggaatcccagctcggggctagaagaaagctggagtgcccgaccccggccccaagagtctctccaacccccagagtcggtccccgggtggggtcgactactggccaagctagtcacccgggggtgggcaggaatagaccacttaccagcagagccaatgagagcggacgaaggggggaaggagggcaaatggccagaatagcttccgagtcagccggaagtgaccctctggaacggttgccatggcagcggctgggcgtgctgcttagcaggggaaagatggcggtgacgggctggttggagagtctgcggacagcccagaagactgcgctgctgcaggacggtaactcgagggtccccasgggctccttcgtttttttccctcagggtccggccctccgggaagggcctcagggcctgggtcggcagagctggaagggtctcggcggtcagccgggccaggtcctgcatttgcagatgaggagactgaggttcacagagatgacatgactggaacacatgtctccggacaccccttagattcctctacaccatctcgctccgctctgatttctgttgctaatatagtaatttcttttacattcattatctcatttgctcctcaccactgtcctgagaggctaattttcaccccgttttacagaagaggaaactgaaatccaagaatgttttagactttagagaggagagaggcctgggctctagttccgactgtgccattaattcaccacgggcgcttcagtcggctcctttacttgtttgggcctcactttcctcatctataaaatgaagtggatggactaccattgttatctctgaggtcctttccagctgtaatatttttgttaagtgaacttctaaatattttctgtgtctttaggggagctagagcaagaaccaagggctgtgcctggaagaagtgggcacaggggcatggatacctaacttttccccaccctaggattggccgatgccggcccctttgtgcacttgggtcctttctggacccactgggtagccaggatgaattgcgtctgaagttcctgaggctttcaagataacaactggtgactcatgttcacaggcaggggccaatcagggaagcctggagtttgtggaaattaaaatcatttactcgttcgtgcaacatttaggaagacttttactatgtgccaagctctaaactagaacagaaagaaaaagatatgttgtcccaggactcagagtggttgggaaaaacatgtacttaaataataagaagcgttaaatagaggttgtagtcttgtataaaatggtaggaaagagtgaaggtgtaagtgacatctctttggaggaagacccaacagaagtgatgatgtttctgggtcctaaagaattaataaggtcaggcacagtggctcacgcccgtaattccagcactctgggaggccaaagtgggcggatcatttgagctcaggagttcsagaccagcttgggcaacatggccaaacctcatctctacaaaaaatacggaaattatggccggatgtggtggttcacgcctgtaatcccagcatgttgggaggccgagtgggcggatcccttgaggccaggagttcgagaccagcctagccaacatgatgaaaccaccccatcgctactaaaaatacaaaaaaattagccaggtgtggtggtgcgcacccgtaattccagctactctggaggctgaggcaggagaatcgcttgaacccgggagatggaggttgcagtgaactgagatcacaccactgcattccagcctgggtgacagagtgagtgagactgtgtctcagacaaaaaaataaataagccgtgcatcatggcacatgcctgtagtcccagctacttgtggtggctgaggccagaggatcgcttgagccagcgaggtagacgcagcagtgagccgagatcatgccagtgcactccagcttgggcgacagagcgagaccctgtctcaaaaaaactggaaaaaaaaaaaaaaaaaagaattaataggcgtttgctgagtgaagaagaggggatagctattcaaagaacaactcacatataaggaccctatgtgaaggtgtgaaggtacgtgcctgattactagaggaataacaaaatgtttagtaatgttaaagcagtcactcagtcagaacaaaccacctataactatgtcaggtactattctaggtgccaggatggaagcgagaataaaaaggtcccttttctcaaggagcaatgaggggaagttgtggaaaatgaagagagatgacagataagttgggacatattgtgatagatctcttatgccttgctaaagatttaggacattttctcataggacagtggtttttgtttttattgtggtaataaatacataacagaatttagcattttaatcatttttaagtgtacagttctgtggcattaagtacattcacattgttgtgcaactatcaccaccatcttcagaactttttaatctttctcaacggaaattctttttttttttttttttttagagacagggtcttgctctgtcacccaggctgtggggtacgatcatagctcactgcagccttgaactcctaggctcatgtagtcctcccacctcagcctcttgaatagctgggactacaggcatgtgccactacactcagctcaagtgaaattctgtacccaccaaatgccaactcctcattccctcctcctcccatcccctggcaaccaccattctactttctgtctatgaatttgactgctctaggaacctcgtctaagtggaatcatacaatatttgtctttctgtaactggtgtatttcacttagtgtaacgcttcaaggttcatccatgttgccacagttggatacttccagctgtgccattaattcaccacaggatctctagttggcccctttacttgtttggatcctttccagctgtaatatcgttcataaagtaaacctctaaatgttccctgtgtttttaggggagatagagcaaggaccaagggctgtgcctggaagaggtgggcacagaggtatggatattgtagcatgtgtcaaaattttgctcctttttaaggctgagtgatatccattgtatgtctacactgcattctgtttatttattcatctgttgatggacacctgggttgcttccaccttttgggtattgtggataatgctgctctgaacatgagtatacaaatatccacttgagtccctgctttcactgtttttggtcacagaagtttttaaacaaatattttatcagccaggattttgttaagttcttttgttagtagcatcacaaaatgatattgttaagattccaccctatccccagactgaaaaacaactcagtattgcatatgtggttaagccttgtcaaacctgcagatttacccctgggtgtgtaggaggggtgtggggagtaggggggaggttactcccttccaccaagaatcatggctattgatatcttgggctggataatgagactccattttacttttgtttttttaagaaataattacattcattgtggaaatatgaaaaataaagaagtcaaatataatattaccacccagataatcataatttacttttttttttgagacaagtttcactcttgttgcccaaactggagtgcaatggcgcaatctcggcgcactgcaacctttgcctgctgggttcaagcgattctcctatctcagtctcctgagtagctgggattataggcgcccgccaccaagcccggctaattttttttttaatttttagtagagacagggtttcaccatgttaaccaggctggtctcaaactccagaccttaggtgatccgcctgcatcggcttcccaaagggctgagattacaggcgtgagccgcctcgcccagcccataatttatatttttatacataaacttctatattatttcatgcatacactcacagttatttttcttttacaaaaatatactaatatacttaataatttatatatacatttatttctagaataaatatactattaaaacaaagtatagataagtatcgaataatcattgggtaagggaagatgctctgagtgcaacttctaaggcagtaaccacaaagaaagaaaatatatagttggctttataaaaactaaacacctgtgttgggtacctgtaatcccagctactggggaaactgaggcaggaagctcacttgaggccagaagtttgaggctgtagtgtgctataatcatgcctgtgaatagccactgcactccagcctagggaacatagccagacactcttaaaaaacaaaaacacttgtttgggaaaacccactttaaacaaagttaagggccaggcgtggtggctcacacctgtattctcaacactttgagaggccaaggcaggaggatcacttgagctcaggagtttgagatcagtctgggtaacatagtaagaccccatctctacaaagaaatttaaaaattagctgggcatggtggtgtgcaaccatggtcccagctactcgggagtctgaggtggaggatcacttgagcccaggaggcagaggttgcagtgagccgagatcacaccactgcactccagccttggcaacagagcaagacactctaaaaaaaagcctcagttggccgggcgtggtggctcatgcctgtaatcccagccctttgggaggctgagatgggcagatcacgagctcaggagattgaaaccatcctagccaaaatggtgaagccctgtgtctactaaaaatacaaaaattagctgggtgtggtagcattcacctgtagtcccagctactcaggaggctgaggcaggagaattgcttaaacccgggaggcagaggttgcagtgagccgagatcacaccactgcactccagcctggcgacagagcgagactctgtcaaaaaaaaaaaccctcacttttcctcatctatgaaatacaggtaatgaaaacacataggattattgtgagaattaaatttgataagacatgtgaaatgcctggatttagtaagcgctgcatcctgcctggactcaaggctggatgccaaggggagaagatggtcaggcaagaccccctcagctcctcccaggcagtaccttggatcccgctcctgacaggagagccctttctaatgcctgtgagccatccaaatgattaagggtggtattacctagggctctgctagaggccctgcaaatttaggggtgagtttatgcagaatacagattaggaatggctcaagggaactgtatcccagagaagtgaattggacaggaaaaaggcaccttggggctcttattcatcaagcatacatagggtacttgtctactggatgttagtgctctgttactagttttactgaggagtctgcctgtatctacttccctacctataaaaagaaaggggaaattacatagccactcttaagcaaatgctccaggggtagaggaattgggctaggagactcccttagtttcttcttcttctttttttttagacagagtctcactctgttgcccaggctggagtgcagtggcacaatctcagctcactgaaacctccgcctcccgggttcaagcaattctcctgcctcagactcctgagtagctgggactacaggcacctaccaccatgcccagctaacttttttgtatttttagtagagatggggtttcaccatgttggccaggctggtcttgaactcctggcctcccttagtttcttctgttctttcaacggatagtgcatcagtgtttattcatcctttcaatcagtatttagttgagctcctagtatatgccaggagccacacttggtctttaggaaaccatagcatggggataaaacccctcctatctagtagaagagataggcagtaatcaaagagtcacataaaaagatgtaaaatcataaccaaattaagtgccatgaagaaaatacatggggacttaacattgtgttactgtgtgataggaatggcctggagatatgcagaagaaggcagggcactggcatggctagagggagtgcttggtcaggaaacccaattcaatgtcctgaacacatagagagataaatacgatgtcattcatgggaagacaaatgcttttaaaagtatcatggtatgtagtaaatgctccactatggatacgagtaaaacattagggaggcacacatgaggatgtgattaatcctaccaaagtggctggaggtgatagtggaggaagacttcccagtggaagtgacatttgagctggattttgaagggcaaagaagagttccacagataggaaaaaatatggagctgttgctggtagaggaaacagcagggcaaagatgttcaaggaaagcttcagaaagggagagagtctcaggacacgttttaaagtaatggtgggtggtggttggcaaggagtttggggaggtcctggctgggttcctcagtactcccaaggctggcactgtttcccaggtaggccccttgatctgcaagggacagggcaaggggagactttgaggtaaggcattctctgttttgtgcatagggagaaggaaggttcactatttattcccagacggcaaggaaatggctgaagaatatgacgagaagacgagtgaactacttggtaagtgacagaggctcccagtgggcctttagtaatacttggggctgacataagcacartgaacactcctagccttaggcttgaggtaggagcccagatcaaatgtagaggctgggagagacggaagccctcgagacaacaacgttcctgagcataatctgggcaccaaaagtggaatgcgagtccttttgaccagtaaaattcatccccacccctcaccccagacaaatgagagagggagtaattctaagatgtagagaaacagttgggaaaaaactttacagaggaggtggtattggaagtgagccttgtaggtttaggagggataagggcagactttcacaatttgtttttccttgtttttttgtttgtttgttttgttttctaaagccacaccaggagcaagcgagtatcagaggcagagcttctgagcttgcctcaaaggcaacactataaaatatggtccttattttgaagaacatctcagtcaaagagggtcaaaacagtgattttgcagcgtggtcactttcattcctgcagcgcctttcctctaagaacaggctcatgggtaggggctccagctcagatttctgggaattatttgatttgtccactctgttcccaggtgtgcacatcagcattaaccagcttcccagagctaggtggctggctctttgacccagggcccaaggctgtcagcagtgggagttggtctctttattaagttccatctgaaatgctaagaccaatgatggaatcacaggctggtttattttcttgtcattattcttggctttaatttcttcctgggcctgatcgacaggtagtattggtgagggaatttctttttccttttttctgacagctcataaatgtctagaaccgacaacatggattacacgggcttgcattccctcagtctccagtcttaaaatgtttgtcctgcgcatgttcagtcgcacagtgaagtgttgatccctccttattatgagctgcttgggctccagtcccagttggtttagtctggtgctattaaaaatcttgatgtgtttagcatatgacactgattcggtggaaaccaatacagtagtaatatcctcacaatgcattgtaatttatagtgctcccaggggatgacagccttggaatgcctaacaggggagaacttatgaaagcagaggtcacgtggactagccaccaccataaccaggccagagaatagccgcagctcctcactcccagccccccgtgccacttctctactcctccacacagagcaaataaaacagctatagctgctgcggctgtaaaaacaaacaaataaaacccaggcctctttgttgtgcttggatatgaaactgaaattaaaaacaagtccaggtttcttcatttgtagcaccatgtgccctgatatcccttattaacctgtcacttctcctagtggcaggtggggaatagaccatggcttccaaactcctctttcttaaaagcagaaatggagaagactgttcacaggagaacactgtttggctaaagttgacctaataatgatattaatagcgtgactcttactgggcaccatgctaagtgctctacgtgaattacctcatttactcgtcctcgttaaagccctatgaggtagatactcttgtctccattttacatttggaaaaaatggaagctcaaagaggttaagcaccttgttgagaattatgtagctagtttctaagccaggatttaagcctagttctgtccaattaagagcccatgctttagtcctcaacaacatagtgctgggagttgagaacacttaaatccaactttcttktcttcttactgtttttctttccccagaaaggcctgagtgtggactgatgggcagacaggaggacctcacttgagccactgggcccagstctagaacagcagatctttttcttactcttcttcctatccaccactgctgccctggcaaaatactctccattattaatttttaagtataaataatcccaggggttgagctggcttttgcttgtgcattctatgaagtaaagtagggacatggtttttgtggcaataaataggaatagtttccatttttctagctaagtatacaaatttgataattagccaaaccagttttctgttagaaaaattcaaagtaatttacagaggaagaattgccaataggtgtgcgtcagtctgggacagagttcctcccgtcggtgttaataagcatgttagtgtcctgtttttttcctaccctctcagtgctattcattcccaccccccacaatgattgctkcatgtattcatagaggaaaaaactgaaggccccacaacaatgatcggaacatcaaaccagcctgagaagaacacagcatgtccaagggggctgaggctgaagggcaggccatcccccagcgattacattcggattaccgacttaatctgctttggtatttgaccgccagcctaaccaccccaggctgcatttggaggatattgagcactttcatccccaagcacttcactggctttataaatgacccactcgattcccttcggcctcctctgggatgggacatggcagctgtttaattgccacatagcaatgttgcagtgttttaaggcagaaaagaagaatcctgcatccagttgaagctgcagggaacatttagggaaggggaatgtaattatccacattggaagtgggccagggtttggagctttggggaaagaggcctttaggacttctactttccagcccacctgaaagatggggcctcctttcagcagtctgggacatcagcctgcttcctgctgatttaggaaaaagcccccaggcgccacctcctttatatattccccatcagactcttcaccggggtggaaagtctcttttccaaggtctggctggggctcagctgggaagatatgacagcgtcccgggaagctgcctcacaccagtttgggtttaacatataatcaaatcagagtgacagcagatggaaacagtcttctgttgccgcaggagccgtccttgagttcagaaacaaagacgggggcaagaaagacaagacaaagtgtgcatttgtacatgtgtgttcacacccatgcacttgtgcataggaaaaataagaaggacttccccaaaatcttttattgggtcttatctctagagggaatgggaaaggagactttcttctacattctaacaaagaatttaattctcaaggtgtttaaacaaaaaataaaggtgaagcagccagaggtgtcaagttccctgagtggtttttaaggtcagaagtaaggaaatcagcagctgactttcttccttctttgagtacttcttgggaagttttctgtgtaaaactcaaaattttttggagtaaaagtgcacagaaaaccctggggtggttgtcgtccctccaggccaccttggtgcattattatgcattaggacacccattttagcaaggcccatgacttacaggggcacctcacttatccagccctaggtcgtgaggtagtcctcataatttactttttcagataatcaaagcttaccctttaaaggccaaatataaaaaataaattgagctacttaaaaaaaaacagaaacctttcaaaatattacatgtgcttattgaacactttcagaataaagttttattaataattcaaattctggatttggagttaggagacctggagtttagccgtggcatttgtaagattgtctccttgagcctcagtaattcttcatagtctgtttcctagagagtagtggcaagggttgaaagagagcagtcagggaaaaaatgctatttctcattttaaaaatacagacattgggtagatgctttcttttttttttttttttttttttttttttttgagacggagtttcactcttgttgcccaggctggagtgcaatggcacaatctcagctcaccacagcctccacctcccaggttcaagcgattctcctgcctcagcctccccagtagctgggactacaggcgtgtgccaccacacccagctaatgttttatttttagtagagacggggtttctccatgttggccaggctggtctcgaactccctcaggtgatccgcccgccttggcctcccaaagtgctgggattacaggcatgagccaccacgcccggcctggagtagatgctttctaaaggaacttccacctttaaaatctgtgatggttgtgttctattataaagtggcaccattggagtctaagggtgcttgtttgcccttacactaartggtcccaagtgtttatgtggttctgacactgccgtccagtgtgagttgtccccgataccattgtcaatatgcctgagaaaaaaagtaatttcctgccttattctacacacagcattttatacctagtctgagcgagaatctgagagtgatctttcctatagtatagagtagggtacatggatcttttcacaataagctgctgctcggaggcatttgtcacttctgagtttgcaactgtgtcagaggcccccagaaggctgcttccagtgaagtgaggtattaacactgaatagatttggatatactcctggtcacagtccgttcacttaagagagaagtatttgtgggggaaaaaagttgcctataaagcatatttccaagttttactcttccttattaattttcattataaacttggaaatgtgtttctagggagaatttttggccctaagaggtaataaaatcacactgcagaatgcagcagaccttataaaagcacatatttaagggaaaattctaattttacagcacacttttgtgttcagcttgtgtgccttacttataccggtgagggcgtttggatttgacacagctgctcaaaaggtctaaagtaaaaccgccggctgcctagtgctgagaacctgactgtwgctctcaactcctacctggaaaaagacacaaacagaaacaactgtaactgagtactgtgcactttttgagttgtttagctccttaaacagctacagaggctgctggtctttagcaccagctgggctcctcaggctggaggataccatagtgggcagccccggattccaaatgcagcaggaagggaaaggaactgggggataggaggtcatggctcagaaaagatccccctgcagtgatggaccgcatggttcctgaaaatgaaaatctcagcaggggttttcaggtagtccattcaactagtttcttgatttataattttcataatatatgtgccttaaaatcttatgcaagcatctgggttatgaaacaaggtaaaatagagatggttatttgcattctagaaggattcccttttacaaaaaattcacattagatcttttataaaccgtgcatttaaaatatggcatgtgcctacgattttgtttaaatgcagctttggagcgtttttttgtttttgcttttttctttttttttaagcaaggtatacctgaaaagagtgaatttctatatttggactttctgaatcatgatacagacctgccgaacagctttcaccctcttaattattttttcctctgcatgtttttgagggaaaaagtgtgcttcaactcctttttgggatccaaattttctccattaccagaaacaacccttttcctaatcttcacatcttctccttgcttgaagccacacctgagggtttcttgactccacttggctcttctcagagcttcattccagttccttttgcctgagcacccatgagatgcgctttgagggttgtctaatgttgaaatgctctactgaaatttcagaagttgtgaggtccctccttagattaacaaagctgagagtaaaggcccaacactcccactttcatcttgtgctagttacctagtgtggtgccggtgattcagcagaaaagagcagagaccctctcttcactctcatcctgatgcttgcttctcatcccgatgcttgcttctctccccagtgagaaagtggcgtgtgaaaagtgccctgggagccatgggccagtggcagcttgaagtaggagacccagcgcccctaggagcagggaacctggggcctgaactcatcaaggaaagcaatgccaatgtacgtccatctgtycaggtgtcttgcacggactgaggtgggggtgggctgtgggctgctggctcttgagggcagggaccatgtcttgttcacctcctcgcctccagtgtgccacctggacacagcactctataaatgtttgtttgaatgaatacagacattttggcttgatcgtcccagggcgggggctcagggcctggagtgctgtagcaatagcagcgtcagaggggagcagtggagaagagctgagggtcttgttgtgccccggggtagcgctctgatgagggtggagccttcccttccccaggaacagtcctcgagttggatttgccttctgcagcctatcttcatgcgcaaggacaccaagatgagtttccagtggcggattcgaaacctcccctatcctaaggatgtctatagtgtctctgtggaccagaaggagcgctgcatcattgtcagaacaaccaayaagaagtgagtagcgtggaaggcaccctgtgtgcttgtgtatgagcggggtgtagggtggggtttgatctggcgttaggatcattattcaggccggtcctgcagagaggaagcccttctgcttacaggtattggaagggcttcctctctgcaggaccggcctgaataatgtaatcagctccatcggggaagagaaacttgaatgagtatctagtatagtacctggcatagataggggctcagtaaatatttgttgaatgaatgagatgatgagggaaatcacaggaccattaacttgtggtctcaggtggttctgctgaaaggttattatgaccttggtctcctgactggagccaggccttggtaagggtggcctggtgacatcactgtcagagctggcagggagccatagcttggaaggcacccctgtctgaagtgggagtgacagtcctttaaagcagtacttgacagcagtttaaagcagactgggcagcagtaaacctaatccctccccagactgacagtggggcagatgcttgggccgcttggaagtctcttgcataatgcttcaaaaggggtactcaacttccctttgtggtcccctagaggggaggcaaactgcaggggttgaaaggacagaaggtggccacagtgcatttccattttggaaatgcattgatctcatttaggtttctggagccctgactgatcacaggagaacaatgccctgtgtgaggcctgaagggaatgaccctgaaatgaatcaatcttgacctgggctagagagaatacagtctagggacaactcccacaaaatagatttgggcattgagatgggaggttttataagttacctgtctgcaagctgtgaagccattcaacatgcctcatggggatgcccccacccatctcttgctttacatgcagtaatggggacacagctccttgtgcatctcctcaggtgatgtggtgccagtctccccttccatctccctcaggctcacgaggcccacagggaagcagggtagctcccagactcccccatcgcagccctgggtgctgccatcctcttgtgacccccatatcccattgctttggcagggttaagaggacaggggaaagggtggagatggatgaattaatttcaggattattgctgtacatgcagccagcagcccctgcagtgggccttgtctataaatataaagtcataataataagggtttgtgtttataaagcactttgaagccctcagataagaggcagtttattcccgttattgttctcatcattaacaggagtcactgcctaaagtggaatttagcaatttcagacaacagagaaattgcctgtaggagaacaaactccatgcttcagcaagcattccttggtggaagaggccttgggtccaaactgggaacaaaagtgcttctgatagcacttgaatctgcagcccagcactttgtgaagctggctgctgcctcttttttgtcccccagaggtcactgtcgaatacagatatcagacagaaatgtgattaccagggagtgaggaaagaggctagctagctcaccaaaaaattcatctgccagcatatcctctgggtcccatctcctgcgcacatccagccataggtggcgctgttggccaggagctccatggctggaggcccaggctagctctcaaggcaagcaggggttgttggacatttttgaaatgatgggtgaggccaggtgggatgggagtgatgcccctggaggggcagggctgagggttggattcccatagaggacagaggagtgtttcagggcccactttggaacccacactgagcctctggtccagtgtcccagcctggctcatccctgccctcctcaggtctctctgttgggaggtaacctagaggccgctgaacccttagccagatcgttcccgaacctagtggcatttttaccttctacctggaagaatgtattttatacctttactcccattaattatatagaactcaatgggtattcctttattattattattaatttggaagggagagatttatttctcatcaggggttacagcctgcatagacattcttttttatttttatttttatttatttattttttttttaagagatggagtcttggctgggcgcggtggctcacgcctgtaatcccagcactctgggaagccaaggcaggtggatcatctgaggtcaggagtttgagaccagcctggccaacatggcgaaaccctgtctctctaaaaatacaaaaattagccaggcgtggtggtgcatgcctgtagtcccagctactcgggaggctgaggaaggagaatcgcttgaacccaggaggtagaggttgcagtgagccaagatcatgccattgcactccagcctgggtgacagagtgagactccatctcaaaaaaaaaaaaagagatggagtcttgccctattgcccaggctagagtccacttcttgcaatcatagctcactgtagctttgaactcctgggctcaagggatcctcccgcctcatcctcctgagaagctgggactataggcgcataccacccaatctggccaagtttaaacaattttttatagcgttgagggtctctccattttgcccaagctgctctcaaaatcctgggctcaagtgatcctcctgccttggcctcctgaagtgctgagattacaagcatgagccaccacacccagaccagggtggccattctggcaggtggggaagtgtggcctctggccagaagccaaaaactcaatggctactcccttccacagtgtttagctttttaaggatatagtacatttaaaatctgttttctgatcatcattctgtcaggaggtggacaggatccatacttttattcttgtgttatagatgattatataaatgtatatataaagtcagcatgatgaaccagcttgctgaaagttagtgactgtctctcctgatactcagacatctgcacttcagaaatgcacatcatggcatttctctctgatttgacctcttccttcacctggaggttccataacctgccccagttctaatattctggaatgtggttactaaccaaagccagagtttctttacccatacttgccttgtctctgaagagctgggttggtgactttacttgaaggaattgattgcagtgtatcatgtccttggcctcacatattagtgagggatgaatcagggaaggaaaaaagtgcttttccaggatcccagtgttggaccatctattcctgataacgtttgtgcagaaagagggctcctagcctcagcctggaagttggccgctgtaggtggaatgagccagggtgcaggagtgagaagttgttgggttaaatctggcctctgccactgttagctgtagaatttaggcaaggtttcctcatctatcagagaagactcacagctacttcacagattttggggaatttgatgaaatcatatatgtacaggccagcacaacggctggcctgaagcaggtcctcaacagttctttggaaattggaatctgaggagagcttggctgatttgacatyggtgatagtaacactgtgggaggtgttaataggcttcactagaaaaaaggattctgtggttaaataaatttaagaaactctggattaaacaggcttctctttggtggggccgagagcctttagtatgtgtgtgtgattgtgactgtctagcagggggcgactgtgggtgggggtgccaagtttgcccagagccttgatgtttaagaagatttgcttgctgcttttctaaaggcggactggttggaggcttctctggacccctctggccatgcggtgtgcaggtgtgcatggcaccccctctgaggtatgtgaggcatgacccaagtgattgtccacagcagccctgctcctgccttcagcctccagagtctctctccctctgagggcctggcctctggtgcccttttgggttgaaaggctggattggggaggggatacagtagagagtggtgggaggcaatagatcattactgaaatagtcaaaatggaggagtcgtctgtcaaacagggagaagacaggtacagagttggcctgttctgggccctttgacattgacttcaagttcatctagtgcagctcttttattcgaagaaggaatgtggaaactgaggcccagaaattaagtgacctgtccggggtcacaaggcagggccaggagttctgctacaagcctttacttccacatacatcttttgaagacttttgacattcagaaaggaaggccactgatgtgttggagagagtacccaggggacccgcagagtgttcggaccccaggggagacaacctgttcattgttgaacatccccacctcccacctcaatatctgccccatcattggacaaatgcaaataatctagactatggcgggctattactttgtggtgagaatgtggagacatggaggtgtcaggagatttggggaattctcactttaatacgggcttctctgtttaccagctttgtgagttgggcaagatatctaacttttctgggcctcagtttccttttgtttaaaagtggataatagaagtaaccaacctgagagagttgttttgacaattaaatgtgtttagaacctggcacagaataagctcttaaaatgtcatctttcattgtatggctgaaatagaacattgaagggaggtgggaatgggggagagcggggcatctgcaggaagccagggaactatcctgctgtaagggttcatcttttagcagaaacaaaacaaggtctgatcagcagggatatggccttgttcctttttttgagattgagtctggctctgttgcccaggctggagtgcagtggcacgatcttggctcactgcaacctccgccccctgggttcaagtgactctcctgcctcagcctcccaagtagctaggactacaggtgctgctaccacgcctggctaagttttgtgcttttagtagagacagggtttcaccatgttggccaggctggtcttgaactcctggcctcaagtgatctgcctacctcggcctcccaaaatgctgggattacagaagtgagccactgcatctggaggccttgtttcttcttcatccttttcttttaattttttgtagagacagggtctcgctatgttgcccaggctggtcttgaactcctggcctcaagtgatcctcccacctcagcctcccaaagtgctgggattacaggcatgagtcaccaggcccgccctcttcttcatccttaaatccccagctcacagctcaaggtctgggacacagttgatgcccaataaatgtttgctgcctacctacagctgcctgaggctgaacgttatgacccttccagaagcacagtgggtctctctcttgtccaggtgctggtgagaaagtcaagtacagtacctatcatggaaaaaccctatgtctgggggaatgggtgtgagaagggggtgggcttccccaggaggagaaaaggcagatgctccctactcccttgagcctatcgggagcttctaagaagttggttaacctcgaccaataaactaaatctattacaagagactcaaaaccaagctgagcctccacctgctctgcctccattsctcttgcctggtggtaggagtagttcaaggaaagcaggtgcaagctatgcacctaaagttccctctgatcctgtccttgctgttgtggccmagccctgggattcattttccggtcccactgccccagcctgggggaatggttctgctgggctgcttccctcctggttctgctttttgtgtatatttgcagggaagatgttaacacttcctaacaagtctttgtgttcatctaatctctgctgtttaacctttgactctcccctattatcagtgtctgccacctttgctggccagaccaaaggccccaggaagagccctcagcctgagctggctaggaagaggatgaggcaggcattccatccccggtttgcaggcagatggatcgcctttccctggggcagagctttggaaaataaagcaacttgcaatgccattaggatcccccagcccccactccttttgaactgtcagcctttaagtaaacattcttttcctgccatgggtcccagtaccttggtggggagtggggaacctgggaggagaggggccccgagagcctctgttgaacggagggatttgggcagggaggacgggggcagaagtgctgcattgatgtcaactctctgagtccccagggcataggggcttttgaagtggactcagggtagctgtcaccacaaggaccaggcccctctgaagtactaaaagccccatcctccccaggcctctcacttgagtttgtttgtacctgcctgaggtgtttcccttcacagcccatacaacctctgcagcagaaagtgatgccttgcccaagtgacaggtctagcagcccctggccagagcctaagccacatttccaccaaggaaaatgccaaattggtgtactgttagagatgaggaggccattcattgtgctttggtgtagtaaggatcagaccaaggacaaggaatcttactctaatcttgactcccatccctaccgacaactggccgtgaaacaaggcaagatatttcatctctctgagcccgagttcccttttaggtaaggggggtcaaatttcctgcaaagtctagttatacacattacagactgggtgttgccatctgttctatttttttttttaattaaaaggcatcattaatcgctgaaccggcacctgcagatgataaggaccatgtgtgatatgtaaaaatggaggagtagggacttggggccagccaagtagtccagaggtccagcttccgtgatgagtaacatggttcgtcctctcaaagagatttctcctagtagatatacttttccctctggcctacaaggccaggctaacaaggccttgaaaggccccaaaagaggaagaggtagttgaggccttcagtggacctcccatgtaaatggtaacagtagggcyccagctttgggagacagatctgaatgtccttactctgtcctttgttagaacacgtcccatttttctggtgtctccatgaggctttgggggtagaggagtcccaagctgcttgagctatttgtgtgttccaggcttcttctgcctgtctttgggagacccagctctgagatgtgagtcactacaacccctggtctaatcacagaattataactaggttctgctcttctgccactggactggacataaggcttgcattctatgctttccagggccactgagctctgaaatactggtgttctaactggtttcccttctccctctctgcgtgtgtggaaggtgtggaagaactaggtagaagctaggcagcagagggcctgacgcctggctgttgggtcaccttgccgagtgccccaatggcctctcggtgtccccacaggtactacaagaagttctccattcctgatctagatagacaccagctacctctggatgacgcctygctgagctttgcccacgccaactgcaccctgatcatctctgtaagattcacccagacttcttggacactgcatcagggagagtcttcctctttccctgcccacttcccatcccayaagagtcctcagttctagccccaagccctagggtatgcttgtgggagaataggcatctctaattcagcatgggggagagcagggagggggctcagraaggagcctgaccatataattcacagctagaagagggtagagggtgaaagggaagcggtggaaattgctgaacttgggttcttctggtccaaggtctgctcctactcaggcacatgaccttgagcaaatcattcaatcctacaggcctcaattttctcgtgcaaataaggggatcagaaggagaaggggccccaagtgtgtgtggaaggagatgggacagtgactgaattattttcttattcctggctgcatccacagtaccagaagccaaaggaggttgtggtggccgagtctgagctacagaaggaactaaagaaggtgaagacagcccacagcaacgatggggactgcaagacccagtagttggcccctgarccttatacctccaccacagggggtgccgtgagacttcaaggcttggcccttcttgaccacggcagcctcctgtcttctaggagctatcaagggtctctaagaactgggcatggggcactcctagccagtgagtcatggtcatatttcctgagtaaagtcattctgagttacttactgcacagggactgccctcttgttcccctctgtatgctgcctggccccagaccccactggcctccctcgggagggtgtgatgacattcctttctctatcccggagacctacaacataaagctttccacaaaaagggagamtagggtgggagcacatggccctagcagggcagggctggcctttccctgcaacctgtttacacaaactcagaggaagaccaggctggagggaccctgtgctaccgtagcttgcagaagtggctcagaggaaactcctgaagatgtgtgggcaagggaaaagttttaaaaatgcagaaaccggccaggcgcagtggctcacgtcttaatcccagcactttgggaggacgagacgggcggctcacctgaggtcaatagttcaagaccagcctggccaacatggtgaaaccctgtctctactaaaaacacaaaaattagccggccatggtggcgcatgcctgtaattccagctactcgggaggctgaggcaggagaatcgcttcaacctgggaggcggaggttgcagtgagccaagatcatgccactgcactctagcttgggcaacagagcaagactccgtctcaaaacaaaacaaaacaaaaaaacaaaaacaaaaaacaaaacagaaaccttggaagtagaacacaggatgttaaggcattgtgggtaaaaagccagaatcagggtcataattttgccaagggtgtgtgttggggtaggggtcaccacaggcaacaactgagcttccagcagcctgtaccctttccacagtcccctctccaaacccacaggtgaccctccataccccaaagggtaagggataggtcatcaatgggaactcttcctgaaaaaaagaaacctttgttctttgggacacagagccatgaggctggtcttgtcgtttcagcagcacatacaaccctgagcttgggtctgctgttcccttctcctggagcctgctaggactactcagccagtgaggaaccagatctgtgaacaatcaagctttatttttacaaaaatgaaaattgtagcatgtctcaacagccagcctgaggtagggctggctcagaactcactcagaactgctgggttccctttgctctttcttggtttcaaagcaaaaccaggccacagtgccccaggaatgaacccccagccccgagaggttggtcaagggtgaggtctggctggtgccaggaggctattggcagcctcacctttccttccaggaaggggcagaaaggaaccatctgggaaggtgggagcacctcacctcactctgtaggctgtcatggctctaataaggggtataggatgggcctctccaggccagatccttgctctggccaaacagggacgcaaggcccgggttcagccgcactctaaagcagcaggtcctgcctctccaacaggttcctgggagggactgcatctctggtaagctccaaagtcccaggagtcagaagcctctagtgcaaggtgcctgagcactggggtcacaggcccaggagcacagtggggcagtgaggaggagctatcactgcaccctccaggcaagagaagtccctgagtagctggtttccctggcccagaggcaggggtggccctgacggtcatgggttttgaaaatccaggacgtggaggttgtaagacagggcagcatagagatgcttggtggtgagacgcaggcagtacacagggctgctgaggggagtcgacgtcagcgggaaggcctggaagggagggcacaggaagtggtaagagctttccaagtgggacatgggtgtgccctaacccaggatccccaggcccaggggaagagggacgtgtgccattgtaggcttcttccaaccctttctaggcacgtccttggctacctcaccctctcccaaatgcagcccataatcatgagtcctggcatgctggagaagaggtgggcaggacacttacgtgcaggcaggccctttgacgccggtcccacagccgtacaacaccgtagtaggaggaacctgtggccagcaggtggttgccatctgtctgcaggcagtacagggtgctgtcgtggggctcctcccactccatgacacatttcctgtccaggaagaggagaagcagagggaggtttagggtaccctccacctctaccccagctttcttgggcctagagtggctgaggggagcgttaaggagccattccgggatggaagagaaagaagcctaaatcatcagattcatcaaaaaccgaacttcatgggagaaagcatcttctgtagagggctctcgccatggcccagacgacacagcagattatgcctgcacttctgttttcacatggccagctacttgtcactggactcaagaaaggttgaagtaacacaggcctcaagaaaggctgggagagaatattgagtgacagtaccctgacggctccagaggctctgggaaacgcctgcctttgccaaggcctgttggctatagccaagccactgggaccagggctgcccaaatgtaggaagtctagtgaccttgcaggcctcttccttcccagccctgacatggagtctctgtgccctctcccatgggccaacccaggactggaggaaggaccaggattggtgcagggcccccaccacctgtcctccctgcccagcacactcaccggacgctggtgcggaggtcccagtagcgaacataggtgtcatagccacaggacagcagtgtgaaaggggactcatacatgacatccagcaccccagcccctgggggaaagtcactgcccaagtgtgtcatcagctgcccactgggaagggaaggacggagtgagaggctgctccacgtgggtcatacacattcgttccaccttcagaaggcatcagaccttggggaaatgttctctttcctcagctagaatgagactcaaggaagggggctcagggaggagatgcccaattcctacccacctcacccctgccatgaggcctctgcaaccagtcccaggccccacccctcccccagcatcccagccctcagcagcccctccatcacacctgcgtgccggctgccacccacccagccactcctcctcaggacaatgaatgggggggcttgctgaaggggtcggcccccctcacattcacatgcacatgcacacacacacacacacttggttactttatacatcttgatcctgcaggtcatgcagttctgagctgcctgagtccaatgccttaattcctgcctgtaatctggggctcaaacctcattggggataaagaccacacaaagggagaaggggagtcccaggagatgttaaaacaagtaaacacctttgtgtctggggagaaaaatcgctgagaaagcagcttagcgagctgtccctggtgttcctggtctagctggcccccagcccggggctagcacgcctccgtgatcacagcccccagcctgtggggctccagcctgctccccccaccctcaccccacccgggggccgagagcagattactgagaacaatttctttgtgactgtgtaattccctccgtgaccgcggcagtgggcagaccctttgccctgatgccagacccctagcaactatgtaggggggcctcctgtccctagcaactacccctcaacatcaagtgcacccgctaatccctgcagccaggggatgggtgcaagtatggagtttccacagaatgactgggggaaatgaaggaaaaggggcgccctccaggcctgatgccttagcttcctttacccgtgagacgctgggctttccccatgccatgacaggagaaacaaggccgtggacacttcacagggatgtccaggtaagaggccctggcatggagtgaggggacttcatggctcaccagcccttttggcccaagtagcatgtcagcaaagggcttgaggcagacaaggcagccagccacatgtctgaatgcagatgtcagctctcgtccttccacctcactgagaccctgacccacaacctcccttctccccaacagagctgccatcttcccgaaggccgaaggaatcaaaggaggagactgggggttcctttctgccccttccacctttcccctttgagccctgggcagtgggccctggccaggagcactgctgctgccaggggggaattaatccccaaggcagcacccctgctaccagcctcctcagggaagttctggtcttcctctcagtagcccagagctgggcctgcggggagaagatggcaagcctctgtctgttggggggctcctgagagggatcaggcagaaggccttctccccagatcagcatcccttagagactgctaaccttggctcccagagaagccctgccttcccagatgggccaccagccaagattcagccaccctgggcaggccagagccctgtaggggagtcattctctctctttcacaggtatactgggtgcatgctgggtaggggctgtttggctccacagttctcctccctcttccagatttgggggccctgccccctccattagtgaggccttaaggaatgattgaggagctctcccctttaatctatagaagtaatttcatgtttgtttgaaatagaagatgaaaggcagtgggggttgggaggactgaagcccagcatggctctacctgcccaccctggtccctgggttcagagggaaggagagctgggcactcatggggctgcacagggacagcagtataaaaggcccacccagactgggctgccaagctgggcccctaccccagcattcatgccaccactggaaaatgtcatggccgtaagtatctgcagtcagaaatacaggacagcccaaggggtccctgccctcggggggagagccaagggcccagtgagcaccaggccctggaggccagcacaagtcctgagagcccctgctctgcccgcacagcctggcaggggctgagaagtttctttctgctgtgctgttctctggttctctaaaatggccacacacactttaaatgggccaatgaaaagatacaatttcttttgcccctgggcccaggaccctcaaggctctgttgtgtggtgcccgtgaggttaagttcagagcataaactgacacgccaggctctgggaaaaggcccatctcttctaatagcaacccagcagtgccacaggagccctgctggggctttgatttgggaaaacaaacagaaatggcaccgtgggcccttctcggcccccaccccaagacctatttaactagaaaactctagctcaactgctctggtagagggagagattggcccgacaatagccccaaactttgggggaaaaggggacaaaacaagctgtctgtctcctcatcccctcctcctgggctcttttcttactgcaagtgtgttcttataaaaacgattagattgcaatttgtataacgtggtgaccccccaaattcagacatttcaccccttttctctggaaagaatgttaagaatgcttctcggcctctcactgtggggggcgagaggggggtgcagagccttggctgttgcacagcttgtgtgggaacagggctgctgctcagagccccaggccaagacgggagcaagggccagcctgtcactatagagggccagacaaaaagtccattcccttccaactcccgtggacaaagcccaggcctccaggatccactaagggctgggggcctccacaccctagcctccgccgagtcaagtccagcaattctctctccacccagggaaacataaagacagatggggccatctgtgtgagcctgatgaatgagacacaggctgaggaggggcaacctgggggagacctgtttccttggctctgaccgtgtgcaggctgctcctgggaaccccactacctggacaagaagaagcaagcagagtgcggccacacccctgagaggtcagggccccctggcccaaaccatcctgctgcccaggtgactctactgcagctggagggagagaacttcctgccagtcagagaggagggacatttacatgaaatgctgacacccatcaccatctttgtgggggcagctaactgatggtaggggctggccctaaaaacctggatagcccgccagggacaggccctgagtgctaagctggactgggcacagggggcagtccctggcaccctacccctgcccaccaagtctgcagagctaggaagcct

SEQ ID NO: 97837 - DNA, 12466 bp, Homo sapiens
tattatctgtccttgggaacagtattgaaaaaactgcttagtggtattacagctttagcaaacctacctcacagctgggatgagaggataaaatacaactaattttgtaccctatagtgcctagagcagtccaagtgctaaataaatatttactgattaaaaccaaactatagctactcgggaggctggaggaggatcgcttgagcccaggagtttgaggccattctgggcaatatagcaagaccctgtctcgaaaaaaaaaaaaaaaagaaaaaaccaaactaaccaaaactctgtaaaagagtgctttgagctctacaaataccaagtatttattgtggtatatttttagaatgtagccatacagtgtaattatgggtatctgtcatggatcacaattattattcatagtaagtcattgtgatacagaagtttgtttcttcacttccccttaagaagccaactatagtaatcatgcaaagttgaggagtatgtccttcagggatataaaaagaaaaacaaatctgttttttgagctaaaagagcacatccaaacaagaatttaactggctaaaatttagtaattactgttaagtaactatcaaacttgaaatcttacaagataaatggttaagatgtcttgagtatttgggatgggggcctgtgagtctgattgagacatacattttacagagtagcagcactggaaagggctagtccaacctcccagcctctgcttgggtctccgctgccccagccacacacatcctagaattcttgtaaacatatctggctctgtgttaacagtcacttgttatatgttttctaagagattagttcttcctgtgatttttccaagtacgctgaaagtagtagtatgaacttaaggaggctagtcaaagaaacttggagttataggtatttttaaagaataaatcctcaattccatcatcacttggcggggagggggcacttattaagcattttagataataaaactggttaagcttactctggtagaacagacaatcaaatctggggattgctgagaacaataataagctgaagtatggctcacagaatcctaacacaaatcattaagtctctagttagatttgttatcctaaaatttttcatagaattttaaaatctaattctgacttgtatggttaagaaaagcagttaaatattttactacttatcaagggcttttaaaataaataaatctgattgataggaagaaaggcaaataaatacctatgtagacattctataataacaaagagccatagatgataaaggaattagattttaatgtagaatgggtggtttctgaaacaaaggtatgtggtactttgtagttattgatgagaagccagtaaccagtagtgttttcctagatatatgcccaccctcacacaactttcttcattaacaaacattaaatatgcatttgtatcttattaaattatattgtataatgctgaaggaaaacaaaaagtgttcaaataatcataacttctacattacaggttctgtttagatgcagaactagaggggccagggtaaatgtagataaagagatatatagcaccatgcttcttaatgcttcatacttttgcaaacagaaaaaaaaagttttacttttattataaaacttcatctatggtcaaagtaaacactgttacatttaaattgctttttaaaaacaattgcgatctaaaaagtcaaaaatctgaaatttaataatatgagacttacactgaatataatgttcatttagaagttgctgtggtccacttcatttataaggaacaaatatttttacagtacactatagcaacagcaaaagccctctctcaccctgataggaatgggtttgctgggtgtctagaagttagattcctgctgaatagaattagccatccttaaaagattttaatccaatactgaactgtttataaaatgctttctctattgtaatgtactgtaagtagtgaaattctgtatatactgctattttctgtctgttcattgttgtgaacttcttatgtatattagtgaaataaattttcagctttcatgttgtttcctaaacattcataagtataactaactattaagagatttcttcctttcttgagtaacaaatttggtgattatattctttctgatccaaccccaaaaactagctattctgaaaaggctgatgttcactaatgggaagaatgaaatgacccttcacctcttaagggaaacaggcctccgccattccctttcaaaactatacttcttttacttgatactcaaaacttctgcaccaaaatcagtcagtatttttccagaatgcctttattttcagtatcatagaatttaaatacagagtcaaaagatgatttataaaatataaaacattttctgcttggccgtatttgaagacaagctgaatacatatctatgttctgaataagtccactatggatatatataggaagagatatacatatatccatccacagatacacacacacatatatatttctgcatgtatatatacataattctttctatagttacaggaaatacttcttctataattctgattttgactcccatcctccaccatttactcatccactcattacctaaatcttggctttctttcctatattgtaaataatccatccaaacttctagccagtactgtcaggagggttcttgctcgagtgagctgttaatactattttccactgacaacttctgcacatcgaggacacagtgtatctgaagactccgctgtatacttccaacaacgggggcatttttctttcgtagtcggcatgacaattactttataggaagactcttcacgaatatcaccacctataaaaaaatacatgaagagtatttctgataggcattcaacttgtaacactgtttcttaattggtttagcagaggcttctttttcagtcttttgtcctgccttggtaaagcttgtcagacacttccccatttgtcccattacatatatagccaagataatgggatcatacaactcaacacctgaagggagctgaggaattagagaccccgtgactctgagattaactgacatctcccaagtcaccgagttctacatctactcaggcagagcagactttctagctgttaaatttgggtatagttctgatgaatgacactgcctctccagctacatacttgactaagaatttttaaaagtcaaattatagtgacaactacagtgtcctcactcaaaatatctcgtgggacaaaaggaaccaaaaatatctccacaattaatactcttagacctcagattgataaaaatataaaactaagttattttctagtcattgtacaaagagtatgtgaacattacatggccgggcatggtggctcaagcctgtaatcccagcattttgggatgccgaggcgggtggatcacctgaggtcaggagttcaagaccagcctggccaacatggtgaaaccccatctctactaaaaatacaaaaattggccgggtgtggtggcaggcgcctgtaatcccagccacttgggaggctgaggcaagagaattgcttgaatctgggaggcggaggttgcggtaaaccaagattgcgccattgcactccagcctgggtgacaagcgaaattccgtccgaaagaaaaaattacacaaagtaaattaagccagaacttttactacacggtctatgctgccaagcccaaatttgaactgatgcctgtaagttagcttcccatctcctggtacccaaaagctatgaaaaacacaagcagcataagatacctgcttttttttttttttttttttttgagacggagtctcgctctgtcgcccaggctggagtgcagtggtgtgatctcagctcactgcaagctccgcctccggggttcacgccattctcccaccccagcctccccagcagatgggactacaggcacacgccgccacgcctggctaattttttttgtatttttagtagattcggggtttcactgtgttagccaggatggtctcaatctcctgacctcacgatccgcccgcctcggcctcccaaaatgctgggattacaggcatgagccaccgtgcccagcctatttttctttattaatgcaactctaccgctaccaatgaagatgaaccagactgacttttaaaatcttctataaaacaaatatcgacaaaatgcttgcttatgagataccattgttagaatgagctcaataaaacttcctccttaacccctcacaagaatggctaaatattttaatccggggtatacataataggaaattttagaatcaatactggggaacagtgggcaggactgggccagtactggggtactaagtatcaaagcagggggacacaaaagaggaatgggagcaagtcagcctaacataaacttcatatacagtgaccattatttattcaaaggacagaaagaaaatctctctccctcttctgtccctagccctcagttcccaagatcatcaggtaagatagttttaagagcgggcttagaaacttggcaattgtttttattatttccatagaaagatgtattccaagtatatatctacctttagaataaacccagtccactggaaagttggagatgacctataattattcaattctccagatgttacttgttactttcatctccttcttaccttctaagttgatgaggaatttccctttaagctcgattacatctgcagtcatctctcgtggttcctgagccagtaaagttgactcagaagccatcattaattcattcaactgagaggtgctggaagtctcttcagactgcagcatctggaaggaagcatgtgaaagttacagtttatgttaaatttgtaccataaactgaggttataaaaagaaacactataaaatctcacgtttagagaggaaccttctggtataccattgcatcctgagcaaacatcactaaatgtatcaatcctaattagcataaaaggttttaactaaatatttccatcaacagtatttattgagaatgccaggcacttcactttgctagatcctaagatgtctcttacttctaattgtcacatacatacacacaaaaaaaacctatatggtgtttattatcctcactttacaaatgaagaaacaagcaaagagaggttaacttgcccaagattctcaacccatacgtggtggaactgcaggtcaagcccaggtctgtcagcctcaaagcctttttttttttttttcatgtatcattgggtgaggggctaaaatactatctcaacaggtaccagcttttagtaatgtatactgatagtggcaatctgaacaatacgcagaacacttatgaagtagactgaatttgtctgatgaacacatttttctctgtaattttgatcttcaaagtgagtttgtaagctaaccaacatagacattcctttaaaaattaaagcccatgagaaataagagactcaaagagattaatttggttttaacaagtttatgcaattagtaatggatagaaccaggactccatcttacagctacttggtatgattcctaaggaaaatacattcatgtttttgaaaatcccaaagtattttttccaataaaattgatccaaacaagctgttcttcttttcagttcattacttagaaagactgaagacaaaggaaacacagtatgtaggaaaaaaggccaggactaggctgtgttaccctgtctaggtcacagcttcagcagtcctcacttcctcacttgtaaaatgaacagcttcccaagttttaaattttaaaatgggaaaatctcatctattatacctactagctatttcaagctcaaatcttaatcttgctaattacatcattaaaaatttaaattgagcttaccatacaaaataagatggatgttttttagaaaactgacactaataaaacttttaaaaaatagctcttccaccgtctttctgcaccaccacaatggtgcgcatgaatgtcctggctgatgctctcaagagcatcaacaatgccaaaaagagaggcaaaagccaggtgcttattaggccgtgctccaaagtcatcatcctgtttctcaccgtgatgatgaagcatggttacattggcaaatttgaaatcactgatggtcacagagctgggaaaattgttgtgaacctcacaggcaggctaaacaagtgtggagacatcagccccagatttgatgtgcaaagcaaagatctagaaaaatggcaaaataatctgcttccatcccgccagtttggtttcattgtactgacaacctcagctggcatcatggaccatgaagaagcaagatgaaaacacacaggagggraaatcctgggattctttttctagggatgtaatacatatatttacaaataaaatgccccgtggaaaaaaaattatattcattgccaattctcttcttaagcatttagactggagaaaaatcacatcattatgttaagctataagccaatctggccaatcaacccctaaaaatcccaagaataaaattctgatggcccttctagaaataaaaataggataaatgctttgaaatatatgtggtaacttgctggagaaaatgaattttctccagatttcacaaaataaaaatggaaactctttttgggtttgttttgaatctggtccagatggatgaaattctcaggaaacctgacccttaatacaaaactcccattttttatacattcaaagacgatcgcgatcaatttatatgtcccctgtcttctaaatagtcctgaggccttttgtttgaaacagaactttatctattccttccctatccctacacagtaatatgtatgtgttacatgcacagaacacgttttacaagacatggaaaagaatatggtgaaataggaaacaaaagaatcagtgatgatatcaggattagaagacggaaaccctaatttctaaattaatttttttttaatttagacacttttttttaaatgtgcatgactttgcttaatttattaaaagatatttaaaagtgaaaaagtatgtgaaaaggaacataatagaataattgcatagtaaagttacacataacccaatgttatttgattaatttagacacattttaaaagcaaatttcaggcaaagctctatgatactaacaccatttcaaaaggtacatattgctgcatacctctattatctcaaaaagcagtccaggttctatcacagtgataaccttgtactcagctgcatttttgccagggatgcttccaagaaatgagtctcgcattgcacacgcactctccacagcttcttccaacccgggctttttccagatagaactagtactaatccacccagtacggaaaacactcttgggctcttcagaagaacaaaaatagtaaactgctttacaaacatcctaaactgtatatgaagctctaaccattaaatagttaccattaatgggaaataagaattgttatttatggtaatcaagtgatgaaatattatggatccatcctaattatttacaaaacatttatatcagcattggaaaatctttgttatatttaaacaaaagagaaaatatataataagatctcaaagaaaaaaaggatgcttagaaaaaaataaatagaaatatcccaatattaacagctatcaggagtaacattataagtgacttccccctcttcctacacttctatagtttctaatttttataaacttaatacaatcagaagaaaacaactaacataaaactcactaaaagcactatattttgttttaatacaacctaaaatatatttcagaacattttttttgacagtcttgctctgtcacccaggctgaagtacagtggcatgatcttggctcactgcaacttccacctcccgagttcaagcaattctcctgccttagcctcccaagtagctgggactacaggcacccgccaccaccatgccccactaatttttatatttttagtagagatggggtttcgccatgttggcctggctaattttgaactcctgacctcaagtgatctgcccacctcggcctcccaaagtgctgggattacaggtgtgagccaccatgccagccatttcagaacagttataaaggtatttaagaaaaaaggtgatttctcgacactgtcaagctgctaatacatttcagaaagcacagaattctgaaatttaccctactcctctacaaataggtgcagaaacaaatacatgaccaagacacactgtgtcacacagcagtcactgtaaatggataagtgccccttttatgaagcagatagaagtagaagttgcaccttgatcagggatatttctcattaagagaataaatgaagtattccttacctttaatataaggtatgtgctggaacacctcttcagccaggtgaggaagaatgggagcaaaagaacgaactattacatccaaaatttcaactaatgcagtctgacaagagcgtcgtttggggtcattttccttttcacaatagagcctgaacaagaacaacttattcagcagttgacaatactttatacattatggtcacctagatgggacctgcctcaggttgagtttattcctagtggctaatcctatggctctaatcatcttctacttaaagaatacaatacactctcctacaattttactccgtccaggtgtacccacctccttgaaagcactcatggctacgctatctcattctgtttctcaggtggatgacaactagagtctagactactgtattaaaggactatgaataagttagttgatggtatttaacatgtggctcccacccactccaatgttattagtgttttaagggaaggagtaggagttataatccctatgtgcaaggtccttggggtgctgacaggctgaggataacgcctcagactggactcattaccatgaaggtaggaccgtcacctgcacactggagcaacagatgaagacttggcatcaaggcctcttctacaaggatactgctaatattatacactgttaccatataattgcacatatatatctctctcttcccctcaggatttgagaactcctgagaacaagcattatgttcatcgtctgatattagtagtgatgattttttgaacactttatcaagcacagctttaagcacattattgcttttccttctcaatcacgaggtaagtattattatacccattttacagatgaagaaacagattacagaataagttgccccaaatcagaaagctagtaagcgggaggtcaaacctttatactcagacttgactccggaacccaatctttttttttttttttttttgagacggagtcttgctctgtcgcccaggctgaagtgcagtgtcacgatctcggctcactgcaagctctgcctcccgggttcacgccattctcctgcctcagcctcccaagtagctggaactacaggcacccgccaccacgcccagctaattttttgtatttttagtagagacggggtttcactgtgttagccaggatggtctcgatctcctgacctcgtgatccgcccgcctcggcctcccaaagtgctgggattacaggcgtgaggcaccacgcctggcccggaacccaatcttaataactgcacaacactgcccatcttgctcatcactgtatccctgacggttgccaaacacaagtagacactcaaaaaatacttgttgaggttttgttgttgttattttttgagacgagatcttgctctgtcacccaggctggagtgcagcagcacaatctctgctcattgcaacctccgcctcccaagttcaagcgattctcgtgcctcagtctcctgagtgactcggattacaggcatgtgccaccatgcccggctaatttttgtattttgccatactggtctcgaactcctggcctcatgtcatccacccgcctcggcctcccaaagtgctgggattacaggcgtgagtcaccacacctggccattgttaagcattttaatatttagtcatacatacctatctttgattatactgaaataaaagttagagagctctctggtataaaacgtccgtaacagccgaacaacttttccaaaatcatattgtttgtataattcggtaatctagggaacaaagccaaaataaatttggaagctgagacaggcaaatgaaaatgtaagtcatcacaagcaaaatatgctcctttcaaaaatatgtttcaatgagacaaatacaaaacaggcaatatgcaagaactcctgggaatcttccaaatgtcatttctggataacacatttgactacactcagaaaatactattttactctgagaactacgaaaggacattaattaaggaaagaatgagattgtaaataacaaaatcacaccattttaacaacagcaaacagtggacgtcaccaacaattcattagtgttccttcatttatgcctcatttatttttgatttgggcaaaattggtatgtacacctctgacttaagggtacactaatgcaaacacatttccaattatgagaaaacacaattttttttttttaagacagggtctcactctgtcaaccaggctggagtgcagtggcacaatcacagctcactgcagcctcaaaaccatgggctcaagcgattctcctgcctcagcctcccaaggagctgggactacatgcactggctaacacgcctggctaatttttaaaatttttctagagataggttcctgctctgttgcccaggctggtcttgaacacctggcctcaagcaatcctcccacctcggcctcccaaagtagtaggatttataggtgtgagtttccacacccagccagaaaacagaaattatttaagtctatatgaaaatgagtaagtatcttatgagacaaataggatagtccattttggttatttctgtactttattatgaggagcacatgtgcagataaagtataactccactttattccttcttgttggaaaaatagagctaatcatgagagaaaaatctggtccgaggggaagtctggacatatttctcttcaagagtgctatagttactatttccagcaaggtctgttccactcagataaaactaaaattttaacctacaatagtgctgatatttctagtttccaaaagtttattaatttacatttaccttgtttgccaaatcctgcagtaagtgtagcatgtactggtctatgacatacatatcgtttacagggatggaatctgtttctgggttgaaatcagccacatttcccaaaagaaagcgaagtgtattcctaagctattcataggaagaaaaaatatgcagttaaaaaaatctaatggtgccttcaattttcactgaaaagttattttattactaactcttgtcattttcttagtggggtatttttattatcattccaaataagactacaaatgtaaaaaaataaaaaacaaaaagtacacaacaaactcttattccaatagcccagttataggaacaaccactggattttacgcctaacgactgaattttcattatatttctttattacgttggggcaaatcacctttcagtagcccagtttattcatgtgtgtgggtcagaataatgttatttcacttgcttcacaatgaaataaagatacatggaaaaatgtgaaaggttattgagtacataaaagtatacaaaattaatataatctatactatgctatattacattttatatattaataaaatataaaggatattatatacaaattatataaaattactggtattactaccaatgttttgaaacaaataaatttacacaggagttttttgttttttttgagacaaggtcttgctctgtcgccaggctggagtccagtggcgcgatctcggctcactgcaacctccgcctcctgcgttcaagtgattctcctgcctcagcctcccgaacagctgggactacaggtgcatgccaccatgcccagctaatttttgtatttttagtagagacagggtttcactatgttggccaggctagtctcgaactcctgacctcgtgatccacctgcctctgcctccaaaagtgctgggattacaggcatgagccaccatgcctggccaacacaggagattcttaaaatctcacaataaatgaagaactcgttttcattcagtttttttcagttccaaacaaaatgtgtctcattttttaaaacaatgatttgacaaacttgtcctttagaaataggaagaataatagttctaaccttgctaatatcatctctggcagcattgagcacggatgggccaattgcaacttcggtgaagacattggaatcagctacccaccagcgaaggacatcagcaccatacggaggctctttgctttgatccttttcat

SEQ ID NO: 97838 - DNA, 44527 bp, Homo sapiens
tctaaccataaataacagccaacacttgcttatttccattccaattacattccaatctattccattccaatctactcaactctgaaatacaaggtgaggtttctgaaatgcgtgtcaaagtacgcatctcttaaaatctttcagtaatgtccccatacacctcagattgaagtctaaactctttatatgatatgcagcaccctacaaaggtttagtgccactaagttctcgggcattctttcatcactccccatgcttcactcctcacccccgacatgttgaaggacctgcagattcccgacacacatattcttgctattctttggcggcaatgcttgccattccccaaatctgggaacaacatgcatggcagtctaagtcacttcccttccctcacttgctgtatgattttgtccaggttactgtgcacttacgggcctgctttcttatctgaaaaaaaaaagtgttaatatccatcttacagggctggtgtgaagattaaacgaggaaacatttgaaactgtcactctttctggcatacagaaggtattgactaaaaaacctttaaaaaattagatgaactcttataactgtcagaatatttaggctaagtatatttacttaaccaatattccaagaatatcagggatttttaaagactagaattacagaagctaaagaggaatctctgctcttagaaagttcagactaggctgggcgtagtggctcaggcctgtaatcccagcactttgggaggccgaggcgggaagatcacttgaggtcaggagttagagaccaccctggccaacatggtgaaactccatctctactaaaaatataaaaattagccgggcgtggtggtgcgcacctgtaatcccagcaactggggaggctaaggcaggagaattgcctgagcctgggaggcggaagttgtagtgagctgagatcgcgccattgcactccagcctgggcgacttcaaacgagtcataattccaactagggatctaaaagatccaagaagtgggcttcaacttccccttcattcatcataattgaggtttttaaggttttttttaaggacgggggggtgggggtgactagccaatatggtctcgaactcttggctcaagcgattctcccgccttggcctttcaaagttctgggattacaggcgtgagccactgcgcccagcctgggtttttatttacatgtggacatgtgaatttactttttacaaggcattggaaaagtgcccaaagtctatctgttttgcctacggtagacatgggacatacgtgcgatacatgctggtaactgggcatcgctagtgaccccttaatgtcccgctccagaacctggtacaaaggaggggctcatctagagatttcttcacttaggttttcagcccacaaaatctgtgcgaagcagacgaattccaccaatctggtcacacccccgcccacccgcaccggcgtggagcctagaggtgtggcgcctgcgagcgcccggtgcccgcggccggatcgggcctctctggaggccccgcgccgaggcggggcccgtacctgctggatctccagctccgtgtccggctgctggcggcccagcagcttcatggggaagctcgtctgcggcagcagcaccgtgtcccggtatctgccactattcgagttcggctggtggttactggccccggagaccgaccgcaccagaagcctcttcgtcgccccttgccatcccgggctgcagggaaggcggggcgtcccccacaaacttcgggcagtggccagggcggccgcgcccggcccgcgagggcgcagcccccaacgcatggtccggcaacccctgagagcggggtcctccgctcccgccccagcttgaaggggcaggaccccaggaaaccaaggggagccgagtaagagggcgcacgcgctccgggagcggaaggggcggggagggagcggcgggtagtgggggcggggcggtgggcaccgccttcccggagtccgcggaggctgagccacctccgggtcctccctgcagccgccggggggcgggctcagattcacgggggcggggaaaggtggggctcatagtccaatcgctgtgccctgctttttaaatatatatatatatattttttttttttttactttaacacaacatagctatgattgtatcactttaacatgtagccaataaaaagtaagatattttacatattctcttcatacgaagcctttgaaatttgacatgtactttgcacatactgcacatctcaatctgggctaaactcatggcaaggcctcaacaggcacacttgggtaatgactacgactgtgggcagcacaagttcagtgaaaatattgtaaaataataaaatttcagcaaatcgagttttaaagatctaattggctattattaaatattcctaaacctttctacaaaatagaaaggatctctgatgagctgtgggggcagggtgaggtttataggcagaaaaggttgaagaaggcagaaacagggaacgaaaagcagacgccatttggcttaatggatttggctatcatctctcctgatttcctggaacgcagaccttacaagtaaacagcctagtgcaggagctcagtccaaatcaatgacttcccatagattttaacaatattataaaacaatctaacctttttttaagattctctgaaatccctgttatatcccactcatagaatagtatggtatatatagcaacttctgctcctgtttctgacagattctgctctatttggttgtccagttcataatagttcacaattgttaccatttcattgttgagtatacaacttgggaatagccttcctaatcataaaacacaacatccagaacatttggttcacataaataagaaggacagattttctacaagtatgaaaacatatatataccaaaaaaagataccggaaagtgagaaaccaagtgacaaacagaaagcactcaatgtcagcctttcaccaatcaatgactccagctctgtacctgaattaattcacttaatcttcaaaaccagatgaggtgaagacacagcataccaaaaaaacctgtgagataggaactatgagtatttccatttcacagctaaggaaactgaggcacatagaattatgtaacttgctcaagatgatacaactaagtagcacagctggaattcaaacccaggcagttagattccagtgtgtgtgcatagccaccatgttatgttgtctttcctacactatactgtggaagaaaacatttgctacacattaaaaaataataatacacaaaatgcataaagagctgctacagatcaaaaaaacaaatgtaaacaacccaatttaaaaaaaaaaaaggataaaagaagctggacacagtagctcatgcctataatcccagcaccttaggaggctgaagtggaaatatcacttgagcccaggagtttgagacaaccctgggcaacatagggagacccctatctctgaaataatttttaaaattagctggatgtagtggcatgtgcttgtggtcccagctgctttggaggctgtggtgggaggatcgctttagcccaggaagtcaaggctgcaagtgggccatgattacaccactacactcctgcctgggcaacacagtgagagcctgtctcaaaataataataataaagcaaaagaaatgaacagtcaactcagagacacagaagtggaaacagctaataaacataaaaagatcctcaactttaggagtcatgggaatagacagttaaaataccattttctttccagcagattaaagcaaaaataaagaagtttgataacagggcttgggagaatgtgtgaaagtggactgctgatggtagtgttaaataggtactgtcggccaggtgcggtggctcatgcctataatcccagcacttcgggaggccaaggtgggtggatcaccagaggtcgggagttcaagaccagcctgaccaacatggagaaaccccatctctactaaaaatacaaaattagccgggtgtgatggcgcatgcttgtagtcccagctacttgggaagctgaggcaggagatttccgaatggcaatttagcaatatccatcaccatttaaaatgcgcttcagctgggcgcggtggctcacgcctgtaaccacagcactttgggaggctgaggcaagtggatcacctgagttcaggagttcgagaccagcctggccaacctggccaacatggtgaaatcccgtctctactaaaaatacaaaaaattagccgggagtggtggcaggcgcctgtaatcccagctactctggaggctgaggcagaagaatcgcttgaactcaggaggcacaggttgcagtgagaaatcaggccactgcacaccagcctgggcgacagagcgagactccatctccaaaaaataaaataaaatgcacttcatctttgacccacggtttcacatctgggatctatcacagctatagtcttccaggagcacaaagatatatttacatagaaactctcctaaccaacctctacataacttgctgaattcaactatgccgttttctcgtaaaacctatgagaggatacaatgaacacttgggagatggctactctttaggatgactgcagatttctattctcacttgttgagcttaccttgcattatgtttgtctttatttaagccatttgtacttgtcatgtaattatacaatttaattataaaaaccaaagtatggccaggtgcagtggctcatgcctgtaatctcagcactttgggaggccgaggcgggcggatcatgaggtcaggagttcgagaccagcctggccaacatggtgaaaccccgtctttactaaaaaaaaaaaaaatgcaaaaactagctgggctgggtggtgtgcgcctgtagtcccagttactcaggaggctgaagcaggagaatagcttgaaccctgggaggcagaggttgcagtgagccgagatcaagccattgcactccagcctgggcgacagagtaagacgccgtctcaaaaaatatatatatgtatatatgtgtgtgtgtgtgtgtgtgtatatatatatatatatatatatatatatatatatatatggttaaagtaatataatttaagttatgtatatttttccacttcccaaaaagggtctacttaactcacagagttattgtgaaaatcaaatgaagacgtaaaagcctttttaagctgggcgcagtggctcacacctgtaatcccagcactttgggaggccgaggtgagcagatcacctggggtcaggagttcaagaccagcctggccaatatgatgaaaccccgtctctacttaaaaaacaaacaaaattagcccggcgtggtggcgcgcctgtagtcctagctacttgggaggctaaggaggaaggatcgcttgaacccaggaggaggaggttgtagtgaacctagactgcgccactgcactccagcctgggcgacaggatgagacactgcccccttccccaaccacgccccccagtaaaagatcccatctgtacacaaaaaatattttaattagctgggtgtggtggcgcgcacctccaccagtagtcccagctacacggaaggctgaggcgggaggatggcttgagcctagaagtgggaaggcagcagtgagccgtaatcgactctgggcgacagagcaagctatctatcgcttaaaaaaaaaaaaaaaaaaaaaaaaaaaaaggtaagcaagcatctttgacacaattctgcataaagttgctgtgttattgcgtggggagtgggaggtggaggtgtgtgtggtggacctgctgaagcctgtccacggaccgctaggggttcgaagttaaatagccgcagagtggtatcactaatacaaagaacattttaaaacagtgaactctacgaagtgggctggaagacagctgaaaccaaaaccaatcttttttttgtttcaacacactgttgctggcttaatgtgttctttccttcttctttttctttttttagccaatctttgaaagttgacacatctttcgcttttatttaatgcaacaggtgacttgcacctacggagagcttggagaaaacacggacaagtggaattttcccgcggatcaggagtctaaagaggcagtgtgaaatcgctgttgtgcgcttgcgcgcagtttcccgcatgctcagtagctgaggtagggatgccatccttctcaaaagacttattgacagtgccaaagctcggtactggacacaacgagggacctgggtctacgataamgcgcttttgctcctyctgaagtgtctttggtccaacgttgttccaggtttgtcaccgtttctctccggccggtcagggcaagagccaggtagataggatttatgttaaaaaaataaaacgaaaaaggtttatgtgaatcagattgcttctccagatattctaacttccgacttggactcttgagtgtcgatattttaattgtttatctgtgcttttattttcgtgatccggaaggtttttatagccatatactgtagaaacaagacaaacctagacattgagtttgttgatgcacccaaatttagaaactgcttggtacctaaaattaaatttctttaaacagcaaatattcttccaactgccatttctacatatttataggtttgcgtgatttatttggatttctctgtaaatataattgttggttcaaaagatacgtactttatacttttattaaggttctcaaaactctcctaagagggttcaccgctttgccaacaatgctcaggaacatgttccctcacacccttgcaaactggacaaaggacaaactcttcttctttcttcttttttcttcttcttcttcctcctccttcctcctccttcttttttttttttttttttttttttcgagacggagtctcgctctgtcgcccaggcttgagtgcagtggtgcaatctcggctcactgcaagctccacctcccaggttcacgccattctcctgcctcagcctcccgagtagctgggactacaggcgcccaccaccaagcctggctaattttttttgtatttttagtagagacggggtttcaccgtgttagtcaggatggtttcgatctcctgacctcgtgatctgcccgtctcggcctcccaaagtgctgggattacaggcgtgagccaccgcgcccagcctttctttctttcttttttttttttttttaagacaggktctagctctgtcccccaggctggagtacagtggtgccattatgtctcactgcaaccttgacctcccagggtytggtgattctcccacctcagcctcccgagcagctgggactacaggcatgtgccaccacaccatytaatttttgcatttttttgtagagacgaggttttgccatgttgcccaggctggtctcgaactcctgagctcaagcaatacaccagccttggcctcccaaaaagttytaggattacgggtgtgagccactgcattcagcgacaatttttttttttttttttttttttgagtcggagtctctgtcgcccaggctggactgcagtggcgcgatctcggctcaccacaacctctgcctcctatgttcaagcaattttcctgcctcagcctcctgagtaatttttgtattactatgcctggttaatttttgtatttttagtagagatggggtttcaccatgttggccaggctagtcttgaactcctaacttcaggtgattcacctgccttggcctcccaaagtgctgggattacaggtgtgagccaccgtgccctgccaaattttcttttctatgccaatcttaaaaataaacaatcatggcccggcgcggtggctcacgcctgtaatcctagcactttgggaggcttaggcaggccatgaggtcggaagttcgagaccagcctgaccaacatggagaaaccctgtctctactaaaaatacaaaattagccaggtgtggagatgcttgcctgtaatcccagctactcgggaggctgaggcaggagaatcgcttaaacccgggaggcagaggttgcggtgagccaagatctcgccattgcactccagcctgggcaacaagagcaaaaactctgtctcaaaaaataaataaattaattaattaattaaaaataaaataatcatttctcattgttttagtttgcatttctttcataattagtgaagctgagtatttatgtatttaatggccagtgcttttctctttgtaggtgttgcccgttcttgtttatttgctcatttttctattggattattcagcttttatatactgatcttttacaaattaagtcatttgtctggtatgtgatacaatatttttttctcattttgtcaagtacctgtttatttagtttatggtattttggccatgtagaagttttaattttatttttatttattgattgattgattttgagacggaatctcgctctgtcacccaggctggagtgcaatggtgcaaatgatctcagctcactgcaacttctacctcccaggttcaagcaattctcctgcctcagcctcctgagtagctgggattacaggcgcgtgccaccaagcccggctaatttttgtatttttagtagagacagggtttcaccaagttggtcaggctggtcttgaactcctgacctcgtcatccgcccgacttggcctcccgaagtgctgggattacaggccaccgcgcccagcaactcttagttttatagagtcaaatttatcaatagaatattttatggattcttggttttatgcttaaagggcatttaccaagcttatgaagtttataatttttatttccatgcttttatggtttctttttttacttttataaaccatgcattgaaatgtatttatatcaaaatgtatttatatcaaaatatcaaaagaatgcaaaaaggactcaactttttttttttttttttttgagacggagtcttgctctgtcgcccaggctggagtgcagtggcaccatctcggctcactgcaacctccgcctcccaagttcgagcaattctcctgcctcagcctcccaagaagttggggttacaggcgcccgccaatatgcccggctcatttttttttttttttaagtttagcaactcaggccgggcggagtggctcacacctgtaatctcagcactttgggaggcaggcggatcacaaggtcaggagttcaagactagcctggccaacatggtgaaaccccatctctattaacagtacaaaaattagcctggcatggtggcttgtgcctgtagtcccagctactcaagaggctgaggcaggagaatcggctgaacccgggaggcggaggttgcagtgagccgtgatctcgccactgcactccagcctggacaacagagtgagactctgtctcagaaaaactttagcaactcagaccaggcatggtggctcatgcctgtaatcccagcaccttgggaggccgaggagggtggatcacttgaggtcaggtgttcgagaccagcctggccaatgtggtgaaaccccatctctactaaaaatataaaaaaattagccaggcgtggtgatgcgtgcctgtagttccagctactcagccatatgaggcaggagaatcgcttgaactctagggggcggaagttgcagtgagccgatatcaggccaccgcactttagcctgggcgacagagcgagactacatatcaaaaaaaagaaaaagtatttaaaagtttagcgactgccctgccatttatgcaaaattgaatttcccccatgatttgaaacactacctttagtgtgttcggttctatttctgcaatttatttccttagtttgtctcactagccaaacttttatatcatatgttgattaaatcatattttatcatattttgataattgataaggggagtacctctgttcatagttctttttccagaatttgctccattatgcttacattttaattttttcagatgaccttgaacattatcatcaggccaagttccaaaatataaataattttagtattttgacttggaactcatcatttttagatcctaatcctcatatggtcmcaatcgttatatgagaagaaactaatgtttgattcctgttgtttttttccatccttctgaactagccctttggcagttgtaaagacttctcaaggataggtattaggttgatggccttaagtgttatacagctttttttcttgtctactctccaagcctaaagctcagaatgttatgaagaaaagcctgaactatactctgattgagggtcatgttgattatcattttgtattctcaaggtcagaatactgttggagaaactacaggaactttttgcccttaacactgccctaatgtccctgcaaaataaccgaaataaggacaatcataataatggttagccagtattatttggtgtttaccttgtgccaggtaaagcgctttctttacacgtgttactcatttaataattacagcagccctatactatgagtactattgtctccattttacagattggggcacagagaatttaagtggttttctcaaggtccacagctgagccaggatttgaacacaggtagtgggctgcagagcctgtgcccttaagcactgtgctgttttagattaggctttcagaaagacaccttcacaagagtgttttaaggcccagaagatgtaaaactggtagagaaagaagtacaatggtgttatttgaactgctttaagaaagttaacttgcctgtagctagtttgggccttgctcttaatctacctgtatcatcaaaaggtaaatctcactgtagtataggagggagcataatgaaaaaggctaaaagggacctcttgtatagattttttgttttgataatatgactatgtattttttctttttttttttttaaccaagaaccaacattgtattcatctgtttaaaaaatagttaagaaaacgattaaggctagggcatagtactatttcattactaattcagtttggaccagagaagtacttcaaagaagaatggtaaaaatatttccctatctgccaattaaaagtgatttgtggaatctctttataaatcattgtgtgctttacatcaacactatttttcccatttttattgtcttctatttcttatttttcccattcttatgttttataagctgatgttagctttaactggtggttaataaatataatatcattttgtgaggaaattagtagacagacaatgcctgaaagtttttccatggaagaaaacaccatggacttggcaaatacaaggggaagtagttgagtcatttatgaagcctgacaagggtcaaatggttgcttaactggttcaaaggtaaatgatatctatgaaaagttataacaacaccatacagtgagggaaggtgatcttcctattacaaaagaattcttatataacatgggaattgaaggagcatacgaacacataattaaaatatggtcaagacagctgggtagaacaaatcagttgcccaaagaccacatttccagtgcataataaatcagatatatgtctggatatggatataaaggaatagaaataagaccaacaaagtgtttactaaattatttctgtttccttttctttttctttttctttttttttttgagacagagcctcgctatgttgcccagggtggagtgtagtggccgcaatctcagctcactgcaacctccacctcccgggttcatgccattctcctgcctcagcctcccgagtagctgggactacaggtgcccaccaccacgcccgactaattttttgtatttttagtagagactgggtttcactgtgttagccaggatggtctcgatctcctgacctcgtgatccacccacctcggcctcccatagtgctgggattacatgcgtgagccactgcgccccgccctatttctctgttttctatctgaagtgctcctgaattagtagtaattgtaactggtttattccacatgtaactcctagtatgccaagaaaattaatctagcttgattatgatatcataaaacaaacacattatatatagttatccctccgtatatgagggaggttgattccaggaacccctgagaatacttaaatctgcacatactcaagtcccacagttggccctgcaaaacactcatagatgaaaactcagttttaacagatcacaaactctcttgaaactaaaataaaaatatattttaaaaagtcaggctttcctgtctacagattttacataccttttctatccgcatttggttggaaaaaatccacaaagtggaccggtgcagttcgaggccgtgttgttcaagtgtcagctgcacttagaaacccgttttattggccgggcgcggtggctcacacctgtaatcccagcactttgcgaggccgaggcgagtggatcatgaggttagatcgagaccatcctggctaacatggtgaaaccccatctgtactaaaactacaaaaaattagccgggcgcagtggcgggtgcctgtagtcccagctactcgggaggctgaagcaggataatggtgtgaacccgggagacggagtttgtagtgagccgagatcgcgccagcctgggcgatagagcgagactccatctcaaaaaaaaaaaagagaaacccgtttaattttcatcttaatttccagacagctattggtcacagtacggtattcattaccttacataaatttcttttttttttttttgagatggagtcttgctctgtcgcccaggctggagtgcactggcacgatctcggcccactgcaatctacacctcctgggttcatgtgattctcctgcctcagcctcctgagtagctgggattacaggtgcatgccaccacgcccggctaatttttgtatttttagtagacacggggtttcaccatgttagtctggctggtctcgaactcctgacctagtgatctgcccacctcggcctcccaaagtgctgggattacaggcgtgagccactgtgcccggccataaatttcaattccatcttccttttgaagagtttcaaacacttcacttattgttccagttaggttcataattcctgtcaatagagtgtggatgatagaaacaagatgtaaaggaggctgggcaggtggatcttctgaggtcaggagtacaagaccagcctggccaacatggtgaatccccgtctctactaacaatacaaaaattagctgggcgtggtgtcagttgcctgtgatctcagctactcgggaggctgaagcacaagaatcacttgagcctgggagacagaggttgcagcgagccaagattgtgccactgcactccagcctgggtgacagagtgagactacgtctcagaaaaaaaaaagaaaaaagatgttaaaggggttaaaacatcaaatcaaatattcagtcagaaagtcatgrtagaacaatgactattgctgaatggaggtttataatgttctctatagtcccagggctgagcgtggtggctcaggcatgtaatcccagcactttgggaggccaaggtgggtggatcacttgaggtcaggaattcgaaaccagcctggccaacatggtgaaaccccgtctctactaaaaatacaaaaattagccgagtgtggtagcaggcacctataatcccagctactcacgaggctgaggcaggagaattgcttgaacccaggaggcagagtttgcagtgagctgagattgcgccactgcactccagcctgggcgacagagcaagactctgtctcaaaawatatatatatataaaaaatataaaatatatataaaatacatatatatcatatatattttatatatatatacactctctctctctctctctctctctctctctctctmtmtatatatatatatatatatattgtccttggaacaatcatgtgttcccttattgcgatgaaataatgttgatttgatttagaggtgggaagtttttgtcacaggttaattccccataaaactctaagacagagataaagtggaagaggtttattagggagtgctttcggaatcatttgtggaagggaaggggaggaagggaagaaagttggagaaggtatcttgggctgtgatgcagtctcagctaaggcctcagttgaccccatagggtattctggaagctagatggcccttcagtgctggggtggtagcccacttggggtaggaaatggcctttaaatctccctattgtgacgtttcaggtgaagtgatccttctcagcagatatactcccaamgaaagatggcagctgaaagccatcttttgacagctgtctcagcaagtggggaaataagctcttcagttctgaagggaatgtgggtggtacatccaggacagtcacgaaaatttcgggatttgaattcatattttcttttttttttttgagacggactctcgctctatcgcccaggctagagtgcagtggtgcgatctctgctcactgcagcctctgcgtcccaggttcaagcgattctcctgccttagcctcccgagtagctgggattacaggtgtgcaacaccatgcccagctaatttttgtatttttagtagagacgaggtttcaccatgttggtcaggctggtctcaaactcctgacctcaggtgagctgcccatctcggcctcccaaaatcctgggattacaggcgttagtcaccgtgcccggcctgaattcatatgttcaaaggaatgtacaggccagatacagtggctcacgcctgtaatcccagcacttgggaggccaaggggggggatcacgaggtcaggagttcaaaaccagcctggccaagatgatgcaaccccgtgtccactaaaaataaaaattagccgagcatggtggtgggcgcctgtaatcccagctacttgggaggctgaggcagaggttgcagtgagccaagatggcgccactgcaatccatcctgggcgacagagcgagactccgtctcaaaaaaaggaaaaggcaacgtacttgattctaaaggctgttttttccgtttatttcattggcgctagagacttctgacactccttacttttccaagtgactggtcttcattataatttgttaggttgcttgttctctttatctggctactgacgaagatggaggtaaataatagcagagaatattcattgattttcagaaaataattgtagttatatgcaatccctctgatgtggtgaggctttgtttccccacccaaatctcatcttaaattgtaatcctcataatccccatgtgtcaagggagagaccaggtggaggtaactgaatcatgggggcagtgatagtgagtaagttctcatgagatctaatggtttttaagggactctcccgcttcgcttggctcttcttcctgccaccttgtgaagaaggtgtcttgcttccccctttgtcttctgccatgattgttaagtttccttaggcctccccacccatgctgaactgtgagtcaattcaacctctttcctttatattaggttggtgcagaagtaattgcggttcttgccactggaaataataaattacccagtcttgggtcattctttatagctgtatgaaaatggactaatacaccctccctttttaattacaccctacacacctacatcccttatactattcatacctctttyggcgctgcctagttttatgttatagacgttaggttaccttattttatctacaactcaccaaaatattagctcctcaracacaaatcttacatctcatatttttagcctacaaagcaccttccacatactttacacatcacccacgacctcatacacaaactttttcacatgctcagcatcctgggccagtttctcctatgctttgacatgtctcatctgcagagagacataaaaaatacagaatttattgagagagttaatgcccaaatcgagttttttcgaagtctcttttagtaaatatatattaaagaatttactcagttaatgggagcaatcccaagttagcactcaattaatatgtgttgagttggatttaaataaataaaaccagtagttggctttgaaactaacaagacatttttcttgatctctttttagagtgtaccatggcttccagtaacactgtgttgatgcggttggtagcctccgcatattctattgctcaaaaggcaggaatgatagtcagacgtgttattgctgaaggagacctgggtattgtggagaaggtactcaaactctcatatcatttcataccaacttgatttttgttcttgaggtttagctaaatgatataaaaatgtggacagactttatcagttaaaataattgatggctcccttagggagactgcaagacgcttggttctaaagggttccatctctgctttgaaaatgattccaaggccgggcgtggtggctcatgcctgtaatcccagtactttgggagaccgaggcaggcggatgatgaggtcaggagtttgagaccagcctggccaacatggtgaaatcccatctctactaaagatacaaaaaattagccaggcgtggtggcgagcgcctgtaatcccagctacttgggaggctgaggcaggagaatcgcttgaacccgggaggcagaggttgcagtgagccgagattgcgccattgcactccagcctgggcaacagggcgagactccatctcaaaaaaagaaraaaaaaaaagactccagactttctacgtccaagatctttatttatatgtctragtcttctgaaccatatctatccccaaggcattgtaaccgagcttcaaatcctagagtaatctattacatgcagtgccatgcaatccttagtgaactcaacatgttcggtaaaatctggcatttacataaatatttgttataatcaaagtgatacattcttttcttcctcatggaaaagaaactcaaagcaagcgtgtttttcccagtatagtaattacaaacttaaatagattatcagaaagtttatagtgatagtcaattcttaaaagaaataccaccatgtttgtgttccagtttaaagcacaatcttctgaccgggtgcggtggctcacgccttaatcctagcactttgggaggccaaggcgggcagatcacgaggtcaggagttcaagaccagtctgaccaacatgatgaaaccccatctccactaaaaatacaaaaattagctgggcatggtggtgcacacctatactcacagctactcaggaggctgaggcaggagaattacttgaatctgggagagcgaggttgcagtgagctgagatcacaccattgcactccagcctgggcaacaaaagcaagactacatctcaaaaaaatatatatatatatgtgtgttattatatacatatataatatatattatatttatatataattataatatatataatgtaatataattatatataattatattatataaaatttattataaawtattatttattataaattatttattatttatatataagtataattattatatataattattatttattattataaattattatttatatataattataataattctatataattaatagttatatttgttattataaattattattaattatatattatatgttatatatattatatatatataaatcttccttgggatttggtaattacttcacattacaaattttacacgtaagttttcatatattgacttttaatccttaaattctttattataatctttttttttttttttttttaaagagacaaggtctcactcacattgttgcccaatgctggagtgcagtggcacagtcctactgatagcttgttgcagcctcaagctctgggctcaaaggaccctcttggcttagcctcctgagtagttaggactacaggcaagcgccacgacacctagctaatgtttttattttgtggagatggggtttcagtatattgcccaggctggtctcaaactcctggcttcaagtgatccacccaccttagactcccaaggtgctgagattatgggtgtgagtacaggtatgagccattacacttcgcctaaatctttctttattatagcctttaaggaaaagtgtattgtaatttcttccaagtgagaacattaataggatatgatttatcattagcactttaacgatttaaaatagagtgagttaagtcactcacttatgagtgatatatctatctagggttgttaccataagaaaaaatgagatatatgagtaaaaaacaacttagaaaaaagttgacgtgagttcactttttgaactcacgttcaaaagttgaatgtaaaacattcaatgtaattgcttttaaaaagttaatgtaaaaatcagcctgggcaacatagcaagaccccatctgacatggtgggacatgcttgtagtcctagcttgggaagctgaagtgggataattgcttgagcccaggagtttgaggctgcagtgacctgtgatcccaccactgtactccagcctgggcaacagagtaaaaccctgtctctaaaataaataaataatattaaaaaaaaaaattcataagaacaaatgaaataaatctcatttccttttttgatagatttatgggcctgctcatagaggaaatagagggtatcttgatttaagcaaaacattttttatagtctgtcattttctatttaagaaaatattcaagttatttttagttatatagacaacatctcccatcctgagccatgattaggtgcattcataactggatgaataacattatccacaaatttaaattcatgagtcattttcatcctggaaaaggatcactgttggctgatcacaggactctgctcctgacattgtactgttctctttaatcattaaataacatacagttttaaaaaatatggaatgtgttagctgaagtggaagatgatatagaaaacatgcttatcaaatttgtcaataagagaaagctgagcgggctagttcatgcatttgatcacagaataagtattcaaaatagttgcaacctctgagaaaagtggaccaaatccaacaggatataacaggaataatataaagcgctgtattcatgttcaagttatgtaagataaatctgattcaaatttgtttgaaaaagagattttagttgactacagacatgcttggtaataaccaacgaaataatactgctgctttcagagggctactactattattattattattattattattattattaatttatttttttttttaagaaggagtttcactcttgttgcccaggctggagtgcaatggcgttatctcagctcaccgcagcctctgcctcccaggttcaagcgattctcctgcctcagcctcctgggtagctgggattacaggcatgtgccaccacatccagctaattttgtatttttttgccttttttttttttttttttgagatggagtcttgctctgtcacccaggctggagtacagtggcatgatcttggctcactacaagctctgcctcccaggttcatgccgttttcctgcctcagcctcccgagtagctgggactacaggcgcccgccaccacacccagctaatttttttgtatttttagtagagatagggttccaccatgttagccagatggtctcaaactcctgacctcggcatccgcccacctcagcctcccaaaatgctgggattacaggcatgagccaccacgcctgggctaattttgtatttttagtagaggcagggtttctccatgttggtcaggctggtctcgaactcctgaccttgtgatctacctgcctcggcctcccaaagtgctcggattacaggcatgagccactgcgcccagcccctaatctcattttttataaagttttttttattatgaaaagtaggaaatggagaaaaatgccaaaataaacaaaaatcatccatcatgccaccattgccaatattttgaattatttcctttcagatccttttccttaacatcacttattttaagttgatcttatgttgaggttatattagacatacaattttgaaacccaggtagctaaaaaggaacagagatgtaatgctaagtcgggaaaaaaggtaacattctcattgtcttctgtagtgctcaggcatttctagtactttatatccttccgttgataccttatttttaaaaaaacagcaaaatcagtttatcacacaaggttccaatgatgatgtctggaactatgttgatagaataggaaatatttatcttagcgaggaaaagaaaattgatttcctcacatagtggaatggctttcaatgtgtcttttttttctctaccgcagtggtctacaaacttgattggtatttaactaatcttcaaactcaacaattcttttgagtaggttcattcaaaagatacttatagagcacctactgtgtgctaggcacagttctttagggaataaaatccttttgtggagcttacattctagcagaatagtactttgcattgagatatacagcaaatctcagtgaggcataaaacagttgcttttcataatgacttcttatctcattgcaaagtattgttaaaattctactaagatgaggctgggtgcactggctcacacctgtaatcccagcactttgggagcccgaggtgggcggatcatgaggtcaggagtttgagaccagcctggccaatatggtgaaaccccatctctactaaaaatacaaaaattagccaggcatggtgggggacacctgcagtcccagctactcaggaggctgaggcaggagaattgcttgaagcagagaggcaaaggttgcagtgagctgagatcgcgccactgcactccagcctaggcgacagagtgagactccgtctcaaaacaaacaaacaaacaaacaaattctactaagatgatataatctgtaaatctacttaaccaggcatatataaattgcaacatatcataaggctctgaaagcaaactaacaaaggaggttgtggttgtcacttgcaaaacttttctctttcactagcatgagtatctgacatattgattgagtgagggtgccataggtgagctatatgttaaatattacagcagttcatattcgtgttttttagatttttagaaacaggatttcttaggccgggcatggtggctcatgcctgtaatctcagcattttgggaggtcaaggcgggtggatcacaagatcaggagatcaagaccatcctggccaacatggtgaatccctgtctctactaagatacaaaaaattagccgggcatggtggcacgtgcctgtagtcccagctacttgggaggctgaggcaggggaattgcttgaacccaggaggcagagtttgcagtgagctaagatcgtgccaccgtactccagcccagtgacagagcaagactctgtctcaaaaaaaaaaacaaataggatttcttactctgtacctgtgaatcaacttgaggacctgttgaattattatgattaggattagtgtggaagttatagaaagatccacggaacacttttctaataactattaactttgccttgaaaagttatacatttcctatctcttaacctatttaagcaaaaggttgatgtctagagataaggaatttctaaactagggaagaaaatgttctggattatttaaaagctcctttccaaactttacccactattaatcctttgagaaaaaccaaggcaagaaaccagttaactcatttggtgttaagttctatgactctaaaaactgacagtgtaatctaaattatgtaggcactcatgcacaaggaatcagaggacaacttatttttcattagctctgctaaaatttgcattctttattacagacctgtgcaacagacctgcagaccaaagctgaccgattggcacagatgagcatatgttcttcattggcccggaaattccccaaactcacaattataggggaagaggtaagcgtcatcagagacatttttttaaaatctctgtttaccaaatggatttataactgacactttaatgatttatataccactattatgattttaagcattatatttattgttttaaacacaaaagtaattattgtattccttggacttggggaaaatatctgattttaagacattttggtctatttctaagccagwtgtcttaattattgrccatagaagatatggttactgttatacccagcatacaaactgtaagatgggcagagatctagaactttggaataaaatgggtttcgttgttgtttgtttttaaaattaggcttatttgcatacttatccaaagactataacactttgaaaatgagggaattaggccaggcgcagtggctcacgcctgtaataccagcactttgggaggctgaggcgggcgaatcacgaggtcaggagttcaagaccagcctgaccaacatggtgaaactgaaccctgtctctactaaaaatacaaaaattagccaggcttggtggtgaatgcctgtaatcccagctactcaggaggctgaggaaggagaactgcttgaccccaggatggggaggttgcagtgagctgagatggtgtccctgcactccagcctgggcaacagagcaagactccgtctcaaaaaaaaaaaataaaaaaagaaagtgagggaactgacatctcatgtaatacaagggaactatctgctgtcagagacacttgtttaaatgagtgtataatacttaaaaattcttttctttttaaactctcttcagtataatgacactggaaccatttagtcaattttgatgagccacatatggttgtttttgcaaatttttaaggtttgctttaaaagctctaaatataaatggtaaaccagaagaactagtgaaaactgtgatgctgcatttcttctgttaatgagacaaagcatactctgtaaacactaaacagcttcagtaaccattagggttatctctgctttaggatctgccttctgaggaagtggatcaagagctgattgaagacagtcagtgggaagaaatactgaagcaaccatgcccatcgcagtacagtgctattaaagaagaagatgtatgacccatatttatactcaactctctattaacctgggctttttgccatagtaaaggaaataatatttgcatgtaagatgaaaaattggtagttataaaataggggcaaccagaaacttgatatctttcagagccaacatggaagtatcaggcaaccatatggatttagagttcagtttctcatcctatgggtttcctttgcactctaaaaccgttatttaaaatacttttagggacaggcatggtggctcacacctgtaatcccagcactctgggaggccgaggtggttggattgcttgagtctaggagttcgagaccagactcggcaacatggtgaaactctgtctcaacaaaaaatacaaaaattagccaggtatggtggtgcacacttatagtctcagctacttgggaggttgagatgggaggatcacctgagcccatggaggttgaggctgcaaccagcaccatctcttttttttttttctgagacggagtctcgctctgtcaccaggctggagtacagggccgcgatcttggctcaccacaacctccacctcctgggttcaggcgattctcctgcctcagcctcccaagtagctaggactacaggcgcgcaccaccatgcccagctaatttttttgtatttttagtagagatggggtttcaccatgttggccagaatggtcttgatctcttgacctcgtgatccgcctacctcagcctcccaaagtgctgggattacaggcttgagccaccttacctggccccagcaccatctcttaaagagattattttttccccagttgaatggccctggcacacttgtgaaaaatcagcaggccatagatgtataggtttcacgctggccatggtggctcacgcctataatcccagcactttgggaggctgaggcgggcagatcacctgaggtcgagagttcaagaccagcctgaccaacatggagaatccccgtctcttctaaaaatacaaaattagctgggcgtggtggcacatgcctgtaatcccagttactcaggaggctgaggcaggagaattgcttgaacctgggaggcggaggttacagtgagccgagattgcgccattgcactccagtctgggtgacaagagcaaaacttagtctcaaaaagaagaaaaaagaaaagaaatagatgtatgggtttcattatggactctcagttatattctattggtctatatgtctatccttatgccagtaccacactttcttgctttgcattaagttttgcaattgggaagtgtaagttgtcctactttgttcctaccttgtgcagttttacatgtaccttacagcctggacagcagagtgagaccctgtctcattaaataaataaataaatacttttaggaagaaaatctaatttgttatttagtagatatgtagtagatttgctagtaaaacattcattggtaattggggatagaaggctatgaaacaggttgctaccttatatttttagaagaacataaatgtcatcctgcttgctttttatagttgcttaagttaaacctgtgacttcagatagccaccataatgtctttagttttccaatttttaattatttaaggcatattcattggagacttactatgaataagacactttgctctgtggtatggaggaaacaaagaaaatgagacatggtggggctgggcatggtggctcacgcctgtaatctcagcactttaggaggccgaggcaggcgkatcacgaggtcaggagatcgagaccaacctccgcctcccaggttcaagcaattctcctgcctcagcctcctgagtaactgggattacaggcatgtgccaccacgcccagctaattttgtatttttagaagagacggggattctccatgttggtcaggctggtcttgaactctcgacctcaggtgatctgcccgcctcagcctcccaaagtgctgggattataggcgtgagccaccatgaccagcgtgaaacctatacatctatggcctgctgatttttcacaagtgtgccagggccattcaactggggaaaaaataatctctttaagagatggtgctggggccaggtaaggtggctcaagcctgtaatcccagcactttgggaggctgaggtaggcggatcacgaggtcaagagatcaagaccattctggccaacatggtgaaaccccatctctactaaaaatacaaaaaaattagctgggcatggtggtgcgcgcctgtagtcctagctacttgggaggctgaggcaggagaatcgcctgaatccgctaacacggtgaaaccctatctctactaaaaatacaaaaaattagctgggtgtggtggcaggcgcctgtagtcccagctacttgggaggctgaggcaggagaatggcatgaacccgggaggcagaggttgcagtgagccgagatcgcgccactgcactccagcctgggtgacagagtgagactctgtctcaaaaaaagcaaaaaagaaaagaaagtgagacatggtgttctccatcagaaacatgccctcactcagaaattcacataatgttatcattgtagtggttaaaggcagcatatcctgaatcatattaaatgtcctaaacagaaggaattttccttttaaatctgctgccagttttattattcatttttctttggattgtatggactgtgtccttaagataatcagacttgtttttttaaaatcagcacttatatataaaaatgagtagcaactgtgcttgttcaaaacatttttttgccactttacaagtttttcctgtaccatgatctagagatcagtatattcattgtgcttagtgttcaaatgacaacaaacttttatcagttaagcatttcatgttgaaaatcatttttttgtatttttttttttgagatggagttttgctcttgtcatccaggctggagtgcaatggcacgatctctgctcactgctacctccgcctcctgagttcaagtgattctcctgcctcagcctactgagtagctgggattacagccacccaccaccacgcccggctaatttttgtatttttagtagagatggggtttcaccactttggccgggctggtctcgaactcctgacttcaggtgatccacccgcctcggcctctcaaagtgcgggattacaggtgtgagccaccgtgcctggcctgaaaattcttaaatcagacttttttcttattcaaatggactttttccatgattacaaaagaataagctttttgtactatctcaaaacagatgacattaatttaagccatccataatacaatttcaaacaggaaaaaaagagtaattttaatctatttaaatctatttttagaattttgtgtgcttgatttagatattttccttctctctttttaattttagctcgtggtctgggttgatcctctggatggaaccaaggaatatacygaaggttgatatctcttttgtattcatatttgacagtagtgggacaaggatatgatgttagttgtaaatatttgatattttgtatgttgtatggaaagctactatcatgtgttatgtttacccctaaagctatatttgtgctcatggttatcatacatcgttgattgttaagacaggagaataaaattcatctccttcaaataccaccccccayatactccaccagccccacacttctaatgtctcccagatgagaataacatattaaaccagtgttaccaaaatgactatactgaacccagctttattggggtagaaaaacgataacgagtacaactgtgtagctcttgctctgccaccaccaccatcccatgccctccccattcactctcccctaatctgtgaactgctttcacatttcatagcctcaccttctaaaggtgggttttgaaacacagtacaatatttctccttatctaagatgagaacaattagagagcaacaaattaaaataaaattggccatataaatgtaggaatgaacaagctcagagccagagttttaggttttgttttttctattagacagtcttgctcattgcccaggctagagtgcagtggcaccatctcggctcactgcaacctctgcctcccaggttcaagctgttctcctgcctcacctcccaagtagcggggattacaggcacctgccaccacgcccagctaatttttgtatttttaggagagatggggtttcaccatgttggtcaggctggtcttgaactcctgacctcaggtgatccactcacctgggcctcccaaagtgctgggattacaggtgtgagccaccgcacctggtaggttttaggttttaagcttagagttttatttttaaacttaagatctaggccaggcgtggtggcttaygcctgtaatcccagcactttgggaggccgaggtgggcagataattaggtcggaagttcaagaccagcctggccaacatggtgaaacaccttctctcctaaaaatacaaaaattagctgggcctggtggcacacgtctgtaatcccagctacttgtggggctgaggcaggagaattgcttgaatccagaagacagaggttgcagtgagctgagatcatgccactgcactccagcctgggtgacagagcaagactctgtttcaaaaaaagaaaataagaataataatgatgatgatgatgataaaattaaattaaggtctacataaattttcttgtattggctctcaggacatggcttaaaaaatttatcataattactagaaaaaaactattttactgttcttgaatgagacatcgctataatgggtgaatcacagtgtgtgtatacatgtgtatgtatgtgtgtgtgctgaaaacatctgtagaacccattgtgaaataaggaagctctagacaactttaatgtgtataaaagcacctagaaagcttatttaggtcttgtcccccactctcagattttgattcactagttctgggaaggagcctgagaagatctgtattataaaaagtacatcagttaattctaatgctgcttgatagtccttgggcctccctttgagaaactctgttttaaaggcttgaaatacaagtctagagtgtaatccaggaatataaagtgattcggcaggtaaggatgagttggatgatggtggaagaggcacagaggaatctgatgatgatggctgcaraattatggctgctttatttagttggtttacacattgtactaatgagaccatgatagccaattcaattaagtggccatagatcctatggctgtttctggccagcttatcatttatgcctttcactataaataggattgatcacggatgaatcattgcaaattccataccttaactgcaaaactaacttggagcaattgatgtagtaatgatgagtcataatatgagcaagttatataactgatatttatttcttctttgcaggtcttcttgacaatgtaacagttcttattggaattgcttatgaaggaaaagccatagcaggagttattaaccagccatattacaactatgaggtattactataaatgatacaaagtaatttcattagataaataattatagtgttatctgattctttatgttacctaagcaagtggtttttagcttggttgcatatgcaatcatctggggaacttttcattttttaaattttatttatttatttatttatttttaactttttttttagctatgctattaactgatgagaaacctttaaaaatacggattcccaggccataccccagacctactgaatcaaaatcgctgggggcattggtactgggtatgtatatatatgcatgtgtatgtacacagacccactaaatgcattatatattttttaatttattccttatgattcaaatataaatgttgagagaattactgatagggttcttgattagcttgggcatcaagacacctgatttatgattggttcctgaagcacattcaagaaatgaaccatttcaactaagaaaagatgctaggcctgttgttttccaggtaacgctgtgtagcgcctaagttacagtcagtgttggtaacagaacgtactatgctcttgcattcttttttcttgtctcttctaatctgctttgattttctattatacatcagataaattgccttccatagaagcaagggactagtgtaatttcaaagcaagaatttaccattaaattgcattaaattgtataggaaattgttgagataaagtagttaaggtatttatattaatgtgaccttgatagaactttagagaaacaaagtaatcagagtgggcaatactacttctgaatttccactctgagttaaaagcaaggttaagctttatttctaatataaatttgttttttcctgctgtttgtatgattataaattatattaagaatcgtgtttcttaggatttaccaaaagagttatatgttattgagaaagtctctggggttaaattgcttgtgtctattaattctttaaatatgattttaatgttgatactgttatatacagacayaagtttgtggtttttatgtaaactttaagttaatactattactttcaaaaggggcatttaattcatataaagcattgtaatgcacggtacctttcatcaagaaaaaatctaagtgcttaggagttaataattttcaccacttctttctgagattagaaaaattgtattcattttccacagaacaatgaaaarcagcagttaagggaacacaggaatgaagcaaaggtgagaaaaatagctagggttttggctccactagtaggtagaaaagaagcaggcaacttgtggtaccccaggtggtcattgtacatcccacawaccagttcattttctccagttctgcttctcttcattacctctctctgtaccacttcccttctggacactctgtttatcctttctcttgcttctcttgcttatgccttaaaattcattaccacaaatggaagtagaaaagttgctcagctgtgttggtggtattcaggctaaagattcaattttaaataataatcatcatcaccataatagctaaaatttattaagagtttactgtatgctgccaggttcaagggtttcaaatgtatcctttcattgaatactaaccacagccctttaaataaactattatccccattttaaagaggaaactgaggcaattaactttcctgtggtcacccagctggtaaatggcagaactgagattcaaactcaaatccaaaccttgctactgtattactttatattgccctcctgagccagagaaaagacttagcaattcaaactttattattgcttccaacatatactgaaactagtagacacttaaaggaaatagcatgaagaaactcagtctatcttcatactgaagccagtttcttaaccattgaagcttaattgtcagaaaattttcgcctttattaccctcccaaaattggtgtggagcctttgaaagagagagacaatgccagagcctgagagtcaggagcacagaagaaggcaagccagctgcatcatgggattgcatttaccacaccaagacaccagagtccttgatcccatcctttttgcctagatgttcatttacagaggcaatatgaccttgtagggcccaaaatattcgtgtccactgttttctttcctttatttttttccagaataactggagaactgcattaataaataggtttcttggttgggcgtggtggctcacgcctgtaatcccagcactttgggaggccaaggcaggtggatcacaaggtcaggagttcgaggccagcctgaccaacatggtgaaacccctgtctctactaaaaaaatacaaaattagccggacatggtggcatgcacctataatcccagctactcaggaggctgaggcaagagaattgcttgaacccaggaggcagagtttgcagtgagccgagatcgcaccactgcactccagcctgggcgacacagtaagactctgtctcaaaaaaataaaaataaaaaaataaatagcttccttagattccaagcctctcctgtagtgtaaactcagatgggaacagaggaagcacattaacatatactgagtacccagtgcttgttctttggctcctttgttgccccatatgccatcagactcttctgggattgccctaccaatggagagctgtctcacctaggaccacccctcttcccaatgcagtccatttccagtgactgattattgcaggagtttaaagacctgacatctcatcccaatttgggactaccctgaaaggctattgtagctccagactccccgcataggaacagctccccgtagggtcagctcttgctgtacctgcatcacagcttatttcttccctctgcccacaccctcctcctccttccacaggtgttgataccaagcgcacttcctaacaaacataccacctgcctcagagtctgcttcccagggaacccaacctgcgacctaagtatatttcacaataacaacacccagggtactgctctaggacaaataagatgatgtgtgtgaaaacatttgacaggtaaacataggcagtctaatttagtgtttaagaatatcatctttgaagacagatgagccaatctttggttgtgaacttcttagaacctttagtcaggttacttaatggttccacatttcatttttctaatctttaaattaaggatgagaatacctacttcatgggggtgctttgaggattgaaagagagataatacatgtaaagcacttagaatggtgcctggtacatgtttggtgttcagtacaatatgtatatctctataatatatgtctactatattaatataattgtattttgatgactttgcatcaatcattttatgtatcagttttactttccatgaaatacagattttttttctatatcaagtgtatagttataacaatgtagttgaaattgagttctgcaaaggaaaatatagattctaagattgcattatcattgtcattttgctgttaaaattgtcagcaaaatcttaactctgatcccattatccatggctactcttcaatattgtattggcctattcagttgccctatctccatagcagccaaatacattgtcatcattacctattcctgtagcaacatgatttttaatatttcttggataatgaaaagtagttatcaatacatggtatttcatttcctggggatcttagtaccttctgaaaatggccattttcaaatacaacaaagagatcattagataattcagagaaacagtaatcagtttatgatgtttcagcacattataaacagaaatcagtttataaggattccagggaataaccaaaagttctttgaaactgttaaccagaacagtaatgataataatcagcagattctctcaggagaagttctttgccagtgatattgttcttgtactttataacattatcatgttttttgagacggagtcttgccctgtcgcccagactggagtgtagtggcgtgatcttggctcactgcaacctccrcctcccaggttcacgccattctcctgcctcagcctcccaagtagctgggactacaggcacccaccaccatgcccggmtaattttttgtatttttattagagacggggtttcaccgtgttagccaggatggtttagatatcctgacctcgtgatccgcccgcctcggcctcccaaagtgctgggattacaggcatgagccaccgcgcccggctatcatgtttttattttttaaatcatgatgctaatataactgaatattccatttatgggctaacgttcttctccaaataaccacaagtcttgttgtttcactcgtttacacaggcaggaccagatgctgtgttggggaggacaatctggggagttttaggtttaggcgcctttgggtttcagctgaaagaagtccctgctgggaaacacattatcacaactactcgatcccatagcaacaagttggttactgactgtgttgctgctatgaaccccgatgctgtgctgcgagtaggaggagcaggaaataaggtatgaaaaatgtctgtcatctgctctgaagtgcaagtgaatcattgaaatactcaacttctaaaaacatgaaataagagtttagccatcccattactgggtatatacccaaaggactataaatcatgctgctataaagacacatgcacacgtatgtttattgtggcactattcacaatagcaaagacttggaaccaacccaaatgtccaacaatgatagactggattaagaaaatgtggcacatatacaccatggaatactatgcagccataaaaaatgatgagttcatgtcctttgtaaggacgtggatgaaattggaaatcatcattctcagtaaactatcgcaaggacaaaaaaccaaacaccgcatgttctcactcataaatgggaattgaacaatgagaacacatggacacaggaaggggaatgtcacactctggggactgttgtggggtggggggaggggggagggatagcattgggagatatacctaatgctagatgacgagttaatgggtgcagcacaccagcatggcacatgtatacatatgtaactaacctgcacattgtgcacatgtaccctaaaacttaaagtataataataaaaaaaaaagaaataagcgtttaaagagatgggagtaaagactataatttgtacatttcagcagcatttaaattttaaaaataaatttaagaatcaagttttttttttttttatctgagagagttcaatgttaatgaaagtcatcaggatgactccatgcttcttgccaaagaccttattttcccaaggaccctcttagattatttcctagcccttctacagactctaagatctggcctgcctgcccacttcctatctatttcccccattctttcatccaggtttccaacctgctgagagaattatgaaatgggacacaatttgatctacatccctagccctgatctcttctcatctgattgtcccctagatatcattatgatgacatccctcaggtatctcaaatttagcgtgtccaatttgagttcatcctctttctacccacctctggatgtgtttctctccctgttttactatcccactaatggcaccaccatttttctaactgatccagccaaacacctgaaagtcatcctagactccttccttcctcacagcctatcactctggtcctacttatgtatcttctgaatagttttttgttttttttttttttttgagacggagtcttactctgttgcccaggctggagtgcaatggcacaatctcggctcactgcaacctccacctcccgggttcaagcgattctcctgcctcagcttcctgagtagctgggattacaggcgcctgccaccacacctggctaatttttgtatttctagaagagtctgagttttataataataattattttacactataaccaaaaaaagtcaattgactaatgaaagtttgatagcaggttaccatttagagtcatgcaagttctagcagtgatctcagttgtgtgtcagtattagaggaattgttaggatgactctataaaagtttgtattttgtggcgctgcaaagctgttctttgtggggaaaaatctgcatctgtaaagcatctctattaacatagctagctctttttctttcagaccctccaaatcctaaacagattaactaaaatctgattaggaaacatttgtcacctattgtatctaaggacagccactataagacttcaaaggaattttggtctcaacaatctttatcttaatctgaacattctctttctatagatcccaggtctttagacaaacccaatcaattgtcaatcagaaaatacttaaattcacctatatcctggaagcctccccgcccccaccgctttgagttgttccacctttctggaccaaatcaatgtatttcttaaatgtatttgattgatgtctcatgcctctctaaaatacatacaaccaagctgctccccactgccttgggcacatgttctcaggacttcctgagggctgtgtcatgggccatggtcactcatattgggcttagaataaatctcttcaaatatttttaaaaaaaaaagtttgtattttggtagtgaaatggcaatacgtgtgatcccaagacttatgaaagtatttgttagactagtcacattgcacatctgttaggatctattacaatttatacattatggtactgcttgatacttctctgtcctttatttaataatggtcagggtttttttttgaggggagtgcttttgtttgtttgagacagagtctcgctctgtcgcccaggctggagtgaagtggtgcagtcttggctcactacaacctccacctcccaggttcaaacgattctcgtgcctcagcctcccaagtagctaggattacagacatgcaacacaacacccagctaattttttgtatttttagtasagatgggttttgctatgttggccacgctggtctcaaactcctggctgcaagtgatccacctgtctcagcctcccaaagtgctggcattacaggagtgagccaccatgcgcagccctctaataaatggtcaattttttagatgttgaaaaaacttgaattaattctgctgtaaatgtatattgcttttacactaaaaaagaaaaacaacgtgaataaaaggaacatgttactttatgtaacttggaatatggagacagttcagatatcctctttgtagcttttttgaccattatttttccttcatatcactatattattatgcatttattctatgtatttcttcataatactggtataatttaaacctgctaaaagctttaactaaatttaacagaggaactgattaaatgtccttgatagaaacaagcagyttttcttatctgtacctcaatcttttcatgactttcaattattctttctattatcaaaggataattcttatttttacccttacagattattcagctgattgaaggcaaagcctctgcttatgtatttgcaagtcctggttgtaagaagtgggatacttgtgctccagaagttattttacatgctgtgggaggttagtctgttttatttgaggaaattcatagtttttctacaattatatcatgctaagacataatatctcagtaatattattttacttagactgttacgatataaaagctagaaggcagcttagagattatccagtccaaacccctcatatgatagatggatgagagagcagattttcagcaagttttactttagttatcgtctctttttttgaactttgatctgcatacarttaatttaatttagcccttatttatagcctttttttttttttgacacagggtcgctattgtctaggctggaatgcagtggtgcaatcatggctcactgcacccttgaactcctgggcttgtagtgaaccgaggttgtagtaactgagattgtgccattgcactccagcctgggcaagactccatctcaaaaaaaaaaaaaaaaaaaaaaagaaaagaaaatgctaaataaaattaatwttaatcagagaaaaaataattttatatcctttagttagttaaaattgttctgtagtcttaaatttcaagtgaattaaaacttaacctttatggacactcattatttcatccaraatttattggctactattggataaggaagcaaaaggcacttaaaaataactagaaaaaccacaatccaattagccactaacttgattgattgattgatgtttttctataggcaagttaaccgatatccatgggaatgttcttcagtaccacaaggatgtgaagcatatgaactctgcaggagtcctggccacactgaggaattatgactactatgcaagccgagttccagaatctattaaaaatgcacttgttccttaaaggaaagtttcatttggccgggcgcggtggctcatgcctgtrrtcccagcactttgggaggccgaggcaggtggatcacttgagctcaggagtttgagaccagcctgggcaatatcgtgagaccccatctctrcaaaaatacaaattaactgggcatcctgtcatgcgcctgtcatcccagctacttgagaggctgaagcagaagaatctcttgagcccggaaggcrgaggttgcagtgagctgagatcgtgccactgcactccagcctgagtgacaggagttaagccctgtctcagaaaaaaaaaaaacaaaaacccaaaaagtacttaaagtttcatttacttagctaggagaaagacttggttctcaaaataatacattttaagattaattgggtagaattagagttccacctttattcattgttgagcagtgatttatatttagttattatatttaggaatagaaaatagaattaaataatttaacttgattaatcaaccagaccaattttgacgtctggagaacttataaactcaatatgttatatttgttttcctgtatttaggtggagaaatgagaaaaagctttagttccaattgacagttcaggtcaatgttcaatgaacattcctatcttctaaaccagatttctctttttttttcctgagacggagtctcgctctgtagcctaggctagaatgtagtggcgtgatctcggctcactgcaagctccgcytcccgggttcatgccattctcctgcctcagcctcccgagtagctgggactgcaggcaccgccaccacgcctggctaattttttgtatttttagtagagaaggtgtttcaccgtgttagccaggatggtcttgatctcctgacatcgtgatctgtctgcctcggactcccaaagtgctgggattacaggtgtgagccaccgcacctggcctaaaccagatttctttagggcacaattttttctggaatctcactcttgtttttcacagtaattttaaaaacgtttctactccaattaagaatatatatgatgttattatatatgcttatgaaacagatttatgagaaaagttttttttaaataaattatttaatcctagctctttgttattcaccagctttttaaaaaagtgtttgaaaattatacattctcgactttggggattagtttattcttgtggcatcattataaggcttaattgtggaaagctaagtacttgcttctattccttccaatgagakattataacataaactattaaaattattctgctaatatacctagatttttatttttaggtctctgtccattgcttttaattaaaattatctgttttcaaatcaacaagtggtttaaattaacagttcccaaactcaactgcatatcagaatcacctaggaagattcttttaaaatgcagattcacaggccaggcgcagtggctcatgcctgtaatcacagcactttgggaggccgaggcgggtggatcgcctgaggtcaggagttcgagaccagcctggccaacatggcgaaaccctgtctctcctaaaaatacgaaaattagccgggcatggtggtgtgtgcctgtaatcccagctaccagggggctgaggcaggaggatcacttgaacctgggaggcagaggttgcagtgagctgagatcgtgccactgcactccagcctgggcaacaaagcgagactctgtctcaaacaataaaaataaaaattcacagggtttatcccaacgattttgcttgtgtgtgtgtgtgtgtgtgtgtgtgtgtgtttatttacttatttatttatttattttgagacagagtcactctctgtcacccaggccagagtgcagtggtgcaatctcggctcactgcaacctccacctcccgggctcaagcgattctcctgcctcagcctcctgagtagctgggactacaggcacatgccaccacccctggctaattttttgtatttttagtagagacggggtttcgctgtgttagccaggatggtctcgatcttctgacctcataatctgcccaccttggcctcccaaagtcctgggattacaaatgtgagccaccacgctcagcctgcttctgtatattttaagaaattcagggactgataatcatttaactctaggactcactagataaggtaatatagtattattttatagaagtgtcataatctagcaggaagaggtctctgtggtcttgacacctttgagccctccctcctgtaagtctcttctcattgtcctggctttcttttttcacctagccactcctactcagtctcctttattgctttctctttgtcttccttcccttaaatgtcactgtttaccaagattctgttctagtctctctcctttcttttttttctttttttggtagagatggggtcttgctatacagcccaggctggtcttgaactcctagcctcaagcaatcctcctgcctctgtctcccaatgtgctgggattataggtgtgagccactgcacctggactatgctttctctcctttctcaccagaggatctaatccacctgtgtgacttttgtggcgcttttgctcattaatccaaaatctttagcttagaactctcaaactctagatctatataccccaaaacctacctagatgccttacagagatgtctgaatgattatgtctaaacagttcttcactcttgccccgacccctccagaaattattttacaaacccatgaggtgatcttgataattggccaagttagaaaatcatcacctgaatccacctgcttccctctacgaatggagttctctatctgtaaatagtggactaaacctaatttttaaaaaatctaagtgtaacaagagaataactttatttttatttatttatatatttcttgagacggagtctcgctctgtcgccaggctggagtgcaggggcgcaatcttggctcactgcaacctccgcctcacgggttcaagcgattctcctgcctcagcctcctgagtagctgggattacaggcatgtgccaccacgcccaggtaatttttgtatttttagtaaagatggggtttcaccatgttggccaggctggtctcgaactcctgacctcaggtgatccgcctgccttggcctcccaaagtgttgggattataggtgtgagccactgcgcccagccctaagataataacttttttttttttttttttttttttgagatggagtctcactctgtcacccaggctggagtgcaatggcatgatttcagctcactacaacctctgcctcccgggttcaagtggttctcctgcttcagcctcccgagtagcaggggcacaccaccacacctggctaattttttgtatctttagtagagacaggggtttcaccatgttggccaggctggtcttgaactcctgacctcaggtgatccaccttcctcagcctcccaaagtgctgggattacaggtgtgagccaccacacccggccgaaaataactttgaaggtattttcttcaggttcctatacgaaaacccaatttatgtaagtgagatatgtaggagtctaaatcctctctccattactcttgactctacattaattacattagtttatacccttataccccgttatttcttccctagatccctgcagtgtcttgactaatctttctgcctacactgtaacccatctatctctctctcatccatttatcacgtcatctccagagtgatttttttgttttgttttgtttttgagacagggtctcgctctgtcacccaggctggagtgcagtggtgtgcttatagctcactgcagccttgacctcctgggcttaagcaattctcctgcctcagcccccccaagtagctgagactacaggtttgcgcagtaacgcctggctaagccgggcgtggtgtctcacgcctgtaatcccagcactttgggaggctgaggtgggtggatcacttgaggtcaggagttcaagaccagcctgaccaatatggtgaaaccctgtctctcctaaaaatacaaaaattagccaggcatggtggcacatgcctgtaatcccagctacttgggaggctgaggcaggagaattgcatgaacccaggagatggaggttgcagtgagccaagatcatgccactgcactccaacctgggtgacaaagaaagactccatctcaaaaaaaaaaaaaaaaaaaaaacgcctgactcatttttgtatattttttgtagagatggggtttcaccatgttgcacaagctggtctcaaaatcctggtctcaagggattcgcccacctcagcttcccaaaacgctgtgattttacaagcgtgagttaccacaccgggcccaaagtgattttttaaaatcaaatgtaatgccattccccttactcaaaatattttatggctttcctttgccttcaggataaaatgcaaactccttataatgatatatgaagctcttaatggcttcttccttctccagcatcaactctgaccctaacctatactgtagccatgctcaaccatttaaagttcccctaaaacactatcttttctcttagcatggcctccattcattgaacaaatatttattgagcacctactatgtgttaggcactgaacataggtactgaacattctttcttttttttttttttgagacagagtttcattcttgttgcccaggctcactgcaacttctgcctcccaggttcaagcgattctcctgcctcagcctcccaagtagctgggattacaggtgcccgccacaacgcctggctaattttttgaatttttagtagagttggggtttcaccatgttggccaggctggtctcgaactcctgacctcaggtgatccacccgcctcggcctcccaaagtgctgggattacaggtgtgatccaccttgcccagccaggtactgaacattcaacagtggatgtaacagtgaccataagtctgttcctttgttgagcatgtgttcttgtgaaacaagacagataataagtaaataaaattttagattgtggtaaatgctataaatgaaatcaggaagatgagctagaaagcaactggggtagggttggagggttgaaagaggatcttctgtacataaaaataggagtatgttttccgtggagatgatgtctggtcaggcacactaagagctgagatttctagtgtatatagcaagcaaacaacatctctgagaagacaaagaaaaagaacttaaaggaagccacagtggctgaagtaaaatgaacaaggggcagagtgttataaaatgaggttgggatagatcctgaggcagaacttgggtattaaaaattataaaaaagaaatgagattggggatgcaggtaggggtcaagtcatctacatccttaaacatttttaaaaaatatttcaagggttgaggggaaatgggaagtgactgccaaagggtacaaagtttctttaggggatgataaaatgttctagaagtaattgtggtgatgattgaactctgaattatacactttaaataggtgaattttatggtatgtgaattatatctcaatgacgctgttagaaaaaataaaatgaggccaggcatggtggctcacgcctgtaatcccagcactttgggaggccaaggcaggtggatcacctgaggtcaggagttcaagaccagcctggccaacatggtgaaatcctgtctctactaaaatacaaaaattagctgggcgtggtgctatgtgcctttaatcccagctactaagaaggctgaggcaggagaatcgcttgaacccgggaggcggaggttgcagtgtgctgggattgcgccactgcactccagcctgggcgacagagtgagactccatctcaaaaaaaaagaaaaagaaaaaagaaaatggtcgtatgtgtctagtgcctaccacactgtatagcatagctctgtatcttcttctccaggcttatctcatccattttaataactactcacaccttcagcaaaacatttcaactgagccccagattttattatattattataatctgcaatttgtaaaggatattttcacctacatatcttacagacatctcaaaaaatcagtctagaaccaaataatttgccaactctgtttcctctcttgtcttccctcctttgataatgacataaccatccacccatttatccagctgaaatctaggaataaacctaggcaaatttgcttctcggccgggtgcagtgtaatcccagcaatttgggaggctgaggatggcagatcacttgaggccaagagtttgagaccagcttggccaacatggcgaaaccccatctctaccaaaaatacagaaaaattagctggatgtggtggcacacgcctgtactcccagctacttgggaggctgagggatgagaagtgcttgaacctgggaggtggaggttgcagcgagctgagattgtgcctctgcacttcagcctgggtgacagagggagactgtatcaaaaagaaaaaaaattaaaaaattgcttctttcaccatcacctccccaaacatctcgtctgtcattactgattttacctcctaaatatatctgaaacttgttctctattctcagatcttattccactgccttagttcaggccatcatcttttattttctctcatatggactgttgtaataacatcttaactggtttccctaatgccagttctgcgcactccaagtcatctcctatattattgtcgaagtcatccttgtaaaatatgatcctaatcacatctcctgctcctgcctaaaacttttcaccgactttctatcataagataaaatcttgctcctcagcatgatatatagaactcttcctaatttagtctgcctacattccagccttttagtcccttacttccaaaagattttatattctggcaataacgaactggtcagagttttccaagtacacacagcttcatgacttcaggttttagctcatattcttcttttacccccttttttcccccactccttaaatatactttttttgaggggggggacagggtcttgctctgttgccaaggattgaatacaatggcatgatcatagctcactgcaaccttaaactcctcaagtggactcaagtgaccctcctgcctcaatctcccacgtagctgggactacaggcataaaccaccacacccaactaattttttttttttctttgtggagacagggccttgctatgttacctaggctgatctcaaacttctggcctcaagtgatcctcccacctcggtttccca

SEQ ID NO: 97839 - DNA, 55403 bp, Homo sapiens
cctggctaatttttgtaattttagtagagatggggtttcacaatgttggccaggctgttctcgaactcctgacctcaagtgatctgccagcctcggcctcccaaagcgctgggattacagttgtgagccaccgtgtctggccacgttttatttatatttatttatttgtttatttattatttattttgagacggagtttcgctcttgtcacccaggctggagtgcaataatgcgatctcagctcactgcaacctcctcctcccgggttcaagtgattctcctgcctcagcctcctgagtagttggaactgtaggcgcccatcaacatgcctagctaatttttgtatttttagtagagacagggttttgccatgttggccaggctggtcttgaactcctacctcaggtgatccacctgcctcggcctcccaaagtgctgggattacaggcataagccaccacgcccagccagcattttaaaactccatattgctgacctgtttcctgcccactctgagccctccaggccattgcctcccctgtaccattttatttgtttgtttttttctcctttctgcatttctttccctccccaacttatttatttatttatttatttatttatttatttatttatttatttttgagaccaagtctcactctgttgcctaggctggagtgcggggtgtgatctcagctcactgtaacctccgcctcctggactcaagtgattctcatgcttcagcctcccgagtagctgggactataggcatgagccaccacgcctggctaatttctatattttttgtagaaacggggtttcatcatgtttgccaggctggccttcaactcctgacctcaggtgatccacctgtctcagcctcccaaagtgagccacggcgcccatcccccaaccaatttagattccatgttccatcacattgtttgttccattactaatctcctaaacttctttttcatttgttctttctcccactgcctagcacctaaaaccctggataaatccaagtctccactttctccacgcctgccctcagggattaagtgaccgctgaagaaaattacacaattgggcaaattcaagaccaccaatttcacagtcccttctgcactgtctggcacactgtgtttccctagtccacttgccctccaacactcaacactacttcaaaccttgtttccttgtactcaaggcgtcaatttccttacttccccccttactctcagcaaataacctctccttcaaggaaaaaaaagctaaagctttcacgtaaaatcttcctcaaattattgttttgaaatgtataaacatatttatgtctgtttttttaaataaacttatttatatctgaagttattttttcagccaggtgtggtgactcacgccagtaatcccagcactttgggaggctgaagtgggtggaatgcttgagctcaagagtttgagaccagcctgggcaacatggtgagaccctgtctctactaaaaatacaaaacaaaacaaaacaacaacaacaacaacaaaaatacataagttattttttctttcctctgtctgttaaaatgggaagggtatctcttctatctgcctgtattctagatcccaccccagattgtttagaatggtggtaattacaagaagcaagatccaacttccagtagcctaactagtgaggacagttactatctcacaaaacaagacatatggaggctgagtagtcccagggttggttcaggagctctgtgaggtcatcatagacacaagtgctttctagattccattctgccattcttagagcataagcaatgtctttcctcatggccacaagatggctgcagcagtacctggcatcatttgcatataaccacatccagcaaaggaagattgtgccttctttttttcctttttctttgagacggagtctcactctgtcgctcaggctggagtgccatggtgtgagcatggctcattgcaacttcaacctcctgggctcaagcaatccttccaccttagcctcctgaggactacaggcacacaccaccacacccggctaattttttctttttttatttttgtttttgttttttgttttttgtagaggcactcttactatgttgcccaggctggtctagaactcttggcctcaagcaatcctttcatctcagcctcccaacatgttgggattataggcatgagccactgcgcccaatctgtgctttcttctatgtgtcttttattaagaaagcttttcctggaagtagcccctcccacccccctacccttcctacaaggttttactggcttcaaggggaggttgaaaagcccagtatctggcaggttgctttgttgttgttgttgtttgagacagggcctcactctgtagcccaggctggagtgcagtgacgcaatctctgctcactgcaacctccgcctcccgggttcaagcgattctcatgcctcagcctcccaagtagctgggattacaggtgcatgccaccatggctggctaatttttgtatttttagtagagatggggtttcaccatgttggccaggctggtctcaaactcctgacctcaagtgatctgtctgcctcagtctcccaatgtgctgggattacaggagtgagctactgcacccagcagttttgcctctcagtagaaagtgaattctgtcaggaaggaataatagaaggcatggtagaagaatgactgctggatcggccatcaacagaatgtgctgtataccccattttccctcccatctccagaggggccttccattttcccatttgttcaatctaagaccagttcctttccactagcatttaattttatgcaaatctctcccatctttaaaaaggctgtcttttcaaatccaaattcctgtccagctaatgttcctttcttccttctcaccttcacactcactgactctttacctccccttacttttcaaccttttgccatctggcttctgtacacaagaaccatgagaattgctcttgctaagcttaaaatgacctctgtgttactaaaaacaatggacattttttagtctctcatcttaattgacccaacagcagcattccacaccactgcttctcctttcttaaaattctctctacccttggcttctttgatatcacacactctcccattttcttccaccaccccacactctgcctttcctgctgagtctcttttactggtttatactttttaatacaaccctataaacgttggaggccctaagacctcaatcatgctcgtgtctcacctcactttgcaccatctccctaagtgatggtatcgttatcttccagtgcctcattgatcccctgtatgtagataaatctcactttcctatctctagttaagaactgttatctgagctccaagactaatagctatctgcctacttaacactgcatgtgaatatctctctagtactccaaacacatgtttaatattgaactcacaccttcatgaacaacctccccaccatccttcacttctttcagtgttgcctatctcagtaccatcttctttacgattttgcaaggcagataccccaaatctctctctctctctttttttttagagacagggtcttgctctgtcgcccaagctggagtgcagtggtgcagtcatggctcggtgcagtcatggctcactgcagcctcaaactcctgggttcaagtgatcctcctgccttggcctcccaaagtgcttggattacaggcatgagctaacacacctggccacaaaatcccttcttgagtccttcttcctcaacctccacatgtaatcaacaaaatatattgggtctgtctccagaatatcaaaagcatccacttcactatctcccttatgttaatacatgaataagtacctcttacctggtctattcacattcagccattccacttcaaatccaatctattcaattgctatcatacaatttaaaaatggaagtcttatatgtatctgtttatttatttattttttgagatatagtcttgctctttcgcccaggctggtgggcagtggtgccatcttggctcactacaacctccacctcctaggttcaagcgattctcctgcctcagcctcctgagtagctgggattacaggcatgtgcaatcacgcccagctaatttttgtatttttagtagagatggggtttcaccacgttggtcaggctggtcttgaactgctgacctcatgatctgcccgcctcggcctcccaaagtgctgggattacaggcatgagccattgtgcctggccaactcttctgtttaaaatttttcaatggctccctgtaatccttagaaaaatgtcttaaaatttttaacatgattttcaagactctgtatcatctgatccttgcctagctttccagcctcacttgtaccacactcctctttctatgttatagccacactgggcattttttagttctgcaagtgcactgtgtttgcttgcttcagagcctcatgtggaatagccttctccttcacctacctagagttccccgacacgtcatttcctcatgaaggccctttctgactccactagcccatgttcggtcccatcctcatacacttctgtagcactctgaattacccttctgtgacatttatcatcactcataattacttattcaatgtctgtcttcctgactagactgtacagtcacaaagacagggccttcttctgactgcctcacctccttatcagtgccaggcacaatgcctagctcataaaagatgagtgataaacacttgacaaatgaatataaaactatgaaggattcttatttaattctaaaattagagataattaaagacatagctctattggaataatttctagattgatcaaatttccagaagtccattaaagttgatgttaaaggtcaattctaatttttctgtaggattgttgtcctatagaagcaactgtccctaatcagcattatgtctcagtttataataacactatatacgagaggcctgattgggaaaaaaagtacaaaaatcggagtgcaaataattagctatttttagggaaaatatctgtaggaaaggtggtatattcagatgtatcacttcctttatcttgcaaagattgtcagatagatgtactgctggaggataaatttaattgatgtagaatttaacataatagtatatgcaactttaaataaaccatgcaagcctttagctaatagttattacagaccatgtgatttcatgaaagtattaaatatggatcagttttcatttaatggcagccaatcacaaagcgccacatcttgattataggacattctcccagaaaattggaaaataaatcactatctagtctcttttgtattaccatggaaagtagctggaaaagaaataatctattctctgctttgtgttactttaaaaagtagctgtggcaatagcctaacgcgttttgaagttttgaaatgatctctatccagtgtctaggaaattgctgaaggcctgcgttctaccaattcctccgcttaggcacatggactacaggttattaaagaaggtgacttgcggtttttatcccgtttttctgcaaggttgggctacgttcagaagaaatcaaagcctcggagttaatcccgacaaagcccatttagttccatgcgaggactatttcctccacactgagagtctcaacgaggccgagaatagcatatgccagttggagtgacacttatttctccctctcccctttatagaatgtgtagtggccctcactactgccccctttagctgtgcctcagaacccacagttacatgctccacaatatggaggcgaataagcctaagtggactacaattcccatcatgcctcactgcaggcgccgccgacgtgtcttagcggttagtcatccctcttaccgccttcctccacttcctggactgcgcgaccggaggcctagcgggcgcgcgsccgcaccatcgactcgccaacgagagaaggtcctggggcacggacaccgacgggttgcgactgtgacgtgaggtgttctcgcgcgcgctagcgcgcgtctccgggtgccgctgacgggcgtgcgcgcttgtgcggagccggaggtgggggccgaaccagccaaggttgcgggggccgcagagccggacgaagacggagggcggagycggcttcgggactgcggagactacacaccgagcgagcgcctgggcccgaagggagcgatgctgtggttccagggcgccattccggccgccatcgcgacggccaaaaggagcggcgcggtcttcgtggtgttcgtggcaggtgaaggaggcaggggttcgagaggcggccgggacacccctccggcctaccttcatcctcttgtatacctcagccgccggcccgccctccccgagacgcgggctcctgtcggctcgcacaattgccactactaccccgcgccccagggacggctgcgactccgccgccagatcccccagaggggccatgcagaccctcagcgccctgctccttcaggccccgggcgcccccagcctttcctcagtgtctgcgaggcccgggctgccggcccgtggctgttcagcgcctccccggttcgtttgagatacagtgggcctggccccaccgctgcgtctcccggcagccgggccggaggcaccgtctggccctggtctccaaagcgccccgaggcccgccgaaatctccccgctcggggcgacggacgcggccaacaggccccagccgcccagccccgctcgtcgccccgagcctctcccctgcgcagccagacccccgcgaccctctccctgacgtccctctctgtcaccaaggaccctctttgtgctgcttgaacgcccgtttcgttactgctgtttagatggaggtaggaacgggccattaggcaagcagttgggttgtaattagttgtggactgtcgggaagaaagctgtgtcatcgataagcaacaaagagaaaccacctgatgttcacggttactggtgttagtacgttcctgaaacgtaaacttttgagctgaatagaggtttaatttttcttaatggcagtcttggtaggggatctagtgtgaaataatgtaagtttaaaaaaaatccattagtttcaaagaaaatagacgttcagtccttggtttcttccctttgttgtcttcttaggctaaaatctacacgactttgagaacgtttattaactcatatattctctgttgctctaggctattttgctccatattctcctgttttattactgaaatcttgtagatttacagtgaactccctgcctctacggttctgctcattctcattacatggaccaaatcaatgtttgtggctgttgttaatttgaggtgtatttcttcaactatttgtgtttaataacggtttattcataattaactcgtcttttaatagctctataactttatgcactgcagtgaagaacgaattactgaaatgtgaatgtcatttagcattaaatttggaatttataattgttttgttacgccaagtttttagctcaatgctgtttattagaagagcttgaatagtttagattctgtgatgctgtctgggggttatattatactttacataaattaattctgtaatcccgtaaggaaaaaaatggattgaaaatgaaaggaaaagtaaatgacactatgcttattgtgtacattagtaggtttttgacattttaaattgtttttctcctaatatctcagttgatccttgcagtaaatagaacaggtttaattatccccattttatagatgaggcacttaggtcagcagtcataaagtgacttgcactagggccacaaaaaggatttacatgtcttaacagtcaaattttttagtagcttcaaaaaaactggcttttttgtttcttaaggaaaaaactgaacaatttgtaaattggtgatttaaattggtatagaaatcagaaatttggattatggtagtcatgtttttgaacaaatgtccaaacattcctagaaggcactcttgaggtaaatcagttaatttaaaaaaagaaacgagagatttttattaacaaatattaatatttggaaactctagtacaaattattggaatagttaaataaagttataggtcttgcctttcggggttttgtgtatatatatatatactttcttcaattaagtttttactgatgagcatgtattacatgtatttagaatataatgactcttgaatgtttgcaggaagactgttagcaatctcacaaaggagtctctgtctgtcccttgacctgttccaaaatccagctagcttttttagagctttagccagttaatccccaagactaagtaggattagtgtcactctaggagtatgtagatactggactcatgaaaccaaaacacttacagattgcttagagctttcttcataactctgaagtcagaacttgtgattttcttaggtctaagatctcagtaataatataccaacttaatggaaaatttgaaagatgtctttatagttggaagacgtgatctcaagagtacactttggttcatggaactgttcaagtgggaaacgttttaggcaagtggtctttagttagtgacattttcatggatgaattaaagaatattgtagagttgatgttaggagacgagagattactactacttcagctaacaaattaatatgattttcaaagtattgtggctgtgtaaagtaagtgaaacaaaacgatattcatttaatacttgggaaggtagaataatctgacgagactgaagtaaaggtatctgttcactggctaatgttgctaggtaggtaggccaaactttgttaatgatagacgccattttctgccttttttggtgaatgtagaccacagaagcctttaggttttgagcagttgagattttttttacatcggaaagactggctgtatgagggtctgcaactctttgcttctgagttcgtgttgctctctttaagtgccttcgcttaggatactgccgatacaaaggatatgctgttttctcctaaaatcttaggcccacctaactttatagttgataatttgattaaaaataagaaatgaaagataccagagttagcaatcagtcatcccactcagtagtattaggaaagttgtcattaagcattgagtaattccattcagctttccaccactgctgttcaagcagctgctgccaccactaggctgagtctaggacagacactgccagtagggttgagacatctgggaccctaatcacatggtacagtataggtgagggagtgatgcaccagcctcacaagaagcaagatttatactttcagctacttacgtgatatcactgtttagatcctcccaggattctcaagcctaaacgtgtaagtgctgcctaaacctgtgtttctcccagtgttctgcatctgattggcactaccatacatctggttggataaaccataaatatgagagtcatctttgactcttaactcttcagtstcttcttgagctccggattgttcacaacattccaaatcacataggcctttccctacacacgtattccttctgcgtggtgaactcttctggctgttggcatggctgagctctcttatcctttagattttagcttaactgtcacctcagagagggcttctctgaccattataaagagttctcttgttattttctctcatagatttctttttagtagcatttattactgtaattacgtatagtgtctatttgtttaaaaattttgtataccattagattttaagctctgttgaaggcagacaatgtctcatttggtttatatttagtatacagttcaatgcctagaacaaaataaatgcaataaaatrgtgaacatataaaagaatgaatggaaaggatttctcattcttcacagccttctctgagaagggttcgtagtaagaatattctcatatacttatttttctttggtaggtgagtcatttatttggaatcttaatctctcctcatcagatggtttctgaagatgcatttagagtgatctcacttgcaaatagtaacttctcgttattttgcatcttcaacatctaggagtctgctaatggagcattcttaatggagcatttggtctgtggatgcattctagtcccgtttactttttttttttttttttttttgagatggagtctcactctgccgccaggctggagtacagtggtgcaatctcggctcactacaacctccacttccctggttcaagcgattctcctgcctcagcctcctgagtagctgggactacaggtgtgtgtcaccacgcacagctaatttttgtatttttagtagagacggggtttcaccgtgttggccgggatgatctagatctcttgacctcgtgatccgtccgcctaagcctcacaaagtgagccaccgtgcccgaccccgtttacttttccatggtcaaatttctcaaactcctatttctggtattcctgaatctcatctcacaaaatatatgcaaataaacagcattagagtcaattattataggcatgccatcatacttactatattaggcatttagctattccacagagtacttattgggtgcctactatgttttgtagagattttagtcttgtcagtaaataaaatggaaccaatccttgccttcatggaaccttcattctagttaggggagacagatactagtaaacataattaaaaatgcatagtatattggaaggtgaaagtaatacagaaaaacaacaggagataagggagctttgggaatgtctcaagagtgtaattttaaagtaagtgagtaggagagttgtaatattaaagtgggtgattaagtatcagctttattgagctgatatttgagcaaagttttaagggagttggaagttaaccatgtagttatctgggggaagaacattccaggcagaggaaacaactagtacaaagaccttatggctgaagtgtctttcatatttgaggaatagaaggaaaaagaatagcaagaaaggaaaaaggaatgaggtcacagaggtagttggagtcctgatgtatggggccttcaagcgccctgtaaggactttggcttttactttgaggaaaatggggagccattgtgtgatctaagcagagggttgatgtgatctttttttttttagagaaagttgctgtgttaagaatagacttagcaggaagaccaatttggaggcttttactaggcttccaggtgagatgtgatagcttggatcagggtagttagtagtggaagtggtaagaaagttacattcttgatttattttggagctggagtcagttacaatcaaggaaaactagttttttggcctgagaactggaaggatggagttaccataaacgaataactgcaatgaggaaggccaaagtggattaaattgtcctggccaacatagtgaaaccccatctctactaaaaatacaaaaaaattagctgggcgtggtggcgggcacctgtaattccagctgctcaggaggctgaggcaggagaatcgcttgaacccgggaggcagagattgcaatgagccaagattgcaccattgcactacaacctgagcgacaagagtgaaactccatctcaaaaaaaaaaaaaaaaaaaagatacagaacgttttcagcattccagaaggctccttcatgctctatcaaggtagccactatactgaattctatcaccatagattagttataggttagcataccttttataattagcatacctacaataaaaggcaagtctaaaattgcaaacagaattgtacctgcctctgtctaccttggattaattttggagtataaatgctgtggagtggagatgttgaactcaacagaaaggtgccacataaaggacagatatcaaactttttatttttctctctctctagacggtctcactgtgtcacccaggctggagtgcagtggtgcaatctccgctcactgcaacttccaccttccgagtgcaagcaattctcctgcctcagcctcctatgtaggtgggattacaggcatgcgccaccacacctggctaagtagagatggggttttaccgtgttggccagtctggtctcgaattcctggcctcaggtgatctacccgcctcagcctcccaaagtgctgagattataggcgtgagccaccgagcccagcccacaacttttattttaataaaatcttatgtacaaaagcccaaataggcactgcacygatgactgcttattattgtggtactttgcgcatcataatttagatggctkcttttatgaaatattttgtatcatttaaatagtccagtgtagttkgttttcattgctcttcatgatgtgaactgtgtatgcagtcacacttttcatttagtggaaaattcagttttcaaatttggcaraaagtggtataggtgggattatattttatttgaggtttccgttttccaggggaaaagagtttgcaatcagcagatcccrgcctggtataagaatttttgaaatgttttacaggtgatgatgaacagtctacacagatggctgcaagttgggaagatgataaagttacagaagcatcttcaaacagttttgttgctattaaaatcgataccaaaaggtttgtttatgttttaatattttattaattttaaaatttataagtattgtstttgatttatagtgatactcttggactagaagaatgttgatgttgggctgggcactcccagcactttgggagactgaggtgggaggatcgcttgagcccaggagttagaggctagcctgggcaacatagtgagaccctgtctctataaaaaataataataaaattaggagtgtggtgtgtgcctttggtcctgctacttgggaggctgaggggaggatcacttgatccctgaagactggggctacagtgagctgtgatcatgccactgcactccagcctgggtgacagagtcaaactctgtctcaaaaaaaaaaaaaaaagaatataggccaggcacagtggctcatgcctgtaatcccagaactttgggaggccaagacaggcagatcacttgaggtcaggagtttgagaccagtctgggcaacacagtgagaccttgtctctactaaaaaaaaaaatacaaaaattagccgggtgtggtggcacacgcctgtaatcccagctactcggggggctgaggtaagaggatcacttgagcccaggaggttgaagttgaggctgcagttagcagtgactgcaccactgcactatagcctgggcgagagagcaagactatctcaaaaaaaaaaaaagaatgtttatgctatgtttttgggtatctaaggcatattaggaacttaaattctgactgccgtttgctaaattcatcatgaatcctgctgaaaaaactttaagctttcctactctaccaagcagccatctaacatgtaccaggaatgcaaaaagaacagtcatctccagcttctaaaaacttggaagtaatggtaaatcatacattgaatatctctgagaggttgatcacttactgtcttgaatcctatttttgggaatggagtcatttaatcagtggaaataaggacatttataggttcctcacagtacctgatgtccacaagtctattttgtttctccgttcctcctccccatcttttaaaaaaatttttattataggaagtttcaaacatatatgaaagtaatgtaacagtgtgatgtaccccatgtacttgtctactagctttggtaattaactcatggtcagtcttgtttcatctatacctccacccatttccactcaatccaaataattttgaaacaaatcacagtcactgtatcacttcatctataaatattttagtatgtctctgaagtataagtattgttaattttttaagcataactataatattaatacttcacaaactaataataattctttaatatcaaataaccagccagtgttcgacttttcagttgtctcatcaaagtcatagttttattactttattgcagttttttagttcaaaattattcaagggccacacattaggaagcattgatttctctcagtatgtaggcttctcctccaactcccctgctccttggaatttatattttaaagacaccaggtcatttgttctatacatttgttctgtggtttcctacagtatggattttgttgactgcaatgtgttagtgtcaagttggttctttcctgttttctgtattgataggtagattcaggtttgtttcccctcccctcatcctgtcctaagactacttcataggtagtgatgtgtcttccatcagaagacagataataccctgttttctctctttatgatgttagcagctatcagtgatcattacctaaaaacattattatttatttttttctttgaagcaggatttcactatgttgcccaggctggtcttaaaatattggactgaagagatcctcccatgtcagcctcccaaatagctgtagttacaggcatgcttcactgtgcctggtgctgaaaacattaattcattagcacttacaaagtggtattcctgtctttttgatattgatactatcagaatgaataatgtgtttgaaaatcactgtcaagattaaagcattcagaaatttctactcgggaggctgaggcaggagaatgctgtgaacccgggaggcagagcttgcagtgagccgagattgcaccactgcactccagcctgggcaacagagcaagactccgtctcaaaaaaaataaaaataaaaataaaaaaataaattcagaaatttgcctataagtttgtaaactttatgtaaaaattttctgtgtttacaaaaacatcaagtcgtagtatagcctgtctcacaacagttactgaactatgtatttactgagtagtttttaaaaaacagaatctgtcaatttaagtatatctttttttttttattgttcatcaccttcctgaagcacctttgagagttggcagtggcaagaagaatatagggatttatagggaatgtgcaatacatgagaattccagaattcttgagattgtatacagactgatgtgtctggcttttttttttttttttttttttttttttttttttttttgagacggagtcttgctctgtcgcccaggctggagtgcagtggcgtgatctcggctcactgcaagctccgcctcccgggttcacgccattctcctgcctcagcctcccgagtagctgggactgcaggtgcccgccaccatgcccggctaatttttttttttttttttgtatttttagtagagacggggtttcaccatggtctcgatctcctgacctcgtgatccgcccgcctcagcctcccaaagtgctgggattacaggtatgagccactgtgcccggccgtgtctggcatttttaaaaataaattacttttttttattttttattttttttgagacggagtctcgctctgtagcccaggctggagtgcagtaacgtgatcttggctcactgcaagctccgcctcccgggctcacggcattctcctgcctcagcctcccaagtagctgggactataggcgcccaccaccatgcctggctaatttttaaaatagttttagtagagatggggtttcacagtgttagccaggatggtctcgatctcctgacctcgtgatccacctgccccggcctcccaaagtgctgggattacaggtgtgagccatcgtgcctggccttaaaaacaaatttctattagcagatgcagggatacctgcatatagtgatggttcatgtttgtttcactgtagactgcatgctgatagaatctagtgtgcctttaaattatggaaaataaattttctttatttcataataactaagtcacccaatgttttgggaacattttagtgtgtatgtatttttggagatagcgtgcattgaaaatagattagtaggaaatgcgtaaaaagtttacaattatttctgaaatggtaggattttgggtaattttttttcttgattttttactatgtttttaaatgtttttatgataataatgctttatatttgagggaaaaaagcaaattctagttcttagaagcatttgtttgattattggaagcatctacattgatgagtatctcttactaatcttataaattctctctcccatccctgaccactcagctcccttctctggagggaaccaaatcaagaaaatatatttatgtttgttttccttccatgttttacaaaaatagtattaatagcattttgacatacttttctatacctttttcttttctttttttttgagacagagtctcacattgtaccctgagctggagtgcaatggcatgatctcggctcactgcaacctccgcctcctgggttcatgcagttctcctgtgtcagcctcccgagtagctgggattacaggtgcacaccaccacacccagctaattttttgtattttcagtagagagggagtttcactatgttggccagactggactcgaactcctgacctcataatccacttgcctcggcctcccaaagtgctgggattacaggcgtgagccaccacgccaggccaatttttgtatttttagtagagacagggtttcgccatgttggccaggctggtcacgaactcctgacctcgtgtccacctgccttgacctcccaaagtgctgggattacagatgtgatccacagtgctggcctgcctttttttgtgattgcataattattcagtttttattggtagatagattgcttttaatcctttgttattatagagtattacattatcacatgcctaagtaagtcgtaggccttatgtcttcgtgttccaggttaagatattgtattcaggtatacttgtctgctgaggaagcagcatggcagataccaaattaattttttagctaccagatgcagccactagcttgtgggttgtaagagcaaatagttctttctcttttgagatgaagtctcactctgttgcccaggctggagtgcagtggcgcgatcttggctcactgcaacctctgcctaccaggttcaagcgattctcttgcctcagcctcctgagtagccgggattacaggtgtgtgccaccacgccgagctaatttttgcatttttagtagagaccagatttcaccatgttggccaggctggtctcaactactgactttgtgattcacccgccttggcctcccaaagtgcttggattatacctgtgagctaccacgcccggcctttttttttttttttttttttgagacagagttttgctcttgttgcccaggctggagtgcaatggtgcaatcttggctcactgaaacttccacctcctgggttcaagcgattctcctgcctcagcctcccaagtagctgggattacaggcacttgccacaatgcccagctaatttttgtatttttagtagagacggggtttcgccatgttggccaggctggtctcgaactcttgatctcaagtgatctgcctgcctcggcctcccaaaatgctgggattacaggcatgagccaccatgccaagccacaaataattctttcatttgaaaattataaaacaaaccagaaaaagtcttaatgaaataagaattatatttttctccttcaacctgattgctgtgaaagaaactggtagttgcaggaaaatacttgtgattggtacagtaaattttattaaaacaactcagtatttagaaaatacttgcattcatctagtgattttgtttgattttgttttacagtgaagcctgcctacagttttcacaaatctgtatcctttcagtaaagaatggcttatatatatacatttatttaccttccttttggttaatttatgaaatttagaaattattcatttttatttaggaaatcatacattcttttttatggaaactttattactaagtgtcctcatttaaaaaaaatgttattataggaaatttcaaacatatataaaagtaactcaatggtgtagtgcaccccatacattgagataatatattgcagctaaagataggatagggagtttttaaaatgtgaatatctgaaaaacaatatagatcagttgggttggaatgttacaagtagcttgcaagaggcagctggcagcaagatggatagaaaaggaagttatgatagaggagaatgtagtagattcttcactagaatatacctcataaattaacatgtcacatgtattaatactacrggtataatgatgcagtacttgaaattatttaataaatgttagattatattgtgaaaatcacaaagatcatttgttttcctttgttaccaatagtgtttcgtaaaactatcctttcgtttcacatgaattgttagacttcattaaactgtacagatcctgtagtgtgtgttccatccagtttctttattggagacagtggaattcccttggaagtaatagcaggaagtgtttctgcagatgarcttgttacaagaattcacaaggtccgacaggtaagaaggaacagaactgttgtttccgtaaatggtacgtcaggaattggatttttttttttgagatggagtctcgttctgtcgcccaggctggagtgcagtgstgtgatctcagctcaagtgcagcctccgcctcccaggttcaagtgattctcctgccccagcctcccaagtagctgggattacaggcacctgccaccacactgagctgatttttgtatttttagtagagacagggtttcmccatgttggccaggctggtctcaaactcctgacctcaggtgatctgcccgcctcrgcctcccaaagtgctgagattacaggtgtgagccaccgcacccttcctaacattggaatatttttggagcccctctgtatattcaggaaactgccatgccaaaaatcttaaaaggtagtaagtactgtctttgtcacctgtttttgtaaatagcatgaagttacaggtgccagtagccagtacctaatacttgactgacttctttacctttctttatttttttatttttttgagatggagtctctgttgcccaggctggagtgcagtggactgatctcagctcactgcaatctctacctcccgggttcgagcgatttttctgcctcagcctccccagtggtgggattacaggcgcatgccaccatgcccagctaatttttgcatttttagtagagacgggattttgccatgttggccaggctggtcttgaactcctgacctcaagtgatctgcccgccttgacctcccaaagtgctgggattacaggcatgagccaccacacctagccatcttttaccccagtctcaacacataatgaatatcaccataactttgttgaaagagaaagttgctgtcatattaaggctctaactatatattgcttaatatattttaaggacgttatactcaataattaatcatttctgtctactttggacaaatggctggtagaagtttgtaacttttttctttgaattctaatttgagggaaaatcaatagtgtgctttaacaaatgtttttatggtcttgccagcttgcaggtaaattccataatgtgattatatcatacttaggattatacattttggattcatctatttatgagcatttcgtatttctctttttatagagtataaatcaacctgtattttggtctctactgccatggtaagtttagattcttatctattaattaaaatccaatttattttctgcctagatrcatttgctaaaaagtgaaacatcagtagcaaatggcagtcagtcagaaagttcagtgtctactccatctgcgtcatttgaacctaacaacacttgtgaaaactctcagtccagaaatgcagagctttgtgagataccacccacttctgatacaaagtcagatactgcaacaggtaacttttaatgtacctttttgagtgcartagaagctccttcactacattttaatatttaaatattaatattttaaaaatatattgtatgtatttttcttcacatttatttaacttaaaatttaagagtcatattaaatacacatgtgtcatttagtggcagaagacaataaagtcagtgaatgtcagctcaactcccaaatagtcaacaatccagagcaattgatttataatttctgctattgcgctgcatgcttcaaggaatgtcatgacactgagcagttttataaatctcttactagcctagagaatttggaaagtttcaaatgaactaaagtattatatttggaattgtttctataacatgtaaaaagctatataaatttaagagaatagtgttatatatattttttttgattagaggtaaaagataattatgaaatagagcttgtagaagtaagaggtgtgactgtaaactcattgatagaaaaggcaaaagagaaatttttgggattgtggttggagttgtttggtgtaatatagctttgtattaggcaaccgaggggtaaataaatcaagatgttaggatattagtgtcctaaaagatgaatctactccagcatcccacacaaataatcatcaagcttctatttgaatgcattcaatgatgggaagctcattaccttgctaggaagcctgttctgttgttgaacagctctagtttttagaaagagtcttccttatattgagctgaaatttgatgccccataacttcctgttaacattaatgctgccttgtggagttacacatgacaggttttgaatatttgaaatacagctatttgtctcattttgaggttttacatcggatggatcattcaacttctggatgtgtacggaacggggggactctattatggatgttcatttaggtctacgacagaataattactttaattgtatttacctggatatatatcatttccaaaattcttcattccattttgaagatagacacatgtttccctctggtataatattctttcagcctgaaaattttcctttagcattacttattgtacaggtctggagttttctttatgtgaaatgactttgttttatcttcattctggaaggatatttttgctggatataaaaatttttgtttacagttacaggtattgtccaccgtcttctggtcttcatagtgttctaatgagaagtctccacaaattctgattgttcccccctgtaaggagtatgttgcttttctctggctgctttcaggatttctttctttctttggtttttagcaatttgactgtgatatgcctaagtgtatttttctttgtatttatcctgtgtttggtttgcctagtttcttacatctgtaaatgtgtgactttcaccaagtttgggaattttggtccatatatcttgctggaatgaattacatgtatattaggcttcatggtattgtcccacaggtttattttttcacacttattttttcttctttggattggataattctgttgatctgcaagttcactgactctttatcatctccattctgatgttaagcccatccagtgaattttttattttagataaaattatgttatacattttttagttgtaggatttctatttctttctctcttattataactttttattttgaaatagtttgactcataagttacagaagttgtgcagaatgagtactcttcatctacgttttattcttttaattcatttcaagtgtatttcccttttcctcatttgagttataatggctgctttaaagtctttgtctgacagtttcaatatctagctcatctgaggattggcttgtgttgatcacctttaccctttagaatgggtcacattttcttgtttgttcatatgtcaaaaaatgctggattgtatcttgtacattgttgtagacactctggatttcattatattcctgcaaagagtgttgtttttgttttagtagacaattaacttggctagactaaaactgcaagctctggcttacctgaggtgagtagcagctctaatctcagtttttttttagcttaaaaaaaatttttttttttttttggtcaggtgtggttgttcacacctataatcccagcactttgagaggccaaggtgggcagattgcttaagcccaggagtttgagacccgcctggacaacacggcaaaactctgtctctacaaaaatgtgtctgcagggtctggctctgtcacccaggctggagtgcagtggcacaaacatagctcactataatctccaactcctggcccacgtgatctcctgcttcagccacctgagtagctaggactacaggtgtgcaccaccacacctggctaattttttttttttttttgagatggaattttggtcttgttgcccaagctggagtgcaatggcacaatcttggctcaccacaacctccatctcctaggttcaagcgattctcctgcctcagcctgctgagtagctgggattacaggcatgcgccaccatgcctggctaattttgtatttttagtagggacggggtttctccatgttgatcaggctggtctcaatctcctgacctcaggtgatctgcttgccttggcctcccaaagtgctgggattataggtatgagccaccacgcccagcctaattttttaattatattctttgcagagatggggtctcactatgttgcttaggctgtctcaaactcctgtcctccagtaatcctcctgccttgccctctgaaagtgctgggattacaggcatgagtcattggatccaggcctgtagctttttaaaactatttattatggaaaatttcaaacatacatagaagtagaaaaaaatagtataagaaaaccccattaatccattgcctagcttcatggccaatattctcatctgtgccctccactcctcttctttttcaacttatttagaacaaatctcaggtaaaatatttcaatatgtatctctaaaatataagaaaggaatataaatcttttaagattatatatagttgccttttaaaataattttttttttttgagacagagtctcactttgttggccaggctgcagtgcagtggcgtgatctcggctcactgcaacctccacttcccaggttcaagtgattctcctgtctcagcctcccgagtagctgggactacaggcgtgcaccaccatgcccggctaatttttgtatttttagtagagacggggtttcaccatgttggccaggctggcctcgaactcctgacctcaggtgatacgcctgcctcagctcccaaagtgctgggattgtaggcgtaagccactgcgcccagccaaaataaattttaattatggaaatttgcaagcatattctaaagtagagagaacagaataacgaactcgaggtactcatcatcctgcgtcagtgattcccattatttgctcggtttttgttwtctgtctccctatatgaccacccttccaggttattttgaagcaaatctcaggcatttgtatgatttcatcttttaaaatatcaatatctaaaagataagaaatttttaaaaataacaacaatactattatcaaagccagaaagcttaatagtaatcctttttgtcatcaattatctaggcaatatttatattatactttttttcagtttgagttacagttcgatatattgctattggttgatgtgtttttaaatttaatatatagatttctgctctccctggtagtttttcctatagttttccacagtctggattttactgcatccccatggaattgtgtaagatgttcctctatcccctttattcctctaaattggtaaagctacagacttgatcaagtcagcttcattattctttttgacaagactactttgtagatgatgatgtatatttctctcaggagatacattatgcctgttattccagttggctttttaagcctaaaggcggaacttctcaatacatttttattatatttggatttttatcagttgttttagcttattgaggtgttttttcaatccagaattttttttttttttttttttttgagacagtctcgctctgtctcccaggctggagtgcagtggcgctatcttggctcactgcagcctccacctcccaaattcaagtgattcttctacctcagccttccaagtagccgggattataggcacccgcaaccatgcccagctgattttgtatttttagtagtgatgaggtttcaccatgttggccagactggtctcaaactcctgacctcaaatgatccacctgcctcggcctcccaaagtgctgggactacaggtgtgagccaccatacccgacctagaatttttcatttaggaattagcagttaaatatgagtgttaataagctatttcacacaattttgggtcacccataaagttacacatgggccaggtacaatggctcatgcctgtgatcccagtactttaggaggccaagatcagttgagctcaggagttcgagaccagcctcggcagtgtgacaaaacccagtctccatacaaaatacaaaaattagccaggcatggtagcgtgcactggtggccccagctactagggagggtgaagtaggaagatggcttgatcccaggaggcggaggttgcagtgagccaagatcatgccactgctctccagcctgggcaacaaagctagaccatgtctcaaaaaaaaaaagttacaaatttatattttacatcttcaagtcatttatgaaataccaaaggcagagaactctgtgacatacaattggaaatcttcctctatatgacatctttccatttctctttaattatgagtcatagattcacctaactgtactcttattcaacacttttcccccagcttgtccacaggttatcttcataagatgttaaatttttgctgataataagacatgtcctcagcatttattttatttgctaaagaaaggtggttaatttcctattgagcctctactggctgctagtggttaccacttcttatccaagagttgcattcagtgatacactggtaaacatttatcagaaggatctgtggaagcaaaggcccatatttgtagtatttgctaatttcccaggtgtaaatactcccactttgttgatttcaagctacctaggttatgcccctgaatggggagggagaagagatatgcaccatcgtctctacttagtcatactaattatttttactactactgtagtaacgaaaatgcttaccatgtgccagtctcagttaagttctaagcattttacttgtattaacacgtatttcttataacaaccgtgtgaggttactatccccattttactgatgagatacagaggtattaaggaacttactgaaatgactgtgtggctccagagtccttgttcgccaaagactgtaaagaagaatcaggttggtggcaagttgtaaggaagggaatgacagaggtcttgtagaataggctaggacaaaagtctatctttcaggaaatccttcaaagaaaactagcataaagaggctctctaaggaaccactctggtcagcagaagcagattccttggaccagtgtaagtccagagccatacccaggatcaaacctggcctgtattgctcactgctcaatagccacagccacattttaattaaaattaattacaactaaaatttgtccctcacttggcagtaacctcattttagatgttcaacagccgcttgtctagtggctgctgtgttagacagtatagatattggagggcactgctctagagtgaaggctacccatagccaggcatgcctcctgccagattgttattcatgttttacatctgacctttaccttggtgattttaactcggtaactgctttatttctatttgtgaacaattttatccacgtctaaactttaggattagtaatagcatatttagctccttctccatttttagggaaaatatataatgcttaagatataaaattattaacagatgctataatctgaaagatttattcctttaaaaagttgcattaaatgcagtattcttatttctttttatttaataattaaggaggagaaagtgcaggccatgccacttcctctcaggagcctagtggatgctcagatcagagacctgcagaggacctcaacatccgagtggaaaggtttgctcttctttttgcaaatagcattttgtttaaaaagacagtggttttcagttatttcattaatttgaattaaagctaaagttatacaaatgaagttttagaattctgagttgaaatttttgatcacctaactaatttgtatccataaacattacactctaagtgtaaagttttcatgtatgtctgaagtcaccagtcagcttttggtctgatcattctaagaatcccctttttaatggtattttggtacatgggtgtttccatctgtcacttctgcttttatctctatgccataaggataataagctccagatgggcaagaacttcagcttatttcatgactatgtactgagcttaagttctgcataagtgggtgtctactaagtggcatttttcattagttggtctaataatcagatacaaatttctggctctttgtagtttctagtatttttaatgatacagtaattgtcaaatcatagtcttttatgctgtgattcctacatgagttaataattagtggttaagcgggaatattttaaaccctgatttaaacccctttagcgttagttatatggaagtttaaaaaaattccttagcatttaaaaatttttttaaaaaaaccttccttagagagacttgatattttcttgttcacatagatgcttcggggaaacagggttcaaagtgattgctgatattgtctttgagtttgcttgtgactcagtaaagatcagcttcttttcagcaaaacctagattctgattgttctttgtaggggaaggggcagtgcccagaccttgaggtgaaaagcaggctggacctcacagtggtgaggaaagtggtataagcctagaagaatagcagcaggaaacttaagttcccaagggttcatcctgttttgcttctttctgatttgctaacaccaggcccactactctgtacctttatttgcaccactctgggctgaagtgaaaataaaaaatctggaaaagggtttggagacttggggcaaaaacctgaattacatcaggtagccctttattttgaggtggggtcaggcgctatttagttatactggaaaaagtttttaatagcctccattcttatgtaggggaatgtcagctagtgtctgcctgtgtcatagtactaattaattcacaagctgagatcctgcattttattcatctgcgttcatgccaaattaggaatcttgttccttttgtggaatctgattcattgacaatgacaataactaataacaccagcgtatgtaatattcccattccaaatgtccacttagctcattatttataccctaagagttgccatcgttctcaccatcccctgccatagactgtgaagctcttgtgccctcaactaactcatcccctgccatcttttgcagggtattgaactgtgaaactactagtttccctgtctctctgaactgaagtgctttttctcagcctggttaagttggacccatcagtccctgttgtgtaatctgatattttagaattatatgaagttctataaagcaaaattcatgcatttttctctgaccttgatggtattttaaaatctatttcatacaaattaaaaattcagagttaaaatttggcaggggctgtgagtggtggctcacgcctgtaatcccagcactttgggaggctgagacaggtggtttgcttgagcccagaaaatagagaccagcctgggcaacatggcaaaaccccatctctacaaaaaaatacaaaaattaattgggtgaggtggtgcacacctgtagtcccagctactcaggaggctgaggtgggaggatcacctgagcccaggaggtcaaggctgcagtgagccatgatcacaccactgtactccagcctgagtgacagagcaagactctgtctcaaaaagtaaataaataagaccaggcatggtggatcacgcctgtagtcccagcactttgagaggctgagatgggtggatcatttgaggccgggagttcaagaccagcctggccaacgtggcgaaaccctgtctctactagaaaaatacaaaaattagctgggcatggcacgcatctgtagtcccagctactcaggaggttgaggcaggaaaattgcttgaacccgggatgcagaggttgcagtgagccaaggtcatgccactacactccagcctgggtgacagagtgctactccgtctcaaaataaataaaataaaataaaataaaaaataaagcaggatggattagcaaatgtaagattcttactttcctctcaggctacagttgaaactgagatctatttccaaagaccatgtttttggaaaactaattactgtagttgactttaagtcttaggcttttttctcatctagcttcaaagaaaactaattttgttaagggaaagggtgactaaatcaaattgacattagtgagaaattcatcctatcttgtacataagaacatagtccttcaatcttgagctgcattttgtcaagtaaacataattaaaaaaaaacggattggtgatttgaaattgtgagatctaagtttttatttttaatattaatggatatacaatggttatttatttatttatgaggcagagtcttgccctgttgcccaggctggagtgcagtggcatgatcttggctcactgtagcctctgactcccgggttccagcgattctcctgcctcagcctcccaagtagctgggattacaggcatgcaccaccacacccggctaatttttaaaatatttttagtagcaacagggtttcgccatgttggctgggctggtcttgaacttctgacttcaggtcatctgctcaccttggcctcccaaagtgctgggattacaggtgtgagccacagcacctcgcctgtgatggttttttgtttktttgtttttgagatgaagtctggctctgttgccaggctggagtgcagtgacatgatctcggctcactgcaacctcctccacccagttcaagtggtcctcgtacctcagcttcctgagtatctgggattacaggtatgcgccaccatgactggctaatttttgtatttttagtagagacaggggtttgccatgttggccaggctggtctcgaactcctggcctcaaataatccacccgccttggcttcttcaagtgctgagattacaggcttgagccaccacgtctggccaggatatacaatgtttcactaaagtarcagatgtgaaataggaatcttttagcgaatctttagttaaaatgcattattttgtttatttcattatgttttttttttttttccctgagatggagttttgctcttgtcgcccaagctggggtgcaatggcacaatctcggctcactgcaacctccacctcccagattcaagcgattctcctgcctcagcctcccgagtagctgggattacaggtgcccaccaccacacccrgctaatttttatatttttagtagaggcaggggtttcaccatgttggtcaagctggtctcgaactcctgacctcaggtgatctgcccgcctcggcctcccaaagtgctggaattacgggcatgagccaccacacccagccatgtcattatgtttaaaatgggcagaattatctggcaaagataatatatactaccatgaattctagtctttttatttgaataagtttcaaacctcaacgttgaaaaaatagtgtaatggccatcttttaatttttttctttttttttttcttctgattcatttgaaagttgcagacataatttcacttcatgcctagatacctcagcatgcagctcctaggaagacattggctgagggtctgtgggctttgagcagggactccatcctaggccaggatctggggatctgtgctcacagacccatgtcctgcccccttctggcacccaagcaggcatagtgaccattaagaagtagatgccagcccggcacagtggctcatgcctgtaatcccagcactttgggaggccgaggtaggtggatcaactgaggtcaggagttcgagaccagcctgagcaacatggtgaaaccctgtctctactaaaaatacaaaaattacccggacgtagtggtgggtacctgtaatctcagctatttgggaggctgaggcaggaaaattgcttgaacccaggacgtagagattgcagtgagctgagattatgccattgcactccagcctgggcaataagagagaaaagccatctcaaaaaaaaaaaaaagtcgaagcccaaatgtagaagttatggaacagtcaatttgttattaaattagatgcagtgtagcttttcacccaaattaaaacaaacttgcgtttgtatttctcagaagaaaattctacagatggtctataaatacatttatacaccattttcagatggtgtatattttcagayacaagcacgataccattatcatactcaagaaattctcaattgatacagtaagattatctaatttgtccgtattcagatttcccagttgctccaataatggcccttttaacttttcttcccttgattcaagatccagtcaaggattgttcattgcatttagtttaggctctgaatccaagacacttcttgtttgcatttttcatgatttagacattttgaagagtctaggttagttgtttctacaatgtcctttgatctgctccctgttctatcattagattcaggttaaactctgataagaacattaccaagataatgttttgtcctttccattactcatatcaggagacaagtaatatgagatgtatgcattattggagctgtaaagtttaattatttggttaggatgttgtctgttgggtacccttttcattttctaatatataagttgtctatggggtgattcaaatggtaaatatcctactgcttaaaaacttcacccggtggtttcagcattcattgatttttgctgtaatcacctatttcattgatgtttaaaaattgtggtatttttctcattctgtttttttctacatttatcagctagcattcttctgtagagaaatgctttgatctaccccctctactttccatctgcccacccccgccccctttttccagtaaactacttattggacaccagcacccagatgaaggaatagaaaattaccagtgctagtctggcatggtggctcacgcctgtaatcccagcactttgggaggccaaggtgggcgggtcacctgaggtcaggagttcaagaccagccttgccaacacagtgcaaccttgtctctattaaaaatacaaaaattagctgggcgtgggggtgtgcatctgtagtcccagccactgaggagcctgaggtagaagaatcacttgaacccgggaggcagaggttgcagtgagccgagatcgtgccactgcactccagcctgggcgacaaagtgagaccttgtctcggaaaaaaaaaatgaaagaaagaaaattaacagtgcctaataagctttcctaatgccccttcccaattatggattccctccataagatgatcactatcctgaatcgaacactgtaggttagttgtctgtttgtgaactttgtgatggaatcatgcaacgtgtatttttgtgtttgatctcctttgttcagctttgtattttgaggcttatccgtgttgcatgtcacagtaattggtgcactctcattgctttatagtattctgtttgactctaccttgatttattaatccattctactgttggtggacattaggattgttttcagtttggggctatttgaatagaactgctatgaggaatattcttgtatatgtcttggtgaacatgtgtacacatttcttttgggcatatatatgaagaagcgggaatttctgggttatacatagtgatcaaacagctttccaaagtggttaggccaatttacagttccccttagcagttaagacatgtcacagatgcttttttttctctcatgtgttactatccatttctctattctttttggtgcacaaattgccccaaatttgacttgttggaatccccttcatattgggtcttctggctttttgacagtactcactcccttgattgctggcacacattgttcagtttggtatacaccaaacacttttagagaaaataccattttcatttaaaaaaatgaaatataattcactaccatgaaattgaaagtgtacaattcagtgagttttagtatattcacaaggttgtgcatccactaccactgtctaatttcagaatcattattttattttttaaatttttttatttttttgagatggagtctcactttgtttcccaggctggagtgcagtttcaccatctcggctcactgcaacctccgccccccaggttcaagcgattctcctggctcagcctcctgagtagctgggattacaggcgcatgccaccacacctggctaatttttgtatttttagtggaaacagggtttcaccatgttggtcaggctggtctcaaactcctgacctcgtgatctgcccacctcggcctcccaaagtggtgggattacaggcatgagccaccgtgcctggccgattttattagtttttgagatggggtttcattacgttgcattacactaccatgctcagctgattttatattattatttttttttcctgaggcggagtctcactctcrcccaggctggagtacggtgacatgatctcggctcactgcaacttccgcctcccaggttcaagcgattctcctgtctcagcctcccgagtagctgggtttacaggcgctcaccaccacgcccagatgtttttctatttttagtagagacagggtttcgccgtgttggccaggctagtctcaaactcctgacctcaattgatccgcctgcctcggcctcccaaagtgctgggattgattacaggtttgagccaccgtgcccagcctgattttttattttttgtaaagatggggtctcaagttgttacccagactggtttcgaactccagggcttaggctatcctcctgcctcagcctcctgcagtgctgagattacacatgtgagccaccacacccagcctccatttgtttgtttatttcagacagggtctccctttgtcacccaggctggaatgcagtaacgcgaacgtgactcgctgcagcctcgacctcccggctcaagcaattctgttaccttagcccctaaagtagctggaactacaggcacacgccaccatgcctggctaatttttgtgttttctgtagagacagagttttgccatgttgctcaagctggtctttagctcaagagatccaccaacctcagccctcccaaagtgctgggattacaggcatgagccactgtgcccagcctccattcatttttaactgatgaacttcttacagttgagaatcaagttggtgttagtaatttggtattaataatttgctggccttaagtttttatttttacaggttttttttttttttaccatagtgctgtttagttttatataaggagtagagcatttataagtcactgatttatgtatttgtttgaaaatgtatttgtagattttaaagtcaatatcaggtaaatcagaaaaaaagggaaactaatcataagtgggaagtgaggcatttagaatgaagctaggcttctgatgggctctcgttgactccaggatttctgtaggggcctgaagccaggcagataaatagttgcttgctttttgtttgtttgtttctttatttctccaattgttttagctaaatccatctcctaaatgtgttttatattaatatgatgtgtctcaattagtggtggtttttttttttttaatacagactaacaaaaaaacttgaagaaaggagagaagagaaaagaaaagaggaagaacaggtaaagttcatgcagttagcattgttttgtcctctcattaactgaggttgtgattgattgattattctattcagtgtggcaggcctagggtgacttcatagttttagttcagtgttgcagcactatgaagataattcctgttttctctagtagagtcatagtatatacattttttgtgttcttttcgtaaattactatgaataaattagmccatgctttttccctctgcaatgatttttttttacactaagaataaagggacttgagctaaaatgtttggcttgaggttgaacaaagttttagttcatttttgtgaaaaaatgtatagacattttgctgaatttttcctctcctgttaagcattctagcacatggttcatttttctcaccatgtatacctaactgtgtagcatgtctttggagttctaatataggaaggttaccatttcattcaagccaaatacgtgactgccatgttgtccctgaagggtaatatatttaccctcatgactaaagacctgtaattatgcttgccttcaaattacactgactacattattatcttaacagaccattggcaatgatttatagattgatagacatttgaccattaascrtgccattaataaactcgtctagacttamattttatgaagttttattcttttaactgcagttttcgttgcattcaaaataatatctggggcagattatcaagtttttggatcataaaactttttctttaattcagagagaaattaagaaggaaattgagaggagaaaaactggaaaagaaatgttggattataaaagaaaacaagaagaagaattaacaaaaagaatgctggaggaaagaaacagagagaaagcagaagatagggcagctcgagaacgtataaaacagcagattgcattggtaagtcttaagtttccagacattcgtgaaactgtttttctgtgcacagtagctttagattactaccagactgtgcacacaaaaatagattttagtgactcatagactaccaatcctgagcttccttttattagaaattgtaaatgaattaaaatagttaagattaaaattgagttgatttttttgaagtgatttttattcatattttgttaatttatgacttttatcagcattcaaaaagcagcttttaaagattccctagaaaataagctaagtactagtacctactactagtactaagtacctactagtagtaactactagtactaagtacctagtagttcttctgtagtcacaggcacacttttttgcaacattgaaaggatttaggcacatcataaagcttagtttgcaacaattgcttttataattcatcagctgcaatacatattaaaaccatcccgccaggtgtggctcacgcctgtaatcccagcactttgggaggctaaggagggcggatcacctcaggtcgggagttcaagacttgcctggccgacatggtgaaacgccatctctactaaaaatacaaaaattaatcgggtgtggtggtgggcgcctataatcctgctacttgggaggctgaggcaggagaatcacttgaacctaggaggtggaagttgcagtaggctgacatcgtgccattgcactccagcctgggcgacaaaaagcgaaactccatctcaaaaaaaagaaagaaagaaaaaaagccatccctaccttaatatttttgttcatttggtcagtcaacaagtatttgttgagcatttattatttatttatttttgagatggagttttagtcttgttgctcaggctagagtgcagtggcgcaatcttggctcactgcaacttccacctcccgagttcaagcaattctcctgtcccaggctgccaagtagctgaggttacaggtgcatgccaacatgcccagctaatttttgtatttttagtagagacgggatttcatcacattggtcaggctggtctggaactcctgacctcaggtgatccacccacctcggcctcccaaagtgctgggactacaggcgtgagccaccacacccaggcttgttgagcatttattatgtaccagaccttgttccaggctttggagatacagtagtgagcaaattcatttccttgtttccttaataataattctggtctccgacagttgataaaactaaaaaataacagttccagaatgttaaagttcacatatggtgttagacaatttcaggcagcaaaggcacagtggctcacaactgtaatcccagaattttgggaggctgaggtgggaggattgcttgaagccaggagtataagatcagcctgggcaacaaagtgagaccccacctctacaagaaaagaaaaaaaattagctgggcatggtggcacacacctgtagtcccagctactctggaagctgaggtgggaggattgcttgagcccaggtgttcagaggctgcagtgagctatgattgtgccactgcactccagccttgatgacacagcaagaccctgtctcttaataaaaaaaaaaaattccatgcatatttgtttggaattgtgtgaattaaccattctggcagtaaaggtaattggtatttaatgatgttttaaaggaccgtgcagagagagctgctcgttttgcaaagacaaaggaagaagtagaggctgccaaagctgctgccttgctagcaaaacaggcagaaatggaagtcaagagggaatcttatgcaagagaaagaaggtactatatttcatgctgaaacatctctgtgcacataggggctgaggagaatgattataagctggtttttaacactgatgtatactgtggttataagcagtccattccagagggacatattaatttgacagctcccaatggtatctctcatttcgtgtgagtgtacactaaaaaagtactacataaataactttaaaagagggcccaatagccgggcgcggtggctcacgcctgtaatcccagcactttgggaggccgagacgggcggatcacgaggtcaggagatcgagaccatcctggctaacatggtgaaaccccgtctctactaaaaatacaaaaattagctgggcatggtggcgggcgcctgtagtcccagctacgcgggaggctgaggcaggagaatggcgtgaacccgggaggcggagcttgcagtgagccgagattgcgccactgcactccagcctgggcgacagagcgagactccgtccccaaaaaaaaaaaaaaaaaaaaagagggcccaataaatacctgttttccaaagacagaaatgatttgtaaccaaatgaatataatgtttatctcatacgtattaggattctttatttttcagaatcccctatccgataggattaagcaaaagaggaaatacattggctctgcagttcagaaatccaagggtgaatttggttaggcatagctgtgtccagcaatctaaaggataccattacaatttctctctctctttttaattcttggtttcttctgttttagcttcattcttagagaaactctccaaatggtgtcaggagagcccagcacctcctggcactttcaggaccttgaattcacgatcccagacagaagagattaaccttttctctctcatgcctgtatcagtcactgagaattctgactgcccctgtttggatcatgtggccaccttcagagtagtcagtgtccacatgtgtgggccctctggttggaggaggtgacatgcccaatcttgtggtgaaggaggtgggggaaatgttattgataattataccagaacgaatgacacatagcagggtaagaaggcagttcccaaaacaaaaatatgttgaaaagacaaaaaaagtttagatttctagtacaccttgctaattggattatggttaatacttattgtcttctctgtgccttttcatatttccatattggacagttaacaagtagtattttgtaatcagaaaaatttttaaaaataattttccaaaaataatgaagtaataaatttaacaaaaatgtaagatttgtgtgctaaaaatgacaaaacattgttgaaagatttaagacctaaatacctggaaagtatcctatgttcatggataagaatacttaacattgttaagatgataatcctccctaaactgatctaactgatctatagattcaacactcctatcaaaattccagctggcttttttccataaattataaacctaaaattcatatggaaatgcaagaaacacaatagttaaaacaaactggaaaatgaagatagatgactcatacttcctgattttcaaacttactgcaaagctatacagtgatgtaatggtataagatgaacatacaggtcattgtaatagaatggagtctctagaaataaacccttacatttatgaactgtttatttttgaaaagggtaccaagactattcagtgggaaagaagaatcttttcaacaaaaggtgcttggacaactgaatatctacatgcaaaataatgaatttggacctttacctcacaccatgtacaaaattaacttaatggatcatctaccaaaaagtaaaactataaaatatatattcttagaggaaaaaagaggaatatatttttgtgatctaggagtagccaatggattgttagacatggcactaaaagcacaggaacaaaatttaaaaataggtaaatcgcacttccaaaatttaaaactttcgtgctttgaaggatatcatcaagaaagtgcaaagaagctgggcatggtagctcacacctataatcccagcactttggaagactgaggcaggcggatcacttacggccaggagttcaaaaccagcctcgccaacgtggcaaaaaaccgtccctactaaaaatacaaaaattaactaggcatggtggtgcacaccagtaatcccagctactcaggaggctgaagcatgagaatcgcttgaaccagggaggcggaggttgtagtgaaccgagattgcgccactgcactccagcctgggcgacagagtgggactctgtctcaaaaaaaaaaaaaaatgcaaagaacaacccatagaattggagaaaatatttgcaaatcatatatttgatgagagacttgtgtctagaatataaaaagaacctgtgactcaattataaagacacccagttcaaatatgtggaaaggatttgaatagacatttctccaaagaagataaacaaatggccagtaagcacatgaaaagatgttcaacatcattagtcattagggaaatcaagtcagaaccacaatgagataccatttcacacccactaagtatgcctaaatgtaaagagaaagtaataagtgtttgtgaggatgtggagaatttggaacctttctgtgttactggtgggattgtaaaatgatgtagccaccttggaaaacagtttgccagtaacgcaaaatgttaaacatagtgttatcataggacccaggagttctacagcagcagtttatacagcagtttatatccaagagaattgaaaacgtcaacacaaaaacctgtacatgagtatagcagcattagtcaaaatagctaaaatgtggtaataacccaaatgtccagcaactgaagaatgtgtaaactgtatctcatacaacaatgtttttcagcaataggaataagaactgatacctgcaacaacatggatgaaccttgaaaatacaatttccatgaaaaaagcaagttacaaaggtcacatactgtatgattctattacacaacatgcccaaaatagacaaatccrtagagatagtagattagtggttgccagggtctggaggagggagggatggggagtgactgctgatggggttggagttcctttttggcatgatgaaaatgttctggaattagataatgttgatagttgcacaattctgaatatatttaaaaatcactgaactgtacactttaaaaggcttaatttttgtttgtttgagatggagtctcgctctattgcctaggctggagtgcggtggcatgatctcggcttactgcaacctacacctcccgggttcaagccattctccctgccttagcttcctgagtagctgggattacaggcatacaccaccatgcccagctaatttttgtattttttagtagagacagggtttcaccacgttggcccggctggtcttgaactcctgacctcaggtgatccgcccgccttggcctcccaaagtgctgggattacaggcgtgagccaccacacccagcctaaaagagttaattttttatatgaatctcagtaaagcagttattaacaaacaaaaagatctgatatggtagaaaaaactattgtcattgcacatttccacttccattttctctaacttaatgatattgttagagaatatatagaggtgaagattgtgactttaattttcttttttcatagcactgttgcaagaattcaattccgtcttcctgatggttcttcctttacaaatcagttcccttctgatgctcctctagaagaggcaaggcagtttgctgcacaggtaaatttatgtcttgagttgtagtaaaaatagatgtgtaggttactaaattataggaagggaaaatttcaaagcagaagttgaatgtgagtgaattgtgacctctccaggagggaggcacaagacgcctctgagatattgtggaaattctgtcgggtgttagtgcatatgggagtaacatatctgctttgtgtgcagaagtaggaatttgctgatattgtataataggtcctgggaacttttcttttttaaaattttttgagacaggatctcactgtgtcgcctaggctggagtgcagtggtgcgatcacagctccctgcagcctcgacctcctgggctcaagcgaccctcccacctcagcctcctaagtagctggaacttacaggcatgtactgccatgcccggctaatttttgtactttttgtagagacagggtttcaccatgtagccgggctggtcttgaactcctgggctcaagcattcctcccacctcagcctcgcagtgcgttgggattacaggcgtgagccacccagcccagccactgggaacttttttcactgattagtagactcattgaaggagtgacaggcaagtgatttcccgaaggtctgatgtgagggaattgtcccactcccctgaaatggaagcagtttttctcactcctctctccatttcctacagattgcttaggggctggtcattttcctacgatttaccttttggctaaggaaaaagaggcagtaaactttatttgacaatagtatcttcttcaggaatttacttccaaaaggtggccttactcagaatctgaatggagtatatatcttgagatatgagtagttttcaatttatttttattccctgattgattccttattcaaaacggattctgagcatcagatgtcctttgggttctaggctcattatatgtatcagtatttttttcatatatataatttcaaggttaaaattagggatttgggttcagatctttccgccagaccttttctccacatttggtcgtcttcttgcactcgtgaactaggctggacaatgtaaacgtttattttaaaaactgtttccccctaagctttatagtagaaacagtcccaaataggtgctttcattcttcttttgtcttggagcctcccacaatgtgtcccctgtcctgagtttcactgcttttgccacaggtaaatggagaagggactacatctttgattgcatgtgtcctattaaaactccacctcaggccaggcatggtggctcacgcctgtaatcccagcattttgggaggccgaggtgggtggatcacaaggtcaggagtttgagaccaggctgaccaacatggtgaccccatctattctaaaaatacaaaaattagccgggcgtggtggtgggcgcctgtaatcccagcttctcgggaggctgaggcaggagaatcgcttgaacccaggaggcagaggttgcagtgagctgagattgcgccactgtactccagtctgtgcaacagagcaagactccatctcaaaaaaaacaacaggctgggcgcagtggctcacgcctgtaatcccagcactttgggaggctgaggtgggtggatcacgaggtcaggagattgagaccatcctggctaacacggtgaaaccccgtctctactaaaaatacaaaaaattagccaggcgtggtggcgggcgtctgtagtcccagctactcgagaggctgaggcaggagaatggtgtgaacccgggaggtggagcttgcagtgagccaagatcgcgccactgcactccagcctgggcgacagagcaagactgtctcaaaaaaaaaaaaaacaaaaaaaaacccaaaaaacaaaaattccacctcagtacagttatcaagttttgtattttgtgtatctttagaacagtgaggggtatgtgtgatctacagtaaaaaaaaaaaaatacgaaaaacaagttagtctccttctttggaatcttctagggaaagatacacagatgtctaagattttacaagtgatttttgtatatagaggacttaaaattgtgagggtgacttacagtgctgtccattgtacgttcctggatctggtattgtgtgtatcatgtaggttgattatggaccatttatgccttgagacaaggaggaggctacacttcctgaaggtatatatgagggaaatactggtctagtccaaattcttaatagggattacctgtaatccaaatgtgtgttcatgagacattaagtttgccaaaggatagtgaaaacctaatgatgaactgcaacagtacttaaaggagatacacaattgtccatttttactcaatttatttgtgtgtttttaggaactatattttgctattttgtggtcatctttgagttacagaagcttttaaaaactatttggatttgatagcttttcagctgcttaggggctggaagcacaattttatacctttttttgagtttacatgtaatgaacttttaaaattaaggcartgttaattaaagcatcattttggattcatctgagtaatatcttacttttaaaggcactctttaagtttttaaaacttattttacagactgttggcaacacttacggtaatttttcgttagcaaccatgtttcccaggagggaatttaccaaagaagattataaaaagaagttactggatttggaacttgccccaagcgcttcggtggtactgttgccagtatgtatatacagatgcatttttttctcttcttattgttttctgtttatcatactcttcatttcttataattaggggaaaggaagtgcacagatatactgaaggtaattaaaattcaagtgatccaataattagatgaatttataattccattatcctgtgctttatttgtattgctgatattacttgtgagacatgaaacagtttaatttttaacttttttcttcacatatttttgtgtacaaaaaaatgaccaataggagaagacagtaagaaatgcagattatctgtctaatccacacacttagtgtcttttatttatatatgctctactgtttgccaaaaataacatgaatattcaaacagattatcccatttgatctgcacaacaatattttaatctctggtgaagaaaagaagctcagacagcttaaatgactgctgccgtaactgggatgagagcctgggtcttctgtgtcctggttaacatagttttccttgctctatactagacgtgccctccaccccaaaacagttagctctccagtaatcaggatttcattgtttgaacctttttttttaaatcagcaagaaagactcttcttataaaagtttaatattcttaaaaaatagttggctcatttcactgagaactactttctagtttgtatattacaatttctcttaaacacagctccaaatattataacataaaattacaattgtatatataatatacaatattatacaattatatacaattattatataaaataattatataaaataattttataattataatatattatataaaatataatatatataatatataaaataattgtatactatacaattatacagttattatacaattatatacaattgtataatattgtatatttatctttaaaaacttctgggagtcttcagaagtttatatatacgtgaaaaacagcaaaagatatcattttaccctcttgaagtaaactaaaattggtaggacctccttttccagataaaagtttcatctggaaccttgggcgtgatgtgattgtgctaacgtagtctttatctaggtttgtttattaatttctaggcaggaagaccaactgcatccattgtacactcttccagcggagacatttggaccttgttgggaacagtgctttatccattccttgccatctggagattaattagcaatttcttgtttagtaatccgcctcccacacagacttcagtgagagtaacatcgtcagaacccccaaaccctgcatcatctagsaaatcagaaaaaaggtatctgtgtgtgttttccccatttataaaatatgtaagtcatgcccagtatcttttttaagtaaaaagttgagtactttgcctttctgtatatgtcctctccagttcccacggtggaggagaaaaactccgatgctctgaaactttattacatcatctctactgcagagctcactacctgcgttttctcagccagctttataaaaccaattttttggaaagcagcttcacctctactggtttattgtttcattcattgaagtttctttaccccataactatcaaggcagatttttttttctagtaacctctttcttgctaaccatgtttgcttgacaagatagttcattgcattaatcgttcagggtcatcttgcataattactgtaggtgaactactctgttttgatcattttaaccctgttggttcttttatctaccggctgacagccttgtctggatcattcagagaaggaccaaattgtggaaacaggttattgctttgaaaattctctctcagagaattattttggactaatcccttaaccaagagaccagggcctgatgcagtggctcacgcctgtaatcccagcactttgggaggctgaggcgagagaattacttgagcttatgcattcaagactagcctgggcaatatagtgagaccttgtctgtacaaaaacaatttaaaaatttgccaggcacatgtctgtggtcccagctacttgggaggctgagatgggaagatcacttgagcccgggagattgaggctgcagtgagccaagattgtgccattgcactccagcctgggtgacagagtgagagtgagatcctgtctcaaaacaaaaacaaaacaacttttatagcagatagcatgcaatggttagcatagtaatacaacactgacaattttaactcctatctttgttaagattttatatacttgaaacaggttaatgggaagtattttcctagaaagtaagattatgcccctttctaataattacataataatgtaacttactgaaatggacaccgctgttaagcactctatgaggccttttataggcattataacaaatcttcatgccagtcctatgtgataagtaatagaaattcttttttctctgccctcagtatggagaagccctagtcatgtgtttatgkattccataggtaatgacatataagtattgtrattgggctgctttgtcctttatcttatttcataactgttaggcaggaagaccagttacctactaagtacgttactgtagtgaggacagagggaagctcaaacaaggctgaatcttaaaactcttactgagcaatgggtgggagcatttaatactgaattactgtaatataggagagytcgttgtatggatttttaaaacttttttcaggctgggtgtggtacctcatacttgtaatcccagctctttgggaagctgaggygcaaggatcacttgaggccagaagtttgagaccagcctgggcaacatagtgaggctccatctctacaaaaaaaacttttagtgagctgtgtgtgatagcatgtgcctatagtttcagctgcctgggaagctggggcaggaggattgtgtgagctccagagttttgaggctgtagtgaaccgtgatcgtgccactgcactctagcctgggcaacagaggggacaccctgtctcaaaaaagaacaaaaaacaacacttttttcaaataagagaaaggtcttagattagagcaaaggatggaataaaaggtgtgtcaaagagagggtgaagctttgtgttccaccattatttttccttttttctctcccctctagagttataaaagtctgttggcttaaattttatccttatacctttgtattttcagaataggaagtcctcttcattcttaattgtttataaataagtcattcttgaagattttgcgaaggatttaaaattgaccctttctgtcaagctgactggagctttggatagtctctagggtgctaagttacaaatgttttagtagataatgtcggcttgcataaataacaaaggaaagattagttggcaaatggtcacactcctctaatgcttattaagtcactaagaaacacaatggaaatggaatatatgatttggctggctggcttgacttagagatcagatgaagctaaactaccaaagactgctaaagtctagtactgtgttagtagatataatggtctcccatggactttccttactttagatggcattaaaagtaaaacttagttgcctgtactgatggaagttggaaacagcttgtattactattgtttttattttatgacatcttccccttgctccctctttttcgtatcagggaaccagtgagaaaaagagtgctggaaaaacgtggagacgactttaaaaaggaggggaaaatttatagattaaggactcaagatgatggtgaagatgaaaacaacacttggaatggaaattccactcaacagatgtagtgtgacaagtataatatgtgcaataatcattgtttctcttatgatttaattcaactaaaattctactggagaagtgggactgctttatattttccaactggtctataaaatgtctctttattcctgcttagtgggtgtgggttgaaggtgtttaactcagaaaagtaaagacaggaaataactctctgctaggtccttgcttatatggcaaccactgctagaaccctaaaagaaccaaaaatctgccacagcctgcctccatcagcttcttatttagtatttcatatgcccattagccctatgcttcagatgacacgttttgtttagagctactttgctccaagactcttaagcccaaagtaactggtatgtcactgagtaacttgactcggtgtcagagcattttaactagccactcagatgagaatttatgtttaacttctctttttactcatcagctgcaagcaaaatcttgtagtttttaatcttaaacactgaataaaaaaactttcccctaaattggaatgatcttagttttgctttgagttttgttatctagcatctttttgttgcacagggctctattgaggtcctatgtctctgattttttttttccccagtattgccctggagctgtctctggaaagtagctggcgaggttaccttaactatcactgaagaaagaaattttctgacacactgatggcatgtgacttgtctcctaagtcagtgaggcatcactttgtttgcataaagtatacggtttgttaaggcctttgttcttgtgagatgcaaaacagctgctagtctgcaacctagttttccctctcacctttaactgacgttttgtcctcaataattacacaaggacctagagtacctataggacaaaaagtatagaataaaaatatgcctttagtcatttggtttttcttaaaaagttgagattcttaatctgacttacatgttactttatccgtatgtctttgttagtggagaccgctaaactaatgatgtttgaaaacagttcctctgttttagattggaagatagcactctagagtggacatacggaaagactgtgactttattttgtaatgggaggaagaaattttctcagagcaaactttctattttttacctgtgaaataacagtgactttttaaaatggtgacagtgttggcaaggaaacagcaacacaggctgcgctgttggtaggagtgaaaaccagtataattcttctgaaaaacatttatcagaaacttaaaatatttcataccgtttgatccagtagcttcttctaaatcataaatgcagacaatgtttaggtaaagacatactcattaagtgttatttattttactcaagaactggaaaccaactaaatgccttctatagaagtaatttttgatgaggagaaatggtacaatactaattaacaacttggtttaacatgtttactgagcatctgttaagtgttgggggaaaaagcagcaggatccagagctataggtacagtgtgatctcagctttgcaaacacattttctacatagatagtactaggtattaatagatatgtaaagaaagaaatcacaccattaataatggtaagattggtttatgtgattttagtggtatttttggcacccttatatatgttttccaaactttcagcagtgatattatttccataacttaaaaagtgagtttgaaaaagaaaatctccagcaagcatctcatttaaataaaggtttgtcatctttaaaaatacagcaatatgtgactttttaaaaaagctgtcaaataggtgtgaccctactaataattattagaaatacatttaaaaacatcgagtacctcaagtcagtttgccttgaaaaatatcaaatataactcttagagaaatgtacataaaagaatgcttcgtaattttggagtaggaggttccctcctcaattttgtatttttaaaaagtacatggtaaaaaaaaaaattcacaacagtatataaggctgtaaaatgagaattctgccccctcacctcttaccccagtactattctccagaggtaatctattaacaatttcttatgtaattttcarraaatttgtatgcgtatataagcaaatatgtaatctttattttttaaataaatgggatcatattatatattctaccttgcatcttgcttttttgcttacatagtcttgagatcttttcctgtcgacactgagctacctcatttttaatggttgcatagcattctgcttgatgaatgtactgcattcagcttactgtccatgctctggtggcagtcagtggttattacacaattttgtttttctattacaaacattgccatcgtaagcaaccttcagtgggaggtatagtcttactgtgaaaatatacctgtagaatatgtttgtataacttgctaagtgaaagaagagtgtttgcagtttggattgtgaaagatgctgttgcattgcctcctctacaagctgtgtgaatttgaacccctaccaacagtcatgagaatgtccattttcccacacccttgccaacactgtattatcatactttcttagctttgtcaaaatgatggatgaaaaatgatacaatctcgtatgcattgtatttatcatgaatgaagtgagcatcttgatgttattgatcagtttggcttatcgtgagagctccgtgtattccttgccaatttttgttttcatatttttcttactgatttataagactactgtgtacattacagccatttgctagcatatgcagtgaatattttctcttttttttttttttttttttttttttttttgagacggagtctcccgcttgcccaggctggagtgcagtggtgcaatctcggctcactacaagctctgcctcctgggttcacaccattctcctgcctcagcctcccgagtagctgggactacaggtgcccaccaccacagctggctaatttttgtattttgtttagcagagacagggtttcaccgtgttagccaggatggtcttgatctcctgacctcgtgatccgcctgcctcggcctcccaaagtgttgggattacaggcgtgagccaccgcgcctggcttctccctcccttttgttgagtatatttggtaattttttccacagtattatctgtgttttcctttatgacctccaggtcttgagtcttgcttataaatacctttcccacttcaaaaattaatttttttatatcctaggattcttatggtttcctttttgtatgtttaaatctggtatccaaggaaaggacctggctccttcccatgcccgtggctaacatccccaggagcctgttccctcactgccttcatgggccctctgccccgagtaggcgcactgcctgcgaggtgggcatctgttccatgtgcagatgcttctgtgtctaggctttctcttcctttattgatctgtttgctctctgctataccaaactaagctagctttataatgtgttttaatcttcttcccccagatttatcctggctcttcttacaagtttatttcatatatgaaacttctttatattattttgttagtgttgtcccaaaaaagtgatgttgagttttgagattatttaggtataattggcaccttatgatactgagtttctccccaaagaatgtcttttttttttttttttttgagacagtctcactcagtcgcccaggctggagtgcagtggtgtgatctcagctcactgcaagctccgcctcccaggttcacaccattctcctgcctcagcctcctgagtagctgggactacaggcacccgccaccacgcctggctaattttttgtatttttagtagagatggggtttcaccatgttagccaggatggtctcgatctcctgacctcgtgatctgcccacctcagcctcccaaagtgctgggattacaggtgtgcgccaccgtgcccggccaacaaatgtctttaatatcaattttagaaccacccccacccccatctgacaaacttttccagtcgattgatggagaaaaatgcttgtgcaccacaagctcctgactgccaggttgggactcatggcgttggaatgttttgatagggaaaggaatgcttacaagaagcaaatttcaagtgtgatcatccttttaagaccagcccaaaattactctgtttttacaaaacattttcccagctatctagatgtaatatatgggccaatcaagtgtttaggtgtttcacactgagattgtctctcagcacatttgaggggattgtaaagaacatatctctgctcccaccactgccctggaaatgctatgtgaatgggtgaacacacgaaaggagcatttgtgcttttcattgctctctccaagttgtgcttgccagagacaatgagacatggtccttggccttaagaagctgatgatagagaaatacgcaattccagtatagaaactggatggtcaagttgtaataggggatatttacaagcaaagcagacgaaggagaatctgcctggggatttcagggaagccattcagaggaggaagtacattatttcagctgagacttaaaggcattttcagaagaaagggcatcctaggtggaaggagtagcatttgggaagacacaaaggaatatggatagttgtcctatgtgccgtttagaactaccacaaattgggaaaggaggaaggaaacagactaaatgaaccaaggtcagatgggagagctggggatggcataaaaagtggcagtgggggtgttcgaggggtgggaaaaggccactttctgcatgttgtggtatttgccccaaggaatataatgtcaacagaaagacttggtctggtgagaaagcttaatcggagctccagatggcttgtgtgacttcataacttctcttgaacctactttctcaaggaggggcaaccataggagaaaggacagtctgctgtttttattttctggaaaacacaagatgtgaagctagggagagcttgcagaagggcaggagatgatattgcagtctatgcaatggagttgatttcttcttataggaaggatttttacggtttttgctcccttaacaacccttaacaactctgaaacttaaaacagccctgttaagttcaattaagtggttcacagacccactagaccagtatctacacgtttccgcaagagctacttgcttctcaaatgcccaaatgaactctgatactggagcaagatggagatatttccattttactcagcaagtcgaaatcattcaagattaaagtcatctctaacggtgcagcaggactttatggagaagtccagtatcagcagagtctaagaccctaaggtgtttggtggccggtaaagatagatgaagaaactaggcctgcttcatagaacttgaggtggtaactcatcagaatgaagacaccgggctcaattcctgttggcttcgttgtgttttcccttgcttagagcgcttgcagtacttgtatgacagaaatgccaagccacagactccaagaagcacaagagaaaagagaacgtacaaagctgtctgtgcttctgtggtgccgagcattagccccaggaactgcacctcctcctgtctcacggggctgatggtgggtccggcatctaggagagtgtgacacagggtggttggtgctctggcgctgatttgagttctcagatctctgagaccccagcagaggctgcacggtaccccaaatccgcacagccattgacgggatgccgaggtggaggtacccatcccctttcactgtgtgtcaggagcctctgagtgaagttaagcagttgtattttttaaacatctctatcagcaattagaatacggttgaatatcccttatctgacatgcttgcttgggatcagaagtgtttcagatttgggattttttaagattttggaatatttgcatatacataatgagatattttggggatgggacccaggtctaaatatgaaattcatatatgttttatatgcaacttatccacgtggtgtgaaggtaattctatacaatatgttaaataattgtgtgcatgaaacaaagctttaactgtgttttgactgcgacctgtcacatggggtcaggtgttgaattttccatttgtgttgtcatgccagtcatgctcaaaaagtttcagattttggagtattttggattttgaattttcagatgaaggattctcagcctgtataattgaaactggataattgtcatttacatttgtgtagtgatttatactcttacatttaacaaatacggggcacccacatggtgcaggcattgtactttcatggtccctttatttgatccttataactgccctgaagcatgtgcctggtttcttatctatgagtgcacagcaagttagtggtagggctggaagaagagtctagacctgcttattcccaggtcagggctctggtttctaggtgtaacattgaccctaagtgtcctttgttccaccccaggaaatgtctggagcattcaaagaaaataaacatttgttgaatgaatgaaggagatggggcagcagagaggagggtaataaactagaagaaaacagactgagagaggcccttccacctgcccttcacccttaggctttattccctcccagagccacatctcacctggctggtggagacaagcgtgaggccctgtagcggggtcagggaagccattgcatcggaccacagaggcgtagaacttcgctgatgctttggggatccttggcagagaagggtcactgtagttcacaaaatgcagaccaaatctctctgaaaagcctgtggcccactcaaaattgtccatcgcactccaaactgtgtatcctcgaaggtccaccttgtcctgcacagctgctcaaacacagaggactaggcataagtttcctatctcataaggcagcttcctgccaggccttcggaagccaggtctgcctactgctctccccaccgccttcacagatggcggtaagctttggctttagctctgtgagaaagctgcccctttctttgcatgcagtgactgttagcgggtcctctgtggatggagatgtagagccaccagcatctttagaaaggctcagccctgaatgggagtcgggaacatgggtggactaatttccctgggtcacctacacttctatccatgatcttggtcagtgccttagaatgttaatgcttctccctgtagaaaatagcccttagatagaatatatttcagctgggtaggatttttctaatcatttcctttgctggtgcattgcttgctcttttactcagcatttgttccattctcttatcctcatggtcccatctcaagttgttagggctgagccaagagcctcaaacttttgctcggagactaagagaccctacaggcaaccacacagcctactcctcctgggccctacccagaccattctcaggagggcactgctgttccgacatcagggaggatcaaggggagcaagtgactcaggccaggaactagggtttggtggcatcaggccactgggcttgcttgctgagcttagacataggaaggaaaaaaactcagagtgcggccctaaagcaaagcttaacccccacaggagcaagaagccttatcgttctcttcttactgtggcccaaggacgctgtatcacactcctgcagatagcagatgtttccaacagggaaaggtgcacgctggggaagggcgggcccgtcgtacctttgagggcctcattgatgtaagtccgaaggtagtagatccttgcagtgtcattgaggtctgtttcttcccgctgggacactccattctctgtgacataaattggagggtcattgtattcctcctttaaccagttcaggatcctcctgaagccaaaaggcgtcatcttcagccagaaggagccagagtctggccacgagcgatctgcgatggaagcaactcctctacaagttcaaaaactaaagatgaggtcttgttttgtaaatctcaagaggccctttacacgaaacacaaaacaggacttagaccaggaaaagccttaggttttgtctagccttaagaatcatactaaacccagaagaatcaaattgcctcaaattctcctcctttcgctggttctagctgcct

SEQ ID NO: 97840 - DNA, 15392 bp, Homo sapiens
ctcccaagatccaggacctgaaaccccagtgtgttgttttcctgaacatccccaggtgaggagggggctaccggagctggggggagccctgctgtccttgtcctgcagagactgtgttttgaggcccatgtcatcgcccgcctttgcaggtactgtgcgggcaccatgccctggggccaccctggggagcaccacgactttgagccccagcggcatgacgacggctacctcgaggtcattggcttcaccatgacgtcgttggtgagtgggccctgggcccatggtgcctgggagcacagcccaaaggtggaaggggtcacccatactcacctccatgggccacggcggcctagttcaccctcacctcccttctttgtctcattcctctggcttgagagcggcacctaccccctctcctcactatgcctcgggataccttcactccccactctgactggagcgtcaccctcattgcctctgtcccttccctttcctacctggggtctcagcctcccctctgccctctggccaggggtcactctcacctttgttctctggctagagtttctgcttcggaaggagcagagtctgggacccccctgcccccagccctggtgccatctgacccaagcttcctgtgcccacaggccgcgctgcaggtgggcggacacggcgagcggctgacgcagtgtcgcgaggtggtgctcaccacatccaaggccatcccggtgcaggtggatggcgagccctgcaagcttgcagcctcacgcatccgcatcgccctgcgcaaccaggccaccatggtgcagaaggccaagcggcggagcgccgcccccctgcacagcgagtacgtcccaccctgccacgtgccctgggtgccaaggccagaccctgccctctctgggccttgatttccccatctgtaaaaggggctgactgtccctctgccccaggggtgttgggagtggagcgggaccttctctcggcaagtggtttggtgccaggccgagggtggcaccaaggcagggcccttgctgagcccccgcttgccggccctgcccgacagccagcagccggtgccagagcagttgcgcatccaggtgagtcgcgtcagcatgcacgactatgaggccctgcactacgacaaggagcagctcaaggaggcctgtgagtgcggtggggcggcctggcagggtggccaggaggggctgaagcagccggggcccccttgggcagggctgtggggtgcagccagctgctgacaggtgctctgttctccagctgtgccgctgggcactgtggtggtcccaggagacagtgacctagagctctgccgtgcccacattgagagactccagcaggtaaggggtgggggcttccccaggtgcccaccgagagggtggtgggaagtgaggccaggcctcttcctcccgcagccagctcgccctgcggagcctcctctgtgctggttccccctactccaagttcccttccctccctggcccccactctatcccagcctggcctttgcttctctcaacaggagcccgatggtgctggagccaagtccccgacatgccagaaactgtcccccaagtggtgcttcctggacggtgagtctactcccagggtgccaagctgtttcgtgttccctccctaggggatcccaggtaggggcagcagaggacctgggcctggacatggcactccctgatcctcagctgccctctctcccacagccaccactgccagccgcttctacaggatcgaccgagcccaggtgagcgattgcaggcctgctccagccacagctgcttccgggccccagggtcgcctctcctgggacgccttccctgttagctcccccgatgggctcacctctgtcctcatgcctctgagagcttttactattgcctgtgtgcatggacagcgtgcggccctgccctccacactggagagtatagggcggtgccagccagaaaggcagtggggtacctaccaaaggcttgctgggtgggtaggagggcctggaagcccagagccatccagggagacacagaagcaaaggcattctggtcaggcgccagctcacctggtaaagtctgggcagtcggaggaggtgtcaggaatgggaaggagtgggagagggacaggcagggccccttgcctggccacctcctttcagtgtttgtgctcatggcagaggcttctccaggtctaccagccttgctgcccctcggcccccaccgtcaggtgccctgacctcccgccctgacctccccccacaggagcacctcaactatgtgactgagatcgcacaggatgagatttatatcctggaccctgagctgctgggggcatcggcccggcctgacctcccaacccccacttcccctctccccacctcaccctgctcacccacgccccggtgagtcctggtgtcccgtccctccagcccctggctttcagccccacctgtaagccgatgacttctgaatccctgcttctagcccctccaccagttaactaaatggtgtcaacctgaacctggccaaagcccacctgacggccttcagccctgtggttctgtggggaagcggcctcacgtccaccctggttccctccctgacttctccctcctctggacctcatccttcagccagtcctggcagcccccggacccaccacctgagcactcctccccacccctactgccaccagcccttcccggctgccacgccctggcccccagctcttatatccctgtggccattcgtgccctcgaacccccatctccataccacggtcaactaaaaatgcagagcataccaggccactccccaacctagaagcttctttctcagcagccctttggacgtggattctccccaggccccccgtcattgcactgggctcccagccccctccctgagttcacctccatggtcctgccccactctcttctcttggttctttgaggcatcaggtgtttgccaccactggacttctgtcatcgctgcctccaactcttcccccatctttccggagctcccccacccccatccccttcgaatctcagcttggctgtttcctccttggagagatcactcccaggaccccctctgcaggggtgccacatcacctgttctgaattcttaagagcacccctgctctcagaactccttatttatttgacttgtttgtatccctgaactagaatgtaagctccatgagggcaaggccttcctctgtctcgtttccctgctgtatccccagtgcctggaatagtgcttggtgtgtagcaggcactcaataaactgtggaaaggatgaagatgcccccagttggggttggggagggcgaccagctggcctgtgccgtagccggtcacagcacatcatgctctgttgcaggtcactgcaaggggatgctgcaccccctcaaggtgaggcctctccctctggggcccctcctttctgcctggttgggggcaggaggctcagtggggtggggatagggcccagacacagccttacacaaacacagcctttgagcttcacgcaccaacggagccctgggcacacatgcctggccggcacagtcctgtccactgaggcaccaacccaagcccaggcctccgactgcagagtaacaggcaggtattccgtgcaggtgaagagctgattgaggctgccaagaggaacgacttctgtaaggtactagctccaggctccagttccttcccccagcagctccctcgggccctggggagcgaggcctctgggttgggccaagagctgacctgctcaggtgctgtcatctgtcatcgtctggccctctgtgggatctccagtgatcgtcccattccacttcactgtatctctgtctaggccacaatagatggctcctagtaggggcttcctagctcagtccacctgtccctggtgcttagaaaggagcaggtcagaggaagcactgctccagggcttggtcaccagtgctgccagagagcccacaggctgtggggtgagaggcccctcctccggtgtgctccagagagacccacagaggcaactcaggagtaagatgtgtgagcgcactcgtttcaggcctgtgctggtgtacccggctgtgggccagcgtgtgagctcagggaaggaggggtggccccaggaggtccagccctgccatgcctcctgccctcagctccaggagctgcaccgagctgggggcgacctcatgcaccgagacgagcagagtcgcacgctcctgcaccacgcagtcagcactggcagcaaggatgtggtccgctacctgctggaccacggtgagccgggcagtggagcccagggcctggggccaaggtgggaggaggaggggctgccaggcctctctgaccaccacctccccttctccagcccccccagagatccttgatgcggtggaggaaaagtaagtatctgggcagtgcagaaccgtggtcaccccggaaaccacccttttccccacccctcccattttgtcaggtcagagcccataaacttcctggtcacatctgtcatcccctgggccacccctattgccccagagccctgaacttcctgccctttctgatggcccttgggagacagatgggtggatcaggggacgggatggggtacacagccagcccctgctcccccagcggggagacctgtttgcaccaagcagcggccctgggccagcgcaccatctgccactacatcgtggaggccggggcctcgctcatgaagacagaccagcaggtgagcagacggcaggcagggagcccacgagggcaccaaccaaacctttcccaaggtcctaggcgggagctggggctgggggctgtccctgggaagacacagtccagaccctgggaaacctgagccagcaggggaggagctggtgggcagagaggcctccctccctgaccaggccacagggaggtagagcccctgcctctcagcctgctaggggttaggcctgcctctggcccctgctgatcgcagctccgccctcctccagggcgacactccccggcagcgggctgagaaggctcaggacaccgagctggccgcctacctggagaaccggcagcactaccagatgatccagcgggaggaccaggagacggctgtgtagcgggccgcccacgggcagcaggagggacaatgcggccaggggacgagcgccttccttgcccacctcactgccacattccagtgggacggccacggggggacctaggccccagggaaagagccccatgccgccccctaaggagccgcccagacctagggctggactcaggagctgggggggcctcacctgttcccctgaggaccccgccggacccggaggctcacagggaacaagacacggctgggttggatatgcctttgccggggttctggggcagggcgctccctggccgcagcagatgccctcccaggagtggaggggctggagagggggaggccttcgggaagaggcttcctgggccccctggtcttcggccgggtccccagcccccgctcctgccccaccccacctcctccgggcttcctcccggaaactcagcgcctgctgcacttgcctgccctgccttgcttggcacccgctccggcgaccctccccgctcccctgtcatttcatcgcggactgtgcggcctgggggtggggggcgggactctcacggtgacatgtttacagctgggtgtgactcagtaaagtggatttttttttcttttctgcttttcttcttttgcgggggaggtctaacaagcagcgggggctgcggggttgtcctcggggtgggggactggacgctgtcgacagcaccttcctggggccccggctcccgtttggtggttggtcccagggcctgcccggttcctgacctctgcccggcggccgcgctcgtcggggccgggggcggggccgatccctccggcttcccgcttcccgcggagaacaacaatgaaagtgaaagaggggtggggcgggggcgagcccgggttctgtggcccatttgccctgtggccttgagcaagcccctcccccaggcctcgggggctctcccggtttgggggaaccgggcgaggcaatgccacaggcccagggttagagggggtgggcacttgcagctgccgatgtggctrgatctggaacttctcagacggctcctgtcagcgccaagtttcaccaaatccaggcctgcgggctcctcccccaggacccccactcgcagtccctcaagcctgtgctcccggaaaggcactgggcgaccgcacccgtggctttctctgggcgaccgggtcccagactccccccagcacagcagagcgcttccctgcccacccgcggaaaccgccccaggtgggccgcgccccctccccagcagccagcagggcgccagggmtgagccggccgtggaggggagcgggtcccgcgggttatacaggcgccggggctccgcggcaggcaagagaagctgaggcctgagaacggcccgggccttggcgtacggcaggggacgacctgggatgggggcagcgggcggcggcgcagggagtgggccgggggccggtgtgcgcgggcgggacggggcccggggtcgggagaccaccgctcggaagatggggccgggagaggccgccgtcgcagcgcagagggcaccggcggggagacgcgaggacgcggggccgggaacacggacgccggagtagaagcgcggggggcgcgggctggagcgggggcggggacgccggggtcgggggcggtgcgggtttgaggggagggggcggggcgggtccttccctgggggggtggggagagggggcgggggcccatgtgaccggctcagaccggttctggagacaaaaggggccgcggcggccggagcgggacgggcccggcgcgggagggagcgaagcagcgcgggcagcgagcgagtgagcgcgcggcggcccctggtccgcccggccgcggccgatctaggggctgggggctggaggcgggggtgggggtctgagctgcgtcctgggctcgaggcgtcccccggggagtcgcctcttagcggtgcgtccgggctagcggcgaggggccgccccaagtcttcccaccgccgccaccttagcagcccgacttggggcctggaaagtggagcacgcggaggtgggagggccctgcacgcggcccccggtggggaaggggacgggccagggattcagactcgggctctcccctcaggatgcagcaccgaggcttcctcctcctcaccctcctcgccctrctggcgctcacctccgcggtcgccaaaaagaaaggtgatgggggatgatcgaaggagggctggggacgggcaggcgaggcccctccacttctgggctgggccgcctgggttcctagcctggaaccccaggaaggcggctcccgagggagtctccccgtgccccagtcctgaactctgttcctcgcgcgttgtagataaggtgaagaagggcggcccggggagcgagtgcgctgagtgggcctgggggccctgcacccycagcagcaaggattgcggcgtgggtttccgcgagggcacctgcggggcccagacccagcgcatccggtgcagggtgccctgcaactggaagaaggagtttggaggtgaggcggggcgcagtcagagggcaggagacggggggcacagcctcgccgaagcctgggcggacccttggcggagggcggggccgcgggccgcgcagcgctgacctgggccgctctctcgccagccgactgcaagtacaagtttgagaactggggtgcgtgtgatgggggcacaggcaccaaagtccgccaaggcaccctgaagaaggcgcgctacaatgctcagtgccaggagaccatccgggtcccccagccctgcacccccaagaccaaagcaaaggccaaaggtcagcaaaagaaaaaggggggggggctgtccggggggggctgcccccccccccccgcctgtgaggggacaattccaagttaaaccttaagttttgagtcctggccagtggcttcctgacatcgcctcacttggcttccctgcctggaaaagtctgaagatgggcactacaagagaggccgcaggtgatgctggggacataaatcctccctggcccaaatagggaccaactcaaactactccattggagcatctggcttaggacccagggagagtgtcctggaacggcttgcctttgtcagctctccagccacgggcagcatttggtcagctctgccctttctagtgttgggaggaggtcaaggcccaccctgggcctctcagctcactcgtgactcagcccagcgaggccagcagggcaggggtgaatctgcccgcttctcaggtgaggaggctgaggatgcccagggctgctgtgaccaggactaggactggaaacttgaaggttttctgatcccaagtggaaataggaagctggggatgtcccatgtccacatcacaatggctgccccatcccctgcttccgagtcagctgattggaaaccactagggggcagaatcttctccttccctgatgcccgggtgtttgtggagccggcggtctgcaatgggtcagcctaactgctgatatggtattaatatttctttcttgttttacagccaagaaagggaagggaaaggactagacgccaagcctggatgccaaggagcccctggtgtcacatggggcctggcccacgccctccctytcccaggcccgagatgtgacccaccagtgccttctgtctgctcgttagctttaatcaatcatgccctgccttgtccctctcactccccagccccacccctaagtgcccaaagtggggagggacaagggattctgggaagcttgagcctcccccaaagcaatgtgagtcccagagcccgcttttgttcttccccacaattccattactaagaaacacatcaaataaactgactttttccccccaawaaaagctcttcttttttaatatataaaagccccttcccaaggagtttgctgtggaaatgtgtttgggagtgggaaggtggggagaaagaccaggctgtagggactggtgggtttcagggggcttggtggtgggtgctctccagagctcatggaaaaagcagaacaattacaaacatttcttccagggcccctgaaagggtgctccccatcaagtcacctaagcctttcggtcctcatctccctcagggaccagggctggggaagggaacctggctgactcactggaaccaccacacccatctcagcctcacccagtcaaaggtcttttgatacaacccacagccaatcaggaaggttctacccatgggggagagcagatgcgagggctgcgtgcctacctcactgcccacctccccccttcccactgtcatggaaacccgagtgagccaccaggttgacccctttcctcttgcctgtgtgacccaggcctccaccctgcagaagccagggggtgagaggtttgaagagggcagatgggaatgccatccaccacagcctcaccctgactcgatgtgtgacctgggacagccttctaaggccggggctgcagggggctgtcttctgaatacgtggaccactcacggctcagcctgggatcgcagaaggccagacctcagttcctgagacagaacctctgacctcccagctgccccatcttaatgtgacaagggcagtgctgctggggcgggggggacctggcctccatcatacccacccagaacctggctaagtagctgcagccagaggagatttctgcccctggagtgggatttggggagagggggctgagcctacatgcggggtgcaagggggcagaaagcaccgattacagcagaatgggggaccccacccttctactcccttcccaagcctccttttccaagcactggcccctttgttcttcctgagggggccctgggcttcggcccccatccagatgtccattcttccagcactgctgatggttggtcacagtggggcaggtgcccacccaggccagtgccccgcagctcgctgaagcagggccacagaggtgggccaggcagccccagttcagacactccctggggtgagcctcctcagcctgagcagagatctggtctctgaatgcagccacagagcctcttctgaacttcctcctcagcaaacgtgaacgcagaatggtgcctgcaactcttccccacagcaagtgagccgtgtggtccccccagcacacgcacgcaacaccagcacctcctagggcactcctgcctgcctacctggcagtgccgatgttccgatactggcacagcagcaggtgccggaaggtctttttaaaggtggcgttgcacagagcatagcaggcagggttgatggtgctgttgacgtagcagagccagtagccaatggaccacaccgtgtcagggatgcagctctggcagaaggtgttcaccaggaccatgacgttgtagggcgtccaggtgaggatgaaggctagcagaatggcaaagatcgttcgtgtcactttgcgctcccgggccgccatctgccgcttcttgcgcacctggttgcgagcgatgctggcgaacttgcgggccacgttggccgcagggcgcatgccagccggcgtggcaggcacaatctcaatggctgtcacacactcattgcctgtctgcttcgtcacaatctggatcttggaccatctggaggctgggttgagggcccgcggctgcaggggaggggcgggcatggcgggcgtggtggcctctgtggtggacagctctgtggctgggcgttccttggtgttctgggtggcactgcctgagctggactcattggaagtgtccttatcagccacggggcgcggtggcggtggcagcgctggcgggggggcctcctccagcttgccattgcgcagctcctcccgggcggcctccccgggcgggggcttcttgacgctctgcttcattagtgggctcttgaggaaggccagcgtcttggctttcttctccttcgggccctcgggccggtgcttgtggactcggctgcgactggccagggagatgtggatgtacagcaccgtcatgatgaccacaggcaggtagaaggcagcaatggctgtgccaaaggtcactgctgggttggacaggaactggatgaagcactggttgtcgggcaccgtccgcttacccaccacaaactgccagaacaagatggcaggcgcccagagcacgaaggacagtacccaggcagcagcaatcatgaggcctgccatcttggtggtgcgccgggcagggtaggtgagaggcttggtgacgcagaagtagcggtcaaagctgatgatgagaaggttcatgacggaggcgttgctcaccacgtagtccagggccagccacaggtcgcagaccacggcgcccaggggccagtagcccttgatgatgtacacggtgtagaggttcatggagaaggcgcctatgatgagatcagcacacgccaggctgaagaggaagtagttgttgactgtctgcagctgcctgttgaccttgatggacagcatcaccaggatgttgcccacgacagtcaccaggctcagggagcctgtcactgtggcaatgaagaccatttccaccgtctcatagcgattgtgggatgatgacgtgaccaggcgcacggactgattgcccgagctgccattgacaggtgtgaagttggccatgttggttgccaggggtgggtaggccgtgtctggggaggaaggggagagaaaagcatgaactacaggagggaatgggggagtcatctggaggtacactggattcaaggtgacagagggacattctctggcagaatgccttgagagaactctgtcccgccatcccgcatttgcccattcattcaacattaattgagcacctactatgtggcaagcattgctcagggtgctgtggctacagaagtgaataagacacacatggccccctgcctcatggggggagacatgcaaacacgtgagccacaaaagaaaaaaaaggcagggtgatgagagagtgagtcagaaggcaggacaggcatgactccttgctaggtggcctcacccaccaggtcatctgggtgatgaggagccagccacaggaggagctgtggagagtggccctgccaggggcagtagccacagcaaaggcctggaggcagcgcaaggcctggacagaggccagtgctgggggagctcagggaagcaagaggaggaggagagtggtcccagaggcccacgagcatgtgggctctggagggaggtgttctgttcatccatttacccattcggtcatttcttaacacctgctctccaacccctgtagaagacactgggacaaaggcaataatcggggtatgtatgagcacctaacactgatggtctactaagtgccaagcacttttgacacttaaaaaaagtgtctatttatttatctatttatttgtagagacagggtcttggtatgttgtccaggctggtctagaactcttgagctcaagccatcctctcacctcctgagtagctgggactccaggcgccatcatgcctggcaacattttttatagtgttaactcatttcatcctcataacaaacctatgaggtagataccattttttctctactacttacagatggggaaactgaggcacggagctgttaaaagcctgaccaaggtttcacggcttcttgcactatgttgctggtgggattaagtgcggggtgaggtggtgagaggaaggcagtcccgtaacttaagagctctggctgaaggaggccaaagagctccaggagccagaaggctttgcaggggaccagaggcggtgcatggagctgggcaccccagagaggaggagagtccctgcagaaggggcttcaggaggtacctgcaactgtcacatccccttcaaggagtcctcagctccagccacagggcatgcagctgggagggaggcagtgcaggggtcactaggttgtcagagaaccctgaggcccaactggggacccgtgaggtgaaagaattgtcccagagggaagagaagggctgccagggccgcctctcccctccacagtccactccgcacaccgggcggcgccctagctggagtccccaccacaggcccttccctgagcctgccctccctcccaccaggctcctcttagctctcctccccctcttcctcttccctccatgtgagggaggcccacgccagctctgagtgccagggcagccgctcagcccagcctccttcacacccgccaacacacacaccgctccacagacgcacgcgggcccatcacagccacgccagcccagcaggcatggtcggatacgcagttctgtgcgtctgtgtgtgagaggaagagagggcgcggcagccggctgtggaggaaggagcactaacccgcagcctgggctctggctctgtggcctgagacgatccactgccccttcctgcacctctttctcatttgcagaatagagaggatcctgtcctgggacatcctccccagcagctatagggattggcacctaaacttgatctctatacataaacacaaaaatgtactgcaggctggggccaagggccagggtaactgccccaagtctgaccccagcccttctattccaccgtcgcagatacagacccagcctcctagcctgatagttcaagttctcctgttctaaatccttggttcgtaggaggagaggctgagagcaagtgttgtcacccccaaggtcacacaacgagtcaagggcaaagaccacatactgccctctcttggggtccctgacaaccccatttggctctgagagcctctgaaatagaagctcaggtgtcactctctgagctgtcccctccagcaccaggaggctgccctcccccaatcactcacgtggaggaggggacagggcaggcaggagtaatcagtcagccagccccaaggaaactcacttcagcctcccaaggcaggatacagggcagcaggatgataacaaacggggctagaagtgcagaatgtgaaaacataatagctcttgtttattgagtgttaactgcgtgtcaggaacccctctgagcttttaatatagattatctggtttaatccttacaacagcctgaaaaggcaggtattattagtgtcctcatcttacagatgtaaatatcctcttatagatgaggataatgttaatcaactggcccaaagtcaccaggttaggaagtacgggtgggggcagaagaacccgggaagctccttcttaaagtccaaggtgctactgctcagagttgacctcctgcctctgctcccctcgacccgaaaaccacacaactgagggactgtccaggtgaggcttgggtagggtcccctcacattcctgctggcttctcgacttagctttcccagaagacaagcgatgtcttgtcttctcccagatcctggcggctgggctgagccgggaccactggatggccggtgattaagtcctgctcttggcccgcgtgagggagctgccaggtgctgacagggcgaggctcagggtctccccgactccgccccgccccagctgtcgtcgttttggacacctcggggtcacccgcagacattccgaccccctctggcgccttccctggaatccagatacgcctggcatctggggagcgagccgccgccgccggggctgtgcgcaccgctagatggcaatgtcggtccctggtgcccgctccggacctagaccgtgcggccgccgttggccaccgcccccaactccaatgcgactgcgaacccagaggagccctcaggcacagcctcccggggaagtgacgcggggtcccctcgccaggccccgtcggacgccgccccagagctgccctcggctccgcgcggggttctcgggtgggaaagttgagggagcccggattccacccggcaccctgcgaggaacgtgtgggcgggagcgcgagtgcgagttctgtttgtgtgtgcctacgggggagcgcgagtagacgctagtagctgtatgcatgtgcgtgtgtgtgcgcacggccacgcctggataccagtccgcccgtgagagcgcgtgagcatgccgcgccgtgtgcacacgtgcatgtgcatgcgtgtgcgtgcctagggtgctgtggccgggaggatgcacacggttcgggtgcctctacacctgtggacttgcatgcacaagcaaatgcagggccgagagtgggtgaccggtcacattccaaacgcccctgccggagactcagccagaccttagctgtccgcctgagcgcgtagagggtcgggccag

SEQ ID NO: 97841 - DNA, 21134 bp, Homo sapiens
aagaccgatcgcctgcgtgtctgggaggggagggcataagggagctgtctgaagctgccacaggacctgggctcagggctggatgcagggatcctgggcaggccaggcaggctcccaggcctctcaccagaaaagtgagcaaagagggcccagagctccgagatgtcagaggcgaaggtgacatccgtgtccaggacaatgacgcgggccagctcagcaggcaaggcactgggcagcaccagcttcattagcccatagaggccggagtagtgcttgttggggatccaggagacctggggctgtgtgggggaaaggcaggagatgagatggcagagaggggcctatgagcaccagaacacatgcttgcagtgacacagaggagagggggtaaacccccaaaagagaggggtttgcgcttcagtaggtggaggggggactgatgattctcttctccaaccccaccaggtcttggagagaggagagcggtggacacagctgaggggaggggggaagggctgggcccctgccttgagctggtcggcatgataaaagctgacacggacagcaggcaccatccatgtgtggaagagcgtctccaggatgtttctggccacggcgtcagtcaccaagtggaggtgcagtggatttttccttttgggtgggcaaagaggaagcctgagaggccccagcaggagcaacatgggacagcccccaccccgaggggcgcagagatggaagcgccatctgcaaagagcttttccacgcccggctcaggatgttcttttttttttttttttttttttttttttttttttttttgagacggagtctcgctctgtcgcccaggctggagtgcagtggcgggatctcggctcactgcaagctctgcctcccgggttcacgccattctcctgcctcagcctcccaagtagctgggactacaggcgcccgccactacgcccggctaattttttgtatttttagtagagacggggtttcaccgttttagccgggatggtctcgatctcctgacctcgtgatccgcccgcctcggcctcccaaagtgctgggattacaggcgtgagccaccgcgcccggcaggatgttcttacaactgcccttctaagggaggaaggggacactgtccccgcgtcacagatgaggaagctgaagctctgagaccagcagcctgtcccgggctttgtcccttccccactcctgaccctcctccacggacacctggctgtacctgtagaagagcatggacttcaccagggtgatgacgtctcggctggagttatgccccgcacacacgatggccacatgcaagagctggggagggacgcccaggtcggcagcaggccccccttctccgctaggcggtgaggacccatgttgagctgccccaccccgcagcagagcccggaacagtgtgcggagggggcagcaggagccaacccttcatttcaaatggggaaatgaggtcgggagcagaggagctgcacgttcgaggtgcgccccagccggctggccagtgctggacagacgccaggtactgtgattcccgcagatgtccaagaggccgggctcgggggcggcgcccccaggactcccgccgccagggccgcgcgcacctacctcgcacttgggcggcggcggcggctgcgggccgcagtcggagcggttgtggtccccggggccggcccccgggtctccgtcgagggcggcggctctccgcagcctcccgtctggggggacacgtggcatgagcgggccggggaagcatcccggggcccccgctcgcccgccaggctcgcggcgctcacaccccaggtccccaccgaacaggaggaatccgagcagcagcagcagcagcaacagcgcggcggcccccagcgcccgggggcgccctcggggcagcatggccgccgacgggggcgctcagggagggacgcgacccggggctgcaggctccatcgcaggccctgcggaccgaggggcgagatgggagactcagccctgggcggcggggcccgacggccgggttgtgcggctcgcgccgagccacctccctcacctgctccagcggctcccgggctgggccctgcgctcgcagccgccggccagggtgcgggaaccaggggagaggcgcgggccggtcccgcccccgacctgggctcaggtttcacctcagcggggctgagcgcgaaggggcggggtgacccccccggggtcctggccccgccccttgggccggcatccgacggttccccagcccgcgaggagcccccgaagcccccttctgggctgagtttcccaccaggacgaggggagggctgggggagcgggagcagccacccgcgaaggcccgggccccgctacctgccctgaccccctgccctgcccccgctctggggccgcgtctcctcccctcactccccaaggggaggggccagtgtccccgggcccgggatcaaagacactgcgggagctcgacacgagggaggaggagggggccggaatgcaggccgcagggtctgggacacctgctctggggacaggggcggagccggccgacacctgcgccagagccgcggagcacctgaagccttcgcctcactcccccactctcagtccaggtggcccggccgggccctgccggcgccgccaggacaaagcgcccttgtgaaggccgcctcccgcccgggagctggcgaggggccccagacgcgggcggcctaggctgcctgggcagggccggggatccccactcttgtccagatcgtcgtgattgtgcccgggcgcaccggcctggagctcgtctttcctccctctcccccgcgcaccccatagcaggccagggaatgggtggggggcgctctggaccctaaaccagcacagcgtgccaggccctgtgctaaggatttaatcaccctcgattaatcccatgatgcgggctaattctcccccggagagtttaagtgacctgttagacaagaacaccctccggcccctcccgtctcaagcggccccactccgttccccaggctctgcgctgcagaagcagctttcttgctcctcctccggaagggtctcccgccccaggacttgcccttgacgttccttctggcagcggagcctcccagggctggctagcactcatggaaagttgaagttgtttgcttgtttattgcaggtctccctcccagaatgtaagctgctcaccggactggaaccttgtctgtccagtccccagtgcccaaccagggcctgcacataccaagtgctcaatacctgttgaaagtggattggaatgagaatctcccctcccatgacctggaaagggggctcaggctgtgtcctttgcccaacttctggctgcaaaaagtgaggcaaactcaaaagaagctgtggaaagcagcccaacctgagaccccctttctctgggagatggggaaggtcaggctttgggtctctggagggcagggataatggttgctatggagactgatggtggctccttgtgcacccagaaattgagaagggccatgcactggccactcaggcgtctggagcttgagcctccagcctccctgatcttcatctgtagcctaaagctggggtggggaaatgtgattccctctccaggaccctcaacagagacggtttgtgggggttaaacatgtgagaccaggccagaacagtggcttatgcctgtaatcccagcactttggaaggccaaggcaggtggattgcttgagcccaggaatttgagactagcctgctcaatgcggccaaactgtatgactgcaaaaaatacaaaaattgctgggcgtggtggcatgtgcctagtacttgggaggctgaggtaggaggactacctgaacccaggaggtcaagcctgctgtgagttgtaatcacaccactgcactccagcctgggtgacagagtgagaccttgtctctaaaaacaaacaaacaccatatgggatccatagttgggtgctggcccaggatgagtcttcaataaaggggctgggggagtcagtgcaggaagctgggtctgcagatctcactgtagtcactcacaatgttggcccttcttctggctcaacctcaccactcagggaaactgaagtgctgagatacctgctaggcccccaaggggttgttctgggggcgtggagggagaaagagggacacgtatgggcatataaacaggtgctgttcctcttggcctaagacccattttgacccagctctgcccaggactttgctgtgtgaccctattagacgagtgaggctccatctctgggcctctggtactctcgtaggtaaatgttggactggtctacctctcttcccctgtgacttggggcaaactgaaggagagaggatacggctcaatctgcccaaaggtccttccagcccaacaaagacggccaagcccaggcagggggccagggagcaggggaggggcctcctgcacacaccgcaactctttgtctctggggcctaatccggcctgggatctagagaggaaattcaggcagccctgctgctgccaagctggctagacccatgctccccttcccagttctgcagggagggagaagaaactggttccagcccaagccccttcctattctgtcctggggagtctgcccctctcccctccacaccttgctctcagaatcaggacctccagcccaaggagtgctgaagaacctcaaattctctctctgtaccctctccacagctgcagagggagggctggaggagtggccaaactggaggtttgaggaacaagttcactaaggtgttggtgcacagcagggccctgcagggctcagtggctcacacctataatcccagcactttaggaggctgaggtaagcggatcacctgaggtcagaagttcgagaccagcctggccaacatggcgaaacctcgtctctactaaaaatacaaaaattagtcaggcgtggtggcgggcgcctgtaggcccagctaatcgggaggctgaggcaggagaattgcttgaacctgggaggcaaagtttgcagtgagctgagattgcaccattgcactccagcctgggcgacagtgagactccgtctcaaaaacaaacaaacaaacaaacaaaaaacaaggtggggcagaggaagggagaaggagcctcaccttgagggccctgagcctaggtcctaatcccagttgctaactggccttatgaccaaggagcctcaacatgtcacagcttttgtgggctgtgggcagtaggagagagggcactgccactggagacctgcgctgtggcctctttggccagtgccttgctgtgccatgtgggacaaatcctttcccctccttattgggccctaatttcccatctgtgaacagttcatagcaacttggggctgctgggaggagggcaagcaagcctggaacccagagcgtggccagaaatgatgtcgacgatgcccatgaccacctcctctgttctccaagacctttgcctctcctcaggcccctggtcacctttccctgggtcttcgttctttgatgtgagaagagggcagctttaatcccccacctgatagagaagaaaactaagctgtggagtagggtggagtgagggagtggaaggaaggttgtggtttcctggtgaggtgtgatgcttagacctggtctctaaaaataaaattaaagttaaaaaaaatgaattaaaaaaaaccgcctagtctctgaggtcagaaaagaccaacactcaaattttggctgggcgttcttaaaaggatgctttcttcatctggagatatctggtggagaggattaggtaaaataatgtattactattctcagggtaccataaatccgctggcccgctccctcaggccactggcccacggctccacccatgtcacgcccctttccccgcagccaatcagcgctacctccccagagcgcccgttccctccaccactcgccgcagatctcccggtgccacccgttccagggaggctgcttggtttgggaagatactccccaggggtctccccttcccttgggggcgcagctgaggactgcgaggtgcgtccgagggccagaaagctgagatcgattctgagttcaaggatcaagtctgccctcaaaccattttacagatcgggaaatccgagacccagagaagggatactcccgcccaagggccaccgagccgagagaagcccgggccagggctttcttcgcgtatgtgggaatgcaggcgcgagccctttggggggcacagtccatacgggagctgaggccgaagccggagcactaactgtgctgtctaggggatcgagacggcactagagggctggactccttactgcctcagtttccccagcactacctttgttgaggaaacggagatggsgatactggccgaacgcgcgcctgctgagacacagtgcaactgtatttagacgccccgcacctccccaaatctgatcgaggctccttttttcaagcacccgctatctctcagccctttaaaatccggccctgccgttcgagtctctcggcgttccattggaaagactcggggctccagctcccttctctagaatgaactgctctgactgccgcccggctttaccggagctttaactgcgcaggcgcaagggcagccaacccggtaaacggaagagctgggtgctgacggcgctrggcgggtcaggggcggagagcgtgctaaccaatgacttgagggagtagggggccgggtttgggccctcagttgctaagggctacccgagtgggaagcrgttcaagagatggggtgaagggtggttcaccggttcttcaagtcctcagccttctggcccgcggaagttaagcaaccaagaggcgggcctaagaccggaagcaggaaggagggcgcaggaagcagggcgccgcagcctgtcgtacggtccttctgtgggtctgtcggtgccgagggcaggatggagaagctgcggctcctgggcctccgctaccaggagtacgtgactcgtcacccggccgccacggcccagctggagacagcagtgcggggcttcagttacctgctggcaggtgccaccctgacctttgatcagttccttctgggccctgacctatgaccccagtggcccccttmcctgcggagtcagggtagtgatcgctgtgcttgagaagacccgtccaggttcccaaagggcgtagggaggggatttccgggacccgaagacgaaatgtgaggcagatgctcactcacacctccttctgtaccctctccccaggtcgattcgccgattcgcacgagctgtcagagctgggtgagccgggctctgggggtgggggatgggggatcggctgcctggcccctggtgagttccccagagagggtgagcaccccagcccgaggacctgggctgcccgttagacaccttgtgctatgactgaatcggcacaaggtctgttgttcattgtcctgggccctccatgtccctaagtcaagagacacgtctggggaccttatctgagtattcactactggccaggcgctggactaagtgcctttcttacctttacttgttaatcctccctacagtcatattaagtggtacttattgtcatcactgtccatttaaggaagaagctcagtgaggttagagaacagtcactgatggtcccagaaccaagattcaagtctagatctcccagattccaggattcccagattgtaactacctcaagagtgtttgcccagtgactgctgtcacagtcctgaaagaatgcactgggttttgaaaagcagaggtgaggccaggtgcagtggctcacacttgtaatcccagcactttgggaggcagaggcaggtggatcacgtgaggtcaggagttcgagaccagcctggccaacatggtgaaaccccatctctactaaaaatacaaaaattagctgggcatggtagcaggtgcctgtagtcccagctacttgagaggctgaggcaggagaattgcttgaacctgggagrcagaggttgcagtgagccgagattgtgccattgcactccagcctgggcaacaagagtgaaactccgactcagaaaaaagaaaagtggaggtggaatagaccctcaggaacaggctgccaagagagaaagggccaggaggtgggaccgtgtatctgtggcagttcagagagcgatgggcagttgtgggcagctggatgaccagtgccatccagcagggcagtaactggcttgtcactgagattgacccatcctttcttggtccagccacccttgtgagatcatgttggggagaggggagtgctgaggaagtgggtggagaagaaggttggtttccacwgtctgtgggtgtctgagcagagcatgtgacaggtgatccctgcagctctggggagaaggtgagagggatggaggctgcagagccagcctctcaaggccactctctacccctcagtgtactctgcctctaacctgcttgtgctgctcaatgacgggatcctacggaaggagcttcggaaaaagttgcctgtggtgagaattctgccaagaacagggtgggaagcatggggactcaggaatgaaatagtagcagctagcccatgcgtgcagcacatgtctcatggagtatgagacaggcctatgtccatctgagcctcaaaccatctcattaggtgacctgtaaagtgtgagtattcccatcttagatgaagagactgtctcaggtgaagagaggtagagtcagctgtttcaggtcccccagcctgttaatggyggagttggtgtttgaactcacacctgcacagttaggcttggaaaggggaaggtccacatctcttgtcagagaagctccctcctaggagaagggcctgggactccctgtagtcccaggccccctgacttcttggcctggggttcttgcagtcgctgtcccagcagaagctgctgacatggctgagcgtgctggagtgcgtggaggtgttcatggagatgggagctgccaaggtgtggggtgaagtgggccgctggcttgtcatcgccctcatccagctggccaagtaggttgggattgtggagagggtcctgggtgggggtgacgcaggctagctacacagatggtgctcagcagagcatccctggcctcccgccggctagccacctccccacaaccctgacatactccccgacccagggctgtactgcggatgctcctgctgctctggttcaaggctggcctccagacttcaccccctatcgttccactggacagagagacccaggcacagcccccgggtgagctacttccccaagccctggagcggaatgggccatgggactaacttgaggatttagatccaaccagcatgaatacagtagtatctgtttatggagcacgcctgtccctatcaactatgtgttctcattgccatgtattcgacagagaagacaatgatgcggctagggacaaaatcagaacacgaacccagtacttgtsatggccagagtcattcatttttgtagcctgcaggaagagggaacagatgggatgccgccaacctcgactctgagcctggttctgtgtccagaaccatagcctctagaggcaggaggcagggcacgcaccacatctgtcccttcagggctttgggcccatcccgtcagcttctgggcctcactctctggacattgagttggggccgttcattgcctctcatcatgattgttttgaaggcaaaggattgagaggagacggcccctctggtgctgtggtctccatagatgtggtcaggctgggccttccctgccttgcctgtccatgggttccgggaggctggctctggccacagctatgctgagctttccccaggctagggagggctgcagagtgctttcctctgtggacgggtcttgtgctgagccgccaccctgcttgtagttcccttgactcagctgttgccatagtacaagctcatctgttctccccttagctcctgagcattcactgcacacgttctttgcaggctccgctggaagcatgtccctctgactgtatggccttctgtctatccctgctagatggtgaccacagccctggcaaccatgagcagtcctacgtggggaagcggtcaaaccgggtggtgygaaccctccagaacagtaagtggaggatgtggctggcctgggcacctaggtgctgtctgcctgggcttgagggactggctttggtcagcagccaccttcccctgccccagcctgggcctggctcgctcatctgcygcccttgtgttctagcgccgtccctgcactccaggcactggggagctccccagcagcgggagggacggcagcagcascatcacgaggagctgagtgcgacccccacccccctggggctgcaggagaccatcgcagagtttttgtacattgcccggccgctgctgcactgtatccttagcgcggggcaggatagggctggcactgtgggctggggattgagtggggagtgtgctgagcaaggcccctgtgctggagacatccttgacgccttggccgtcagtgctcagcctgggcctgtggggtcagaggtcgtggaaaccctggctcttggctggtgttgtggacstgaccaggtgagcctgggcctgcctggggcttcactctccactgggctttctgctataatcctggcctcacataggcggggtggcagcggcccctgctcctcctgttgctgcccctctggacacccagcccatggctcctccccttccgtgggcctagatcrtgcccctggccctgaccatgtcctccctgcctcccagcctgagcctcctgagtgacagaaagggcctgacccggagggagcggcgggagctgcggcgccggaccatcctgctgctctactacctgctgcgctctcctttctaygaccgcttctccgagtaagcacccaggacaccctgagccagggagagggctggcaagcgggcactggtgctccggtccctgctggcgccttcccttccccacgcctcatccagggttcaccaagcactgtrtgttgtccgggtggcagtcaccagatgccagcccagtcccgcccgcagagctctctgggccatcaggccacttgagcaggaacttaaacattggttggcaggagaggcactgagggcagggctgagggcattgccaggtggcccacagggatggcgacagggcgggcgcccatggcctctagctcatttccacttcttcctgccaaatagtttggcttatcctcacttctcagaggaggacctggaggttcaaggaggttgggcaacttaaagacacccagctagccagtggtagagctagatcccaaacccaggatctcccctggccttccctgcctggcccagcccccactcagtcacctgcgagggtccagagctcccagcctgagagaggcctgctgggttgagcagggggcagcttgggactagttcttccacaggcctgccactatgactgcttgaggttagaccacagtctgacagggggaaaccctgtgcagtggctgggactgtgaggcagacaaggctcccgggaccccctttgtctaggacctactaatagcttaaaaactggcataggctgggcagcagtggctcacacctataatcctagcactttaggaggccaaggcaggaggttggcttgaggccaggagttcgagaccagcctgggcaacccaattctacaaaaaaaaawaawaataataataattagccagacatggtggtgtgcgcctgtaagtcctagctactcaggaagctgaggcatgaggatcaggccaggaggctgaggctgcagtgagttatgatcactccatcccactctagcctgggtgacagagtaagtccctgtctcaaaaaaacaaaacagaaaaaaaaaaacaaaactggcatagtttagccaggcacgatgcctcacacctgtaatcccaacactttgggaggccgaggcgggcggatcacaaggtcgggaggtagagaccatcctggctaacatggtgaaaccctgtctttactaaaaatacaaaaattagccaggtgtgatggcacacgcctgtagtcccagctattcaggaggctgaggcaggagaatcgcttgaacccaggaggcagaggttgcagtgagtcgagatcacgcgactgcactccagtctgggtgacagagcgagacactgtctttttttgtttgtttgtttttgagatggagtctggctctgttgcctgcctaggctggagtgtagtggtgcaatcttggctcactgcaagctctgcctcccgggttcatgccattctcctgtctcaactcctgagtagctgggactataggcgcccattaccatgcctggctaattttttttgattttttagtagagatggggtttcaccgtgttaaccaggatggtctcgatctcctgacctcgtgatccgcctgcctcggcctcccaaagttctgggattacaggcgtgagccaccgcgcctggcctgacccatcttttttttaaaacagaaaaaagagtaaggctgctccttctggaccacaccctggcacctctctggaccctgctccctgtcctttagggaaacaaaggcccgccttggcctcctaaagtgctgggattataggtggagccactgcacccagccagccttcttcttttcttttcttttgttttttgggacggagtttcactcacgttgcccaggctggagtgcaatggcgtgatctcggctcaccgcaacctctgcctcccgggttcaagcaattctcctgcctcagcttcccaagtagctgggattacaggtgcgcgccaccacgcccggctaattttgtattttttagtagagatggggtttctccatgttggtcaggctcgtctcgaactcctgaccacaattgatctgcccgccttggcctcccaaagcgctgggattataggcatgagccaccacacccggcccccaggcttcctcttttcttgctgctcagacagacatataaggagtcaggccgccttccagatgtgtagccttgggcaagttatttgatgcgcctgtgcctcatttcctcacctgtaagatggggatgatgacagtacccactttgtaggggttcagtgactaacgcgtacagcagtgcgtggggtgtagtaagcacgtagcgctatgtattgtcatcagcatcctcatctcacccgagttcccctgtggaaaaccctcctgtcttaaaaatcagggccttgggccttgccccttcccctgaaccaaaatgtgccctcttcagtactgtgtcccctaccaaggtcctgactactctcattggtggcttgtgaggtttccatgcagcccagcacttctgccagactggggggcttcccgagggcagggtggggttgtcctccctggaccctccaccatactgccagggcgctgctccacatgcgaccctctagaggccttcagtgttggatgtcggtggaaggggaaagaggaatgggaggaggtgttgtgggtcagcggccaccccgaagctgagctggtggagggtggaggccagagccaaccccagaggtcttgcccttgtgtaccgggctttgtcctagctcccaagaaagtcacctttgttttctggaatgcgctgcattcggcacggtggtcagtgaaggcctctgggcctcctggtttgcagggacccacccccaccccactcagcttgctccccatttattgcctcccccagggccaggatcctcttcctgctccagttgctggccgaccacgtccctggcgttggcctggtcacaagtaagcagggatggggacgcgatgactgtagtgctggaaggcgcatgcatgcaagcacctccctgactcctctgtctccttgcaatttgattcttggcacagtcaggagaggaagtcgggaagtcaggattgggtgggactgcccctgggcataggccagggtggcctgaggagccagggatggctggaaggagggtgtccaytggtggggggaccacatcagctgccagcttttttctggtcacagtatcctggagcgatacgggaccatctcatcttggggggattcaatggcagagaaggggtccaccgggctgctgagatcctccctcagcagaggcccactgggcttgggttgggtgactggacctgactcaggcccctcagtgtctaccctggctgagcttctctgggcctgagggtctttgtaaatggtgccagagtcccctgcagtgctgcctcctgggggcagggcaagacagccagctgggctggctcctgggccgcaggggtgaggtgctgtatgtggcgccacagtgcagattggggtctggcctgccctgatgtgtccctctcccactgcagggccgctcatggattacttgcccacctggcagaaaatctacttctacagttggggctgacagacctcccggaaggagggtgtggggaggggtggggcagggagcccctcttccctaataaaacygactccggcagcgtcccagcgtgcggcctctccgtgcctaccggccaggccccacacacagccctggtcgccaccagcgttcctcccaggacmyccttgactgcgctctcctgtgacgatgccactgcagcccgcaccttgtcactgctgggccaagaagccttcactaggagtgggatccrggctcctctcccacagaaagcggtgacttcacctcatggagcccgggaagctgctygcctcggcagccataggagcgaacactgctgctctctcgctggcccctggtgaggacaggaagcctgaacccgggtgatggctgaacgctgcccagcgtgtcttctggctggggccctccgtctgccccttctcygcagggccctgtggctctggcagccccaggccatggcgttgccagcctccctgtgacagagcctggtgaacagtgagcctggctcccacgcaagtggcactttaagccctgcatcctcggttgagagtaaaaggcttttctcccttagaaaaaggacatcaggcactggccagcactggggagggagtgggagctggacaggctcggggaggaagccggggccagttcagggggtatgagctggggtttccccatgcttgccctgcaggctccagaggccgggtccacctggagccatgcaagctgctatgggggagggcctggacagggtgggccgcaggctggtcttcttctccctgaacttagcctgtcctcagccactggccctgtgaagagccagcctctcatgctagagtttcaaacccacagagagggctccatctacaccttggtcctccatgcctcagctcctccaagacacactgctttccccagggccctctgaggagcgccccccaggtcctcacccacaggcaggggaaggggctgcctgggctcccatggcctccagcttagtggaacaggcgtttctgggcacatgcctggccatcagaaaccagcagtgaagcacagtcccctgccctccgcctctcaccaacggaggaaacaggcatgtggatgcaggcaccacactggggacttggcaggaggtggcatgtccagagcggggtctagcttgggggtgccccggtaatggcaactgcctacctgcagtggtgacagaggtgaagggtttcatcgggctccattggccaagccttgactcaggcaggcttgaaaccggtagaactgtccagtttttcggtagacagcctgcaaggggccgctgtgtgcccagggtcacagctctgtggagccatgggaggtgggagctggacgctggaggggaaggtcggggccaaactgaacatagcatcacatatccaggggagaaacttggacctggtctatggtaggcggggaggggtctgtgtttgtaaatattccagcagcctggtggaggatgctttggtgggcagaggtggaagaatgggggccgtgacattggaggcagtggtctgtagcagtgggaggggcaatggcagtggcagcagacatagggagattaagggtaaccccagctagtcttggggactggcgtggaggaagagggtggtgtctaggagacgaggagcaagaaggacgaggggctttggggttagacagagtggacagaactccaggttcctggcagggcaagccttggtgggcacaggatgctgaggcaggctcgtggagacgtgttgtctccaggacttataaagggaggtggccactgggaagtgagtgcgggaacaacatgcagggggtgacggggctgaaggaaccgccagaacttgtcagcctccggtactcaggaccaggagcatgaatgaggccactggaggagccagggttggaaacaagggacttccctccctgggcccctcagctgtcagaggagagcggctgggccagctggcaggttggccatctcaagcaactggattaccaaagctccagagccctgggctcggccctcaggttctgatactacagatctggggtggggccagggattttgttttgaaggcttgccatggttctggtgagccaggttcgcactgcaggtataaatgggctgagcctggctgctgagtggagaaccaggagccagccagaggccttctggtggcacctgcagctgagcccaggcctgcgaggggacggtgtccagtgcagggccgagctgtacaggctcactgggcgcctaccaggggtccagggctgcagattccagtgaacaaagccctccctgccctcctgaagcctgcacttgaggggcaggtccagagctctgccaccatatgtctggaagccctccatccagcctcaggccgctgtaagctgcagagagcggagagggaaaggccctgagctggggacacagggagcctgcacactccctctcacgtagaccctgagacaggcagggctgagagagccactctgggctcctcagctggcgggacctgctcggacctcctgccatgccagtgggggtggggggggggtgctgtaggaatggctggggctctgggtggtgaggatcccctgccctcttcggagggcctatgtctgtagggtgtgtaatggactacgtcacagatgaggaaactccggcacacagagatgaagtgacttgtccggctagtaagaggcaaggtcaggacctcaactgagatctgactccacagtgtgtgctcttattccttggacagcaacactagaacaagatcgggtttggcacctattagccaacagcatcaataagaacaaaaacaagcctcgggggagactgctggccctgccccagggcaggtgctgacgcaggcttggaatgaaggccctttgtgaggtggccctgggagccggcaacgggttccgtcctgccagcatagggacgacaggagccaggacccgtgtaggagatggttctcgccatgctgggggctctgcacccccgggctgggctcagcctcttcctccacctcatcctggcagtggcactgcttcgctcccagcctctgaggtgactcctggggcacagagggcagggcacttgggccggatggtggaggtgctgcccctcccctctctggagtggggctggccctggtaccctgggcgttcgagggcttgccaagtgcccccacactgagccatccccccattcacaaggaggtggcggtggccttctgggccagggctgagcaccccgacatctcccacaggtctcagcggtctgttcctgaggcattttccgcccccctggaactctcgcagccactttccggcctggtggatggtagtatctctcttgtccccttcccctacccatccctgacagtggagacgcccctaagaggtgccccaagtccagccttcaggggcttgtcatcccaaaccacatctgttcaagggtgacttcagttccatcagagccagctgccccctaccacccatgccctcttttctctctttagactatggcatcctccccaagcacccaaggccgcgagggcctcgacccctcctgtctagggcccagcagcgcaagcgggacgggcccgaccttgccgagtattactatgatgcacacctatgacccaaggccctcataaagataccatgtgtgacaaaggcttggctttcctgggctgggagcgagacggggacgggaggggcccatgcagatacatccactgcagtccagacaggaaatggcactttaatagttggggccagggtgacaggaccaagatggggctggcctgtgtcagtcaggaagcctccctcttctgctgggacagggccttgcggcagctcctcctccccgcctgaggtcctaggcctgccacaggccagcatgccggtgaggtcagtggcaggagccacccagaagccccgcagatgacggagctgagaacagggacttcacctccacgtgttgccatttcctcactggaaagtccttgggaggtggctgggctcagcctgagctcagggctcttcggtgggggttggggcaggggcagggcgggcacttgcaggtggcacaggcttcatcaaggcaggacacgggcttcatcaaggcaggagccacagcgcccgagccctggcaggggaggtaaggcccaggatggggcagggccgtgtgctcctggaacggacatccttctctgccagagacctgctccccaagccctgtccctcccaatccccaggcagcccactctgccctccatagatgaatctaatcccatatattacaataaactgcatttgcctctccccattgccccaccctcccctaccctgggccagcggcccccacttccttgtcctctggcggtggcaggtgcccctcctcaagcagtgccacatcctgtcagcagccagctgtcctggcactggcctgagggctgggggacgcagagggcggggctgcacagctactccaggtagatatcttctgtggggcaggtgtactccacaaactgcttgtagaactgctggaatgctctcctagaagccaggggacacacagatggctcagatcgccactggcaagggaggaacaggatcccgacccagggttttcccgctggagccttggggcccaagtgcagctctggttcctctggctggggccacttggctctgttctctacagaattgccatcgcgtttcccagtaagatgtcagttgaagacatggcccaacagctaccaagcttggaagctgctcctcaggctcaccctgccgcgccaccctccctccaggccacccgcactggggtccggagatagttctccagagctgcgggggaaaccgaggggcaaagctgagcgccaggaagcagccccagggcctgggattgggcgtgctccctcgggctgggtgctcagcagggtgtacacgtaccccacggactctgccagggctttggtggagtcttcagacacaaagacgtggcaggcaaaccggtggtcggcggggtgcttggtgatgaacccaaagtacctgcagggacaggtctgtctgtgctgggacgggggctcggcccacacccacccacctcaaggctgcagaccacccgtgcctcctccactgccatcccacccccacttacttgttgttctttggatgatatccgcagaaagagatgttttttaactggaaaaagtggctacatttattcccctacaggagggagaaaagaagcaagagggcggtcacctggcctgcagtgagggtgacaggagatggcctcttcatcgcaagtcttgggggagagcttggggccatggaaggaaggggctgggttggaagaagtcaccttggcctcctgggagtcatcggccttgacgcctatcttcacaccccgcacgctgatctccaggacacagctggagggcgggttaaagtgcacggtgagccggcgggtggtggcaatctacaggtgacaaatggagccacgtcagctgctgtctgttcctctgctgatccctcctgtcccagggcctgagccctttactgcctctagacacctgcgtccctctgccccagggacccatccaagggaggagaagggagagggctcaggtaccttttgcatagcagcacagaggacgtcattgcccttgtgatagggaacctggactgagcccaggaacttcacccggaactggtccacccagtcactgtttttggccagggctggaaagcaagcgtgaattgaggaggggcagaaagagcaggagggagctgagcagccaagtgaaggagggtgggtgaggcacggggaatggcagagcccacagaggctgccacaatccctggctgcccaacttggccgggcctcactttgcttgatcgtgaaaaggacctaaaatcacttccactcagccccccacctggctggctgagatctggagtacacgttcacctagcagcaagttggggcagacagatgtggtggctgggggcacaggccagggagggaacactacctgccatgtgctcgggctccttggtgacctcgatggcgtaataggcaggaaagacaccccgggcaccagtgcgcatgttgtaggcctcgtaccagtagtcttcagcctggagctccactagcagagggtcatccacttccagctcaagttcgtcttcgtgtcgaggcacaaacctgtccccagcaaggacaggtgagaaattcggcaccaaggcctgtccagccaggcctactctggggtctgggagccacagcagcatcgttatttcagtaaacatttgcaaaagcatcctgtgtgcctgttgcagtactaaccccaggggagagcaaggtcaagcagacatgcatctgccatcgaggaaacacaggccaagggagggtgtgggcagggccccctctaaaatggagaggctgtgggaagcgcaggcttttgtctagagaagggtcaggtggggtgtgggcaggcatcctcctggtcaccctcctgggtgccc

SEQ ID NO: 97842 - DNA, 26659 bp, Homo sapiens
ctgggggtgggggccggcctccaaaacctgggttgggtctgtgagagacatgtccctctgctccccacaacaccccttttcctgctccctggacatcactcaccactccaaaccagcggatcacgttgtctaccagccagtagacaggctcaaaggcagcatcaacagcggtgtcactgcccccaaaggagttgtagagcagggagcgcaggcagaccttgccgtagcgccagcgctgtactagaccccggagtagaggtggacagcggcgcctgtaacccagcagcagaaggaggcggaggcagaggcgggccgggcccagcagcaggctccgctggcctcgcatggttcctacgagagcacaccattgtgaggatctagtctgagccctccctccctaccccgctagtgggaaggcctagagtactcacttggagggcaaagacctaagactaagacccagctaggccagtcaccaactgtgagaagtaggaaggttacttcacttttctacggactgaccagtgccaatgttccaaccagattaagggagtaaaactgatggttctgagcctgcagaaattgtacttaaattacaccacatggttgcatagcaaatccaaggtgatgcacacctaaagcaacaggccacaggaaaggggtgagaaaggccactccaaatcaaagcagtcttaggagttgtctgtgtagacagacttttgggtggagtgtggccaacatggacaaagctgtccactgtgtctctgggcatggccactgtagcagagattgccagggcttcctgactgccctagtgcatcaacctaccttcagatgattattcctcaccaaagaacagccaatggaggaatgagtacacagaatgtggatcctgtaccgaggtatttcctggtgctatttaagtcttggcaaaagatactcttcttcctactccctctgggctgatgtcacaggctagccaactcaacctggtagcaggagattccctgtctcctgtcaggacagccagctaccccttgcatgacagaaaatgctttgtctccaattccattcccagccccaccccaaggaaatggtagccaagacaactccaggtattctgagcagaacacaggaaggagtcaatgggaggggacctccatgttgattcatgaaggcctcgggtcctgacctctctgatggactccactgccccagtctaattagacatttaagaaccttctctgcagctgctgccttagccccaagatacccaaccagacttcccagttcactgcttctatggcacctctgccagtgcctccatctcctctatgcagtttctacctcatgcaacagccatgggaagagatcggctgcctgggcaatgaccagaacagaagacacagatgcgctaacagattccttcgatgacagtttcatcagttctgcagattaaagactttcaccagaaaaaaaaattacctgattttgccctgaggcagccagggagggctttgtccttgacaatcccactgacttatttaacaggtagctcaaaacccaacagaaactggaggaggctgctccactgcagggatggtttcaattcggtaactggagtattgtactctccttgcaccctggctcatccccacaaaagacctttcaaagaaaacacttaattacctccttgcacaagccctgtaagccctaaggtgaaaagaaactcagcagacaaggtccacagagaaggagaaggcacaattcagtagggacctacgctcagcaccaggataaagaaactgtccattcctgccacctcctaggaagctaaaagaattaaggggaggccgggcacggtggctcacgcctgtaatcccagcactttgggaggccgaggcgggtggatcatgaggtcaggagatcgagaccatcctggctaacaaggtgaaaccccgtctctactaaaaatacaaaaaattagccgggcgcggtggcgggcgcctgtagtcccagctactcgggaggctgaggcaggagaatggcgtgaacccgggaagcggagcttgcagtgagccgagattgcgccactgcagtccgcagtccggcctgggcgacagagcgagactccgtctcaaaaaaaaaaaaaaaaaaaaagaattaaggggagtgtagaaaagagaaaaaaaggccgggcgcagtggctcacgcctgtactcccaacactttgggaagccgaggcaggcggatcacttgaggtcaggagtttgagaccagcctggccaacgtggtgaaacactgtctctactggaaatgcaaaaaaatagctgggcatggtggcgcgtgcctgtaatccctgctacttgggagcctgaggcaggagaatcgctgaaacccgggaggtggaggttgcagtgagccaagatcgcgccagtgcactccagcctgggagacagagtgagactccacctcaaaaaaaattaaaagctcacgctcaaacttccacccctattgtttggaagcatgatttggcttgtagcatgaatttttaaaatagtagacacccacaatcaaatgtaagagtgggacaaaacagattaccccacaacaaatctaggtggcttttggactgtccacactgctgttcattccctttctataggtcatggagagtttcctatttgccaaaatactttttgtagcaatggcatgcaaatccaatgcactccttgtttgtaataaactcgaattatatactacctcacacctcttctagtcttaaaaaaaaaaaaaacttctattctccacttttcagatcattcttaaacatgtcctaaattcttcagcgctgcaggaaatgtctgcctcaaagaccagatttacccaattctttagggttcaattctgtccctaagcagttccgtaacctcagacaaatcattcaactctactgggactcaatctccttgtgttcacattcagtgagggagtaggattaaatgctaaggtcccttccagctctaaccttttatgattctgtaactatacagatacagtcaacccccatatctgcggagggattggttccagtcctcccttcagataccaaaatccatggatgctcaaatctgatataaaatggcatagtgtttgcatataacctatacgtatcttcccatatactttaaatcatttctagattactcataatacctaatacaaagtaaatgctacacataaacactttttttgtttgtttttgagatgaagtctcgctctgttgcccaggctgtagtgcagtggcaagatctcggctcactgcaacctccgccttctgggttcaagcaattctccctgcctcagcctcccaagtagctgggattacaggcacctgccacctcgcccagcaaatgtttgtatttttagtagagacggggtttcgcaatgttggccaggctggtcttgaactcctgacctcaggtgatctgtctgccttggcctcccaaagtgctgggattacaggtgtgagcgaaccaccatgcccagctgcccccaaatatttccaatccatggttggattggatcagcaatgtgaaacccacaggtatgaagagcaaacttctttggtaagtgtaaatgaaatgtttataaagcacttagcacaatacccggctcatggaagtactcaataaatatttgttgaatgaatgacctggagggatgcagaagtggaaagcctggccagatgtctatctgtcctacaaataccagcaaggacactcctgccaatgtggtaacactaaataagtgtctgctgttatcattcttcctgattcataaagagagaaatacaaactgttattaaaatcatggcacttaggagctagaagtcgtttttgaaaacaagcccaaccagaaatcagcccaaccgtgtaaacagaaagctcctagacgcacagatacagatttgggtgaacaaagtctgaggctagggcctctctccattagctaatggggtatgggatgccaggaaaattacatatgtagtaagtgggccgcaactgaacacacagacttttctttttttttttttttgagatggagtttcactcttgttgcccaggctggagtgcaatggcacaatctgggctcaccacaacctccgcctcctgggttcaagcaattctcctgcctcagcctcctgagtggctgggattccaggcatgtgccaccacgcctggctaattttgtatttttttagtagagaccgggtttctccatgttggtcaggctggtctcaaactcccgacctcaggtgatgtgcttgcctcagcctcccaaagtgctgggattgcaggcgtgagccaccgcacctggcccagacttttcatctcaagaaatagaagtaaagcaaaattcaaaaagatgtgtgtaggggagaaggggctaatctcagtgaacgggaggaaacagagcaaagcgcagctttactaccaccccaagcacaagcccgagtactctgatccttcagtaatagtcacaggccatactggtcatctgccaccagactggaggagattgctggccacaacactcccctcttcccatggctttaagtcacatctgtttcccaatgggaaagtcgactgaggggacagggaaggacagacggcaaagccatcagaagtcaggtgaactgagatcaaagtcgtggcgaatgtcatctggacaaagacgctgctctcaggatgtttgcaatctcaagtaggagatacccaacatcaataaagagtagcattttattcatgtgcagacctcccttctgggctaacacgctgagaagaaaaagagtaacaactttattttggggctgcttatcttttgatgacgggcccacacaaccagagttcggctttttcaaccagagaaagcttactgaagtggggatgaggggccgcgaagaggatcggaccgcaggactggaagctgcagtttaaaaaaccgggaaaaggccggaggcagtggctcatgcctgtactccctgcactttggaaggccgaggcgggcggatcaagagatcaagaccatcctggctaacatggtgaaaccccgtcactactaaaactacaaaaattagctgggcgtggtggcgcgcgcctgtaagtcccagctgcgcgggaggctgaggcaggagaatcgcttgatgccgggaggcggaggttgcagtgaacagagatcgctccactgcactccagcctggcgacagagcgagactcctcaaaaacaaaacaaaaaaaccgggaaaaggttttatttctcaatgacagccgcgaggtgaaactgcgatggactggaagtcaaaaaccgtgggttccagtttgggctctatcttaactatcttgatcattttggacaagtcaaaccctgtctctgaatctgaggttccatatctgtgaaacagacgagttgggtcgcttgacctccttccctcctgctctgagcgtaacgattgctcggaaggtgcgctcgggctgaggagggcacggccccgcagggcggggcgaggagagagcaggaacccgcactcaagacaaggccccagggcagtgccctacccagaaaaagggactaggatggggagcaagggccgaggcttcgcccttacctgccgcctgccgactccccagtcagccaaaccgagccccgtagcctctgccgccgctcactgccaccccctccgactcggcgccccggccgggcccggctcaatccaaaccaccatggcccgccgcccgcagcgccaggcagcggacccggacccgccgccagcccatcctcaaccacacgcgcaggcgccagcgtggacctctgaagttccgcccccggatttgtcccggggtaacctgggaaatggagtttactcgcaaggataaagagtaccaattgacacgtgtcttactgcggaactgtgcctgggtttggccaatgagaaatcgacttcgttttcatcctggttttgggacagcggcaatcatggcgccaccygtgagatactgcatccccggtaagtgagcgcttcccgtacagagycctggataggggctgaagcaagaaggctaaacggcctacagcttctgggggcccgtgaccgatgcagcattttttctgcaggcgaacgtctgtgtaacttggaggagggcagcccgggcagcggcacctacacccgccacggctacatcttttcgtcgcttgccggctgtctgatgaagagcagcgagaatggcgcggtaaaggaagcggcatgccatctcccctctgtttttcccttaggctgcccttgagttccagtccttaggcatgggcactgcggacgcgtctttagtgcctcagtggtacaatgttggtctcttagtttcttctagccgtatcgccgctgtggtgcacttagccaccacacactagttgtgttgatctcgcttggttgtgctgctgaccctcggggagggaagttgggacaaaagcagatgcgaactcagtatcccatcccagcccagctcagcccagcagtgagttgcatactgtatgaatgttgcttacctttccgactttatctagcgccactatctccacctcactgacgcaatctagtcatactgtcttttctgtgtttaaaagttataatcacagtctctgcttgccctttaaaaattttttataacatactagcttctttcagtgtcggtaatgcgccaagctttctcctgctacagagcctttgtaacatgccatctatctggaacgcttctatcttcctaggcctatttaattcctacctcctttagatagcttctctactatcacctcagagaagtccttctggacccactaattgaggaaaggagttttgtggggtgttttgtttttgtttgttttgttaaagactcacaaaaaactctgttccttttcttccaagcactatgtcagcatatgatgagacactcaggtatatgtttcctactagacttctcccctgcttaaatctaagtccgtgaaagcaggccctaccaccataccatccgtatatagcacaaggcagctcctcaataaatgttgaatgtgtgagtaatacctacctttctagtttcagagatagatccaggattagctcaggatcatataagcaatatttgaaggagcacaatagaaagaggattcagaattagaacagttacgttctggctaacttgactttgattctgctttgagtaagtaacttaagctgtctgattcaaggggctttctattcagtcattgttgggaatgttcttaacagtcctgagtttgttcatttcatagatatcacttgagtattttcatgtgtcaggcacagcgctgacttggtttctgctatcaaaggacacagacacaaattgtaaacaaataaatgctcaaatgagcatatggttacatatgtggtggtgctttgaaagaatattacagggcaccttgagaacatgtaacaggcaaacccatcctagtcagcagaagtgacatttaagctgaatcatctaaagagtaggtaagagtcaggtgggtggagagagtgcagctctggcagaaagaataggttgaagagagatctgaaagtgggaagaatttagtaagttggggaaactgaaagaaggccaggagagctgaagcattgtgagcaacggagagattgataaaagatgaggctcaaaatatctgtcttataccaacagccaataccatgctcaaagagaaaactctgcaagtattcacttaaaatagaagaaaacaagcatagccgctattatgtaacatttttgtggaaatttcagcctgtgcaataaaataagaaacagaaggaagcagtataactttggaggaaagagtaaattgtcggcagggcgcagtggctcacacctgtaatcccagcactttgggaagccaaggcaggtggatcacctgaggtcaggagttcgagaccagcctggccaacatggtgaaaccccatctctactaaaaatacaaaaaattacccgagcatggtgacaggcttctgtaatcccagctactcgggaggctgaggcaggagaatcacttgaacccaggaggtggaggttgcagtgaaccaagatggcacccttgcactccatcctaggcaacaagagtgaaactccatytcaaaaaaaaacaaaaaaagtaaaattgtcaatgattataggcaatatagttgtataccaagaaattctgagagaatcaccaaaaaacttattagaagtttagagatttactacaaaaaaaagtagctgggcatggtggcgggtgcctgtagtcccagctactcgggaggctgaggcaggagaatggcgtgaacccgggaagtggaccttgcagtgagccgagatcgtgccactgcactccagtctaggcgacagagcaagactccgtctccaacaacaaaaaaagaagtttagagatgtatgtcttctagcagcattctgtagcctcctggtcctcctatttcctaaaatttctaaggccttctgctctgggctataaatgaatccatactccaactctcacctttataccaagacattcctatattactctcaagccacaaatgccttgacccaagggttagtcaggacatttcagttttttgttgttccctctgtagcttccagtggtgtctgtagtgwgagaaacagagtcccagttactgccagatgtgggagctattgtaacctgtaaggtaagttggtcctgacctccatgcttagaatgcccattcaatactgaaatcatgaccataccagaactgcagtgtccagtatgatagccacaagctacataaatttatttctggcagggcacagtggctcacactggtaattctagcactttaagaggccgaggcaggaggattgcttcagcccagagttcaagaccagcctgggaaacatagtgaaacctcatctctacaaaaagaatcaaaaattgccgggcatggtggctcatgcttgtaatcccagcactttgggaggccgaggtgggcagatcacctgtggtcaggagttcaagaccagcctggccaatcatggccaacatggtgaaaccctgtctctaccaaaaatacaaaaattagcttagcgtggtggtgcatgcctgtaatcccagctactcgggaggctgaggcaggagaagtgcttgaacccaggaggtggaggttgcagtgagcctgcgtcacagcagtccagcctgggcaacagagtgagactccgtctcaaaaaaaaagaagaagaagaataaaaaattagccaggcatggtagcacatgcttgtggtcccaactacttgggaggctgaagcaggaagatcgcttgggcccagggggttgaggctgcagtgagccatgatcactccagcttgggtaacagggcaagactctgtctctcaagaaaaaaataaaattgatttccttagtcacattagccacatttcaagtactcaatagccacttgtggctagtggttgctatactggtcagcacatgacttttctgtcatcacagaaagttttactggactgtgcaggcttacagatttctaggataataatcaaggcagccaagttcaggcatgcatagttccttcactgagctgattccctgaatacatagttctacctgtgtctgggaaacagggatgccagaggatgattaggaggcctatttttgaacatctgaagctgagttctttttctgcagagaagcaaaagactttattttttgccattcctgtttttttttttttgagacagggccttgctctgtcacccaggctggagtgcagtggcacgatctcggctcactgcagcctctggcctcttgggttcaagcaattctactgcctctgcctcccgagtagctgggattataggcatgtgctgccacgcctggctaatttttgtatttttagtacaggtggggttttaccatgttggccaggctggtcctgaactcctgacctcaagtgatgcgcccacctcagcctcccaaagtgctgggattacaggcatgagccactgtgtccagcctcttttttttttttttttttaattgttagccatctatactttaaaaagtctatacctctctgaagggcaagttgtgaaaagatttaaaaaaaaaaaaaaaaacccagccggatgcagtggcttacacctgtaatcccagcactttgggaggctgaagcaggcgaatcacctgagatcaggagttcgagaccagcctgaccaacatggagaaaccctgtctctactagaaatacaaaattagctgggcatggtggtgcatgcctgtaatcccagctattcaggaggctaaggcaggagaattatttgaacccaggaggcggaggttgcggtgagccaagatcgcgccattgcactccagcctgggcaacaagagtgaaactccgtctcaaaaaaaaaaaaaaaaaaaaamccataccacctttgtttcccatagtaactctaccaggtggccagagtggctcttattcctctttacatgtgtcacttacgcagagagaagtaggagttaatttgtcttaaattctctacttagtagggttgcttgcactgaagccctagtaatccccagtttattgctgcctccttgagctgacaactgcttatactctgatgctgatcttttctctattccgcaggtctctagcatcaattcacgctttgccaaagtacacatcctgtatgtggggtccatgcctcttaagaactcttttcgaggaactatccggtaagaagtatccttttcacatataccttagcaactggaataagattaggatagactaggacaccagaattttgagcaacagttacaattcctatttttcttttgcccrtttttctttcttctttgtgctttgattctcccctagtagtatccaaaaaatacatggatgatctaggacaaaaggaaaatattaacgagagggtttaaaagtaaagcaaaggctgggcgcggtggctcacgcctgttatcctagcactttgagaagctgaggcgggtggatctcttgagatcaggagtttgagaccagcctagccaacatggtgaaaccccatctctgtaaaaaatacaaaaattagccaggcacagtggctcacacctgtaatcctatcactttgggaggctgaggtgggtggatcacaaagtcaggggtttgagaccagcctggccagtgtggtgaaaccctgtctctactaaaaatacaaaaactagccggacatgttggcgtgtgcctgtaatcccagctgctcaggaggctgaagccaaagaatcgcttgaacccaggaggcagaggttgcagtgagccaagattgcgccaytgcactccagcctgggggacagagcgagactctgtctttaaaaaaaaaaaaaaaaaaaattagctgggcatggtggtgcgtgcctgtactcccagctacttgtggagctgaagcaggaagatcacttgagcctaggaggcagaggttgcagtgagctgagattgcaccactgcactctagcctgggcracagagtgagaccctgtctcaaaaaacaaataaataaataaaaggtaaagcaaaaagaattgagtgaagctgaagtttagcagtgtcaggatgactcaaaccaaagtagaaggcaggctgggcgtggtggctcatgcctgtaatcccagcactttgggaggccgaggcgggcggatcacctgaggtcgggagttcgagaccagcctgaccaacatggagaaacaccgtctctactaaaaatacaaaattagccaggcgtggtggcacatgcctataatcccagctactagggaggctgaggcaggagaatcacttgaacctgggaggcggagcttgcggtgagccaagatcgtgccattgtactccagcctgggcaacaagagtgaaactccgtctcaaaaaaaaaaaaaaaaaaagtagaaggcattttaggaagcactttaaaatttaatatagattgaactcagaggttataaaacattgaaaagatttgtgggtgagatggtgatttcgtgtggcttccttgagaaaggacaaacatttcttgccaggcagataatctaacttttgaggccctttccagcctcaggatttgatgtggttctgtagtgcagcagtccccawcctttttggcaccagggaccagtttcttggaagacagtttttccacagaccatggagggggtggttgcagaatgattcaagtgcattacatttatggtgcactttatttctgttattattacactgtaatatataatgaaataattatacagctcaccataatatagaatcagcgggagccctgagtttgtttccctgcaattcgatggtcccatctgggggtgatgggagacagtgacagatcatcaggcattagattctcataaggagtgggcagcctagctccctcatatgtgcagttcacaatagggttcatacttctatgagaatctaatgcccacttcgatctgacaggaggcggagctcaggcagtaatgtatgcgattgggaagcagctgtaaatacagatgaagcttgcctgccactcacttccttctmtgcagcccggttcctcacaggccaccagaagttgggggcccttgctatagtgcttctgttcaagccctgaggcaacgaaattccttatcctttcttgccaaatccgatctgcctttatctaatcagaggtattgatactgcctctccatgtggtctgaggatgcttctccaccctgctcctctgggtagcagctgtgtcccatttacaacttgttctgtctgttcttgtagctctttatttactaggaatctacagaataattctttctcacaggctgggcaaggtgactcatgcctgtaatcccagcactttgggaagctgaggcgggtggatcacctgaggtcaggagttcaagaccagcctggccaacatggtgaaaccccatctctactaaaaatacaaaaaactagctgggcatggcggacgtgcctgtaattccagctgcttgagaggctgaggcacgagaattgcttgaacccaggaggcggaggttgcagtgagcaaaattgcgccactgtactccagcctgggtgacagagggagactctgtctcaaaaaaaaaaaaaaaaaaaattctttctcacaggtaattaatctttctgttaattctttttttatagcaaggaagatgtccgagcaactgaaaaagacaaggttgttggttggttctttttttttaatggctttacgtatctcaatcccttaaaagtattatctcaggccaggcatggtcacacacacccgtaatcccagtactttgggaggctgaggcgggaggatcacttgagtccaggacttcaagaccagccctggcaacatagcgagaccctgtctctacaaaaattttaaaaattcaaaaattggccaggcatggtagctcatgcctgtagtcccagctgcttgagaggatgtggctggaggattgcttgagcccaggagtttgaggttaagtggtggcacgcacctgtagtcctagctacttgggaggctgaggcaggaggatcccttggtccagcagtccaaggctgcagtgagctaccattgcatcactgcactccagcctgggtgacacagtgggatcccacctcttaaaaaaaaagaaaaaagggccgggtgcagtggatcacacctgtaatcccagctctttgggaggccaaggtgggcggatcacaaggtcaggagttcaagaccagcctgaccaacatggtgaaaccccgtctctactaaaaatataaaaactagcctgtgtcgtgccatgcacctataatcccagctactcaggaggctgaggcaggagaatcgcttgaacccgggaggcagaggttgcagtgagccgagatcgcaccactgcactccagtgtgggcgacagagcgagactccatctcaaaaaaaaaaaattttcatttgtatgataatactgtagaagcaattaaaagttcttgacttgacatgagtaatgatgatttctaccctccaggattagaaagtagattggctttaccagaagcgttcacagtttcatatagacccagtctagagctttcacttaacattcctgttctttctttacaggttgaaatttataagagtttccgcccaggtgacattgtcttggccaaagtggtatcctttattcccagcagacttctggtcctttgtcaaaagaagagaaggaggccgggtgtggtggctcatgcctgtaatcccagcactttcggaggccagggcgggtggatcacctgaggtcaggagttcgagaccagcctggacaacatggtgaaaccctgtctctactaaaaatacaaaaattagctgggcgtggtggcacatgcctgtaatcccagctattcgggaagctgaggcaggagaaccgcttgaacctgtgagrcagaggttgtgaactgatatcacgccaccgcactccagcctggttaacggagcaagactccatctcagaaaaaaaaaaaggtagaaaaacaactcaggtggctaaggtgggggaagacttctaactcctcattttccttcaccggtgttatgtgactagatctccttaggtgatgcacagtccaactacctgctaaccaccgccgwgaacgagctgggagtggtggtagcccacagtgagtcaggtgagatggccttgtttccacatccttactttccctggatctatggtttgggataaatccattgtttttcctggtttcccttatctgggaagcagtatggctatagatatttccctctgagattagaatgattatttttttcttttttgcttggtgctggtggtggtggttgtttgagacagggtctcactttgtcgaggaggctggagtgcagtggtgccatctccactcaccacagcctccacctccttggttcaagcaattcttgtcacccaagtagctgggattacagacacacgccaccacacctagctaatttttgtatttttagtagagacagggtttcgccatgttggccaggctggtctcaaactcctggcctcaaatgatctgcccgccttggcctcccaaagtgctgggattacaggtgtgagccaccacgcccagcctgattctccttatataaatccaaggaaacgggactcacttcataagtcagtagaatgaacaaagttttttctttatgagttgaggttcagtaggaagcttggtggcacttcagcttcatacccagcataaaagaggagtcgcaggcaaatctttggggtctgggctccaccaccagcttttcccttccaggtatccagatggttcccatcagctggtgtgagatgcagtgccctaagacccacactaaagaattccggaaagtagcccgagtacaacccgaattcttgcagacctaagaagccactttttaccctatggaagggggtaagctgttcctgagtataacaccaagatgctgctgtctttattcaaacacctggcgtcggccaacagccacttccagaaaaatcttccagtttacgctgtagatggaacatgtttctgtgaacctatcagtggatttcattctcttgagtaataaatcttatcttttcaaggcaccaacaaamaaaactgtgatattggaaatagcctatccctcctgacagtccttataaatacatattttttgctatgataaaacttttttactaaaaggatgttatagagtctgttgtcttaagcagagaaagacatctaaatggtgtcaggacatttcagtacttctgcttattgagtagcatgtgaggcaggcatggtggctcatgtttgtaaatcccagcactttgggaggccgagttgggttgaagtcaggagtttgagaccagcctggccaacatggtgaaaccccatctctactaaaaatacaaaaattagccgggcgtggtggcacatgcctgtaatcccaactactcaggaagctgaggcaggaagatcgcttgaaccctggaggcagaggttgtagtgaaccgagattgcaccactgcactccagcctggacaacagagcgagactctgtctcaaaataaataaataaataacatgtctaaaagtatttgatacacatcactgatatagtgggtactccaggaaatgttaaatctgaattgaaaagtgggacagagtactgtcatatgaggtggccaggaaaggattagtgacgtgagatcaaaataaattaaagaacataaaagtaagtgaagatattcaaggcagagagacaagcccaggctaaatgcagaagcagaaatgaaggcgtaagtttggggatgaggaagggatgagagttaagcatggagaggttgccgacgaaatatgagtctgagatgtcacttcttgagatgttattcaggaagcctgtgtcttcagtatttagtgaccgtgcgtaatgtgagctttagaatcagcccaccttagtttctatcctctacttcctaaccttgaatattagggtttctatagttgaaaattttagagattgagatcattgtagatccacatccaggtttttgtttttattcttgtttttttttgagacagagtctcgctgtcacctaggctggagtgcagtggcgcgatctcaactcactgcagcctccacaccttcccagtagctgggactacaggcatgcgccaccacgcccagctaacctttggtagagatgaggtttcaccatgtcggccaggctggtcttgaactcctgacctcaggtgatccacttgccttggcctcccaaagtgctggcctcccaaagtgctgggcttataggcatcagccaccatgcctggccttgggttttttgttttgtacatgcaatttttgaagagacagggcctcaaaatgtcacccaggatggagtgcagtggtgcartcatagctcactgtagcctcaaactcctgggctcaggtgattccccatcaatcccctgagtagctgggactacaggcatgtaccaccatgcctggctaatttttcttgtagagaccaggtcttgctatgttgcctaggccagtctcgaattcctggcctcaagtgatcctccttcctcagcttcccaaagtgctgggattacaggtgtgtaccactgtgctggccaaaattaccaacttctgatctagaattctgcacaggttaggaaaataacatcccaccaggctcttggagactgaaattactcaaagttattgtgtaggtcaaatgaaaatctaaacttgaaaagcaagatgcttgaaagtatttaaatctttgggtaagaaccttcatttgtttgcactagcaatatccatcccagccccagtaccaagtggtgtgatatttggtgctttttacatgtttctttgggactgtttcctcttctgtaaacaggagttaccagccctttcatgggttaagatgagagctaacatatgtaatatccctcatccagtgggtggcacagaggagcttcattaggagctcaacagatggagggtgttacttgttcctaccagaagggaaagggaatgttctttctccagctttatgggatttcttgtagtccagtgaacttttcaaaggagaaggcaattgtgtttataatgtaattatactcctttccactgcactaagtcactttttgagatcatcttacaagttggtaacaataaacagttaaaaaaaaaaattctgaggcctgcacggtggctcacacctgtaatcccagcactttgggaggccaaaactggctckagaccagcctgggcaacttggcaaaaccccgtctctactaaaaatacagaaattaagcaagcatggtggcacatgcctgtggtcccagctactcaggaggctgaggtgggaggcttgcttgaacacaggagggggaggctgcagtgagctgagatcatgccactgcactcaagcatgggcgacggagcgaggctgtctcaaaaagaaaaaacaaaaagcagactttacttactctaaagaggatataatggagttcagaatgtgactttccaatcaggggagcaccaagcaagagctgcagggggcaacgtgaatggagggcttggccaggagggcctcccaccaccacctcagctcaccaggctgacgtgaaaaccccaaggagatgcgtcattttttgaccaaccgtgtaaagttgtgactggatgtcctaaaacaaactgccacacaaggactagggcagtgagagacatttcaagttaaatgctaaagtttcctcagataaggtcttccacatcacacaagaagctattgcacatcactcctttattatactgatatggwaaaaggatttagtacagttatgctcagatgaacactggrcccatgtggcagggtcaagcaactagaacatgattcagaaatcagtgaaagatacacttggacaggaccaagaggcatttcactgccatgaaacaaggcaggaagggattctaatacacacaccaggaagcactcctgcccctcagaggtcaaggagctgatcctatattggtatgaggaatggcttattttctgatgaccacatgtgggactatttcaaccgccacaagaaaccccagaagggttattgttttgtattatttatatatactatacttttttaataaaagtaaattaacacataacgaaattcaggattgatcccaacctagagccagatcctctggggtcagggaggaaacagttgtcacatcaccacgcaggttacattcgtcttccactggaatgactagagcccccaggcagtaggcagtgacctgactgcagaagagcagaggacagactccgctcatggggacagacaggctctgttgcttctcctcactggtcatggcttagcatggttcctccccaaagtccttagtaaacaaagcactcgcaaaaacccaagtcactacttttaaactctgttggataaggggagcttttccatagcttagactgagaacctgtgctctagaactgctattctgactagattgtatgaagggagtgggtgcaggcgacaaaatggctaaaatgaaaatgggagccactggtccccatctgcagctacaactcaagatgtctacagatgtggtcagtgtgacatgtgcaggtgggaggggcagagggacaagacgggcagggagggtgctcctggggacagtatcctccccgccggccttcacttcttggccttgccctgggcagccacagcttccatggctttgcgcaccgtctcttcatcccccagaaactgcatgggcttgataggcttcaagttcttgtccaattcatagacaatgggaataccagtcggcaggttcagctccatgatagcctcttcagagagacctgaaaacatccaccatcatcagccacacaagacataaatccacatcacccctccaggtttactttgtcctccaggtgataaaggactttgacagaaattaaaataagacaccctttctgatctttatagtagttctgaacccagggaatggcccccaccatacttatttctcagcyattaaactgaaaagcaagaaaaggtatacaagatagaccaccaacaaactacagcaaggtatatggccagatatctctaccaaagtgggatctagaagcccacagtgaagcaagactacacatctcaaataccctgtacagcccatccaaccaaaaatcagcacacgtgggcctctaggccctcggggatgaagatgcaaattgagattcatgtgtaaagttgtgcctggttgtgactaaggagaattttttcttttatatatatttgttttccttttttttttttttaagagacaaggtcttactctctcacccaggctagaatgtagtggcacaatcatacctcactataacctcaaactgctgggctcaagcgatctcccgcctcagcctcctgagtagctgggactacagatgagcatcaccacatcaagctaatttttcatttttcttttgtacagacaaggtcttgctttgttgctcaggctggttttgaactcctggcctcccaaggtgctgatagtacaggcatgaaccactgtgcttggccttttaaaattttgtagagatgcagtcttactatgttgcccaggctgtctcaaactcctggcctcaagtggtcctcctgccttggcctcccaaaatgttgcaattacaggcatgagccactgtgcttggcaagctaaggaggattttcactagcagtttcatttgacaataccaatctagaggtgagcttctcaatctttaatgtgtatccaaatcacctggggaatagatgccgattctgaaacaggtctggagtgagacctgaggttctgcatgtataacaagctcccagggggtccagctgtcactattctgcagatcacattttgagaaacaagggttgagggtgttttttcactagaagtcaatctagaccatctctaaagctgttaacatgtccagcccttccctagactcctttttaccaagtccctgatttgtggcagttctgctttatccttccttgagggcgcctctgaaaaaacatacataccctccagatgcttgacaatgccccggaggctgttgccatgggctgcaatcagtacacgtttcccctccttgatctggggaactatttcttcattccagaagggcagagctctggcaatagtatccttcagactctcacaggagggtagctgatcttctgtgaggtctgcatacctgcgatcctaagcaataaagaatccaagttcaccacttattaagagttacatctgttaaaagacttcatgatgtatcgattttggcccattcacattcacagggttttataaaatctgactatggaaacacaaaaaaggagatagtaaactatcaaccatatcttctagtaagtgaaggtcattcactggagaaggaaggattacaattaactattttatcatgaattgtaagttcagtgagattaggcagacactactaaaagcccctgatcctgggcggagtgaccaaacctctgtttgtccataccttactgatgttgctgtagaaaggatggtcgggctccatcggaggtggtgggacatcataggagcgcctccagatcttcacctgggcctcaccatgctttgcagcagtttctgctttattgagaccggttagacccccatagtgccgctcattgaggcgccaagtcctcaccactggcagccacatctgatcaatggcatctagcactgtccagagggtccggatcgctctcttctgcactgaggtgaagcagatgtcaaactcatagccagcatctggaaatcagaagttcaaagtgataagctaaccaggtctactctgagccaaaatgttcttcagtatcaatctcctgtacaagtagtccaaatgacaatatttggccaaaaaagaaaatatttggccaactgttttgtttatccttgcactctatccaaggtcacagctattatgtgggttaaaacctagattaaaacccatgctgtgggactccagaatccaacttttcaccaccatctctagctatccccattttcctaattcccaaggatcctgatgtttgcatttcagttagaactgtcactttttcttttctttttttttttttttttttgagacggagtctcactgtcacccaggctggagtgcagtggcgtggtctcggctcactgcaacctccgcctcccgggttcaagcaattcttctcctcagcctcccaagtaagctgaggatacaggcgcacgccaccatatccagctaatttttgtatttttagtagagacaaggtttcaccatgttgcccagactgggaattgtcacttataaaagatattttactagaactctgaagtaagaaaattaggatttaaatcccaatcaggacacaggaagagctcttcctgtactgataaaacttcagtttgttgtatgaaattttattttgtttttgtatttgtttgcaattgtatttgtccattgtatgaaattgtattcactgtggagtatggaaatcacatcacaaactctaatccatggtttctctctactgtagtcacaaagttccagcctaataccaagtaccctcagagtatacctacttaaatgttaaaccaagtttaggagaagccactcactaaagaaagacccagtgctgtgcactatctgattcatcaatgaatctgtcttccatacacagtagttattgtggcaagagttatgttggcccaatgaataggttccaagaaatcagtcttggcccggcacggtggctcacgtctgtaatcccagcactttgggaggccgaggtgggcagatcacaaggtcaggagattgagaccatcgtggctaacatggtgaaaccccgtctctactaaaaatacaaaaaaattagccgggcatggtggtgggcgcctgtagtcccagctactcaggaggctgaggcaggagaatggcgtgaatccgggaggcggagcttgcagtgagctgagatcgcgccactgcactccagtctgggcgatagagcgagactctgtcgcacgcaaaaaaaaaaaaaaaaaaaaaaaaaggaatcagtcttattgattttgtttcattaaagattattcaccctcccaccataatggggagatagccctttccttgatgaccaagaaaacattcctgtttttctccattaggctagaaggccctcttagaaattcagcacaaacttgcctggatattgcttcatattggggttagcaacagtaattaataaaacatgaagtgaatttttctgccagtcattcaaatgagaatgaggccaagaagaactcattcttactgagtgagggctggggagaactaatcaccaggaaaactcacaccacccacaagagaaaaaacaggtctcatcactgagccgccagacaagtcctagtagactcactcactgtcgccttcctaactgtaaggaaaggaatggctccccaacaaaaggctgagacacccggaagtgaatacccacagtgcaagcctcagctggggagcttcaggctgtttcactgcaattatttccacttgcaatgaggcggctcactttggacacataaataggtcctcaaggagaaaagaagttccgcttaggattcttaacagagaacctgaagaatcagagaataaagcctcttcctttaacttgcccatcaaactaaaacatagccaggggcactcacaggggtaggagtggacagtgtggtgtggactccatcctcccccaggccatccctctcttagcagtaaggatgcatggggaaactcagttctcactagctttctccagaaatcagattcaaggctgtacaaaccctatcacttaaagcactgaggaattatttatatatatgtattcgaccttttaaaccgttaaatcttttaattttctatactgttaaatttttaatttaatgctaacatttattttaaaactgaaataggatctgttattttacagagattacaagtttaactatttgattagtctcaaacagagacaacatggtttaacgtggactagtcattgggaaactaccacggactgatacagttcttcctgccacagagctaaagaaaatggcctcctttaccagcactttccatttcccagcctctcctaaaagatgaggtcacaccaggccatctcaaacaatcactcccctgcccaccccaccccgcagaggtttacatttaccagactgtcctgcgttttgcttcatttgagaaggatggtacagtgaaggcaagaagctaggagagcaatctgaggccaaatacctgtgcctcatcaatgacccttgtgaatggctgcttctttgtccagaggttagaagggagcaaaggaggatctgcccctatcatcagcggaagcacctcttcagtccagggattcttggccgtgccggcagcagggaatgcttccttattagcattccaacaccacaaagagcagactggggcgggagcaagcctggataggcaagcattatctcacagccacttccacctttgcccagcgtccttagccaaaagcctaccagttcctcacacctacctgttacttcacccaggactagggcgaggacactggactaggaatcagatatgaccttggacaagtcatctttccaaatactcacttttcccaactataaaggggccttggaaagatgagaaagataaaatcttatctactttattgggtagaaggagcaactcgaatcattcattcattcactcaagttacatctacagatgcgttttggacacactatttgtggaatgctactgaacagcaaagacctgcacaaccacgcggatttcttggtgttctgaggcttgttaggcacccccagggcctccacctactgctggggacgaggctgtgtggcgtgtcgatccgctaggatccgtagccgcctcttgagaggccttggttacagctgctttaaggcacagggcgtcctccaggagcaccagactgtaccaaccgcttctggcgctaagggaacctgaaaaagacctggccgccatagatggttccattagggcaaactgtccacgacttattattattattttttttttctggacagagtttcgctcttgttgcccaggctggagtgcaatggcgcgatctcggctcattgcaacctccgcctcccgggttcaagcgattctcctgcttcagcctcccgagtagctgggattacaggcgtgcgccaccacggccggctaattttgtattttcaatagagacggggtttcaccacgttgataaggctggtctcgaacatcctgaccgcaagtgatccacccgcctcggcctccccacatgctgggattacaggcgtgagccaccacgcccggcctgtccccgacatattaaatgttcagactagaaagggaaaactgcgaagtggtgtcgtggggagcgcaaagggttgcggggcgaccgccctgggtcctccccctggcacagcccctcatgctccacggcgtgaccttgaacaagtagactctaccctctgcactcatcttctcaactacacactaaactgttaagagagatgctgcccaaggtgccggccctctccgagagggcgcagacgccagccaggcggcctccgaggccggacacccggcccttcgcagcccacacccggcccctccgcacctcgtagcgcctgcccgccgcgcttcgcctcctcgtggcccgccgggctcaggtcggcgtcgtaccagccgctgaagcggttctccaggttccatgcgctctcgccgtgccggatcagcaccagtttgtaggcggccatggcggcgggctggggatgcggcaccgactgggattagcagattccggagtagcagcccgccccgtcggccgcgcctgcgcgctcgcaccgctcagtccggctcccgcgcaagttctcgcccaaatctttccactcgctctggaccgctctccgccctccaggtgtgcgcatgcgctgcatcctggcgctgcggcccccgacaggagggggcgcgcttcggcacggcagagcgcatgcgtcctccctctccagtcccgcgtcggtcgccgcagtcacggagcgcacgtaagcacgcggagggcggagggcggagggcggagggcggagggcggagggcggagggcggagggcggagggcggagggcggagggcggagggcggcgggcggcgggcggcgggttgtgggggcggccccaattcgctggctgccgcgctgctccggagcagctcggccagattaagtggcccttatcactggaaccgctcccatccccacgcagagattgattcacggacctgtgttcgagtcttcactcgtacattctacttgctttgtgtctttgggcaggtcgggaaacctctcagcctcatctgtaaaatgtgatcataaataccgggtacctggaagtgctcggtaaatagtagtttttactattactctctcatttcagcaggacactgatctttttactcctagtttacacgtaaggaaactgcccgtgaccctgctggttccaaagcctgctctttttccagcgcggggctctttatcccgtctctgtctacaatctttcacacacgttaagtcagtgctttctgggcctccaacaagaaagcaaacgctaggacccttcaaatatttcaggaaggggcgagttctagtcactgcctgttcttctccgagccccaatcagcaatttattattacaattttttttttttttttgagacggagctatctcccagactggagtgcagtggtgcgatctcggctcaccgcaacctccgcctcccgggtttaagcaattctgctgcctcagcc

SEQ ID NO: 97843 - DNA, 57212 bp, Homo sapiens
tagacatatcttactacccagacacattaacattttagagtatttttccttctccctctctgtttccatttatttacatttctatatattattacaataataggataatactgtctatgttttctttccttcattttcatttaattttatacgtggatattttccaatgtgaaattaaatagtctttgagagcctaactttgatattctactatatgaattgtgctttaactgacagttggaaaattcagtttctgatttttcactgttactaatgaagctgctatgaacatcattctgcataaatctttcatctatatctgatcacttccttatagcagatttctgtaagttcaagaatattataaaaacttccaaaaaaagattgtgttccctacattataatcgtcaatataattctggtcgatgtgttatttttccttcatgtaaagaacacagcttgcttgcatatggccattttcctaaaagtattcatagctttcctccatattgggatgaaatatgtcatgtacatattgcagttttgttcaaaccgtgatatgcatccctgcattttaaccagctgctatgtaggaggcctcttgtacttattaactggaaagaaaatacacacaccaagacaggtaagtgactgtacaaaacccaaatccagagaactacaagaaatgatagaaatcttttatttcaattctattatattacagatgaacaaatacagtttacactgatgaagtgacattcacagtataatagcaagccttacagaaaggaggagaggtgaagaggcattgactggaatttttagaaattcctactatcagatatttagcttataacattattagaaacattgggacaatatagctgaaatgcaaaatggtagctggaaggagagggaaagttaaaacatattactacagattggttcatcagatttgtagctgtcattttgaaatagatcaaggctgtaaagaaagcacagagccagtaagttttttttaataggaatgtggtaaggacacagataaagtattccttaaggatgagagactccaggggaaattcccatggttgggaagggcaatggacctgttccacttaattaagttccacttacttgttttagaattcagttgtaggatgttttgcttcatttcataaattctttatgagtgatctattgctgcataacagacgaaactattcccaaaactttggtaaaacatcaaccatttatcagtgcttgtgagtctagggtatgctggggagttcagttcacctgggtcaggcccccactttatcttgcctgggttctctcataaatctgaggtctaaacttgaacaactactgtgattcaactgtggtctgtgtggtctctcatgctcctgcaagctagccggacttctcatggaggctgggcagggttttgagagcggagtgtgtaaggcctcttgaggcctagactctaaatgtcacaatgtcacatctgctgcaaggtggggaaataacagagcagggaataatctggccattattgaaaatcattgatcaggagagccttcttagtttcagtttcatataatgaaaactacgtaactgatatctttttgccctggtttgcaggctgtactgtattctttatctagttattgtagatatttctgctataagttgctttaaaatgctttgtgcaacaaggcagataaactaagtaaatagaactggatgatttgggtataaaagaaacagtgagtgaagaataggaatgatactgtcttttctccaagcaaaatacagttcctccaaatgggaagtgtggagtagttcttaagtctttctactgtaacatcatgtgaacttatgagttactccggtgacttcacatcagttactcatcatataatagtattttctggattcctcactgtccttgactctcctttgtctgtacaccagttcaggggtggcaaataggaaatttcaccttacctgttgcttctgattgattgctggtgacagtgtaccctgtcatttgttgctcttttaaatccaatacaagtagttgcatttattgttttaaatgttgtccagttgatgggaggctgagggaggagaatcgtttgaacctaggagggggaggttgcagtgagccaagatcgcgccactgcactccagcctgggcgacagagtgacacttggtctcaaaaaaaaaaaaagttatccagttgaggccaggcacagtggttgacacctgtaatcccagcactttgggaggtcaaggcagacagatcacctgaggccgggagtgtgagaccagtctggccaacatggcaaaaccctgactctactaaaaatacaaaaaatttgacgggtttggtgatgtaggcctataatcccagctacttgggaggctaaagaatgagaatcgcttgaactcaggaggcggtggttgcagtgagccgagattgcaccaatgcactccagcctgggcgacagagcgagactctgtcatcaatacatacatacatacatatatacatacatacatagtatccagttggtttcagaccagcagcagtccgttagaatatttagattatttagaattttgatttagcgtgggaacctgaggcatgctgtctcctagcagagggaaggagcacacaagaacaagttgattacaaagaacacgcagtttcaggacagatggtatatacatcacaactgttcatattcctttatccagaacaagtcacatagccaaggtcagagttacagcacacagagaggtatactccacccttagtgaaccatggcaagcagtgggaagggacagaagagatttgaaaatagtacaatctacagacatagtgttagctgttttttctagttttgtgtcttttgcaaatctgacattgttgatatatagatatagctttccaagctgactgttataaggcaaccgtcacacatttgtatctgtcaaattctggatttctaggtttttgtttggctttggtttgattgctttttgaagcagtcaatatgttatacagtaagaaaatataaatagtttatccttcaggaatattgaatcttggaggcataaggattggacacttcaaaaaccataatattagagagtgtatagttattgtccaaataaatagagacacatatattatttggtcattcagagaccccagattaattgctacaggttgaggtggttctagaaagagaatatagtatttgggctgggctttaacaggtgaataagaatttggtaagtgaagagagtgaggagcaagacttgccattcagtatgtacaaaggggcagaaatcaggaaattaaaagcatggggggagtgctggagctagacgaggttagttgggaaatgcgacaatgatagaaaaggctggaaagaaggaaagaaacattttgtggaggatccagactagcagacaacatttgtgtttatcatatgtgcaaggagagttgttaaggcttttgagcagggaatgactatatcaatgcagtattttaaggaattgaatttggcaaatatagtgaaggagaaagagacaagaaaaaggtagtatacctagagattagcatagcattccaattctcaagtgatgaaggcttatggtaggtattgctgtggatgctaaaataaaggggggtagggaaggaagcatccacagatcttgatgatccaaattgggatttggagtgccaaataatcctatttgcagatgttaggattattccattccttcatcaatattgaagctaatatctgtgcaagttttatagtaccagaaaaaaaatttttaacatgtaatctacccttcctagagtcaacttttgatatagtttggctgtgtccccacccaaatctcatcttgaatgataactcccacaattcccacctgtcatgggaggaaactggtgggaggtgattaaattatgggggcgagactttcctgcgctgtttttgtgatagtgaatgagtctcgaggatccgatcattttaaaaatgggagtttccctgcacaagctctttgcctgccgccatcaatgaaagatgtgacttgttcctccttgcctcccgccatgattgtgaggcctccccagccatgtggaactgtaagtccattaaacctctttattttgtaaattgcccagtctcaggtctttattagcagcgttaaaaatggattaatacagcttttttcagagaacagtaaaacattgtcttggttcttgggtgagtaagagcagaagggacacttttggtgccgtggcatctcttggcagagaagtctaatttcactgctaacttgctttgtgagggtgcatttgtgacaagaagaacaaatagatgtgcaaagaaaaaaaactcatacacacacatataggcatatccatgggaaattattcagatccttctcctaccccaaagtgcctaattattcaaggcttgactcaaatcccgtctacttgaaggaactaattgattttatgagcatatagtccaaaaagatttagtttgtctggcttcagcaatgcctacctggagaagtgacatttaagctgagatttttaaactaagatctaaaagatgagttagccagcgaagagttgggtgaagcagatgttggctcaaggggttttccaaactcagggtgagaagtccctgagtttggagagtgtggtttatttgaagaactaaatgctgaagtaagcaaagcagagtggcacattatggggttggacaaagagatcgggaaaccagggctttatagtatgtattaagaaactgaattttataagagcaaagaaaagccatggaaggattttcaggttggcaaatgacatgatctgcttttcaattaaaaaaaaaaacactcaaactcttgtatggagaatggattaaaagggagataagggctgaagtgaggcagccattcgggaatctactgcagaaggaggcagcagaagagatggagcagagtaaatgagacttgggaaatatttaggaggaagaatcaattaagatttgaggatcaggtgttgcgaggtgagggagaaggcaatgtcaactatgaatcctaggtatctgtcatgtgccatttctagaaaaagagcaggtttgaggagaaagatgtttggttctgaacatagtttgtagagctcactgcacatacaagtggagaggcaagtgggagttgtaggtgtgaagcccagaggagaggtgtggacgggataagcatttaagactcctccatctagaaggaaactgaagctgtgggtgaggtcatcacagcacagcgtttaggagaagcccaggtaaagaagctgacgaatgtctggaccctgacaaccttaacatataatggtttgatagtggaggtggaggcaatgtagaaagaatgccagaggcaggaaaaagcaaggaggatgtgttatcatcatgaccaaggaagaaacgtgtttcaagaacaaaggcgtcaactctgccccatgcttccgagctgtcaagtaaagtgagaaaaacagaaaagcgttccctgggtttagcaacacggaggtcagttgctaaagggagcttctagaatgacgacgtcgccaaatctgtcctctgcctggattctcggcgatgaaactactacagagacctccaagtttgggcttctgcaaacacagcacgtccttctgatcgttctctaagatatgtaaacagaacgccagttcccagcgtggcaacacgggactgggctgcagctcacccagccggcggcccccgccggaagccggcggaaataccccagcgcgtgggcggagcagcggcccgcagagggaggcggtggcgcccacggaacagccgcgtctaattggctgagcgcggagccgcccggtgattggtgggggcggaagggggccgggcgccagcgctgccttttctcctgccgggtagtttcgctttcctgcgcagagtctgcggaggggctcggctgcaccggggggatcgcgcctggcagaccccagaccgagcagaggcgacccagcgcgctcgggagaggctgcaccgccgcgcccccgcctagcccttccggatcctgcgcgcagagtgagtggccgtgaggttccgggtgccgggggtgggacgcgcagggacagagtcctcgggccgtgcagttggacgccgggcgaggacggcccgtctgtgctgacccgcgaatagtgatcccagaggaagaacgcgtcctgagtattccaagtgcgagcagtgccacctgttctcggagatggcactgctcagcacgattgtccttgccagtcgtgctctggcagtgaagaggacttgtgaaatataattttcctctagaaggcactgcaccttcccatttaccgtcactttctcccgtttccacccctttccatcagtcacgttttcttcttttcgcagaaagtttcatttgctgtatgccatcctcgagagctgtctaggttaacgttcgcactctgtgtatataacctcgacagtcttggcacctaacgtgctgtgcgtagctgctcctttggttgaatccccaggcccttgttggggcacaaggtggcaggtcagtaaatgttcatggaatcagatgaatgagtacatgacttcggaatcttaattatgtttctatgttcaaagatggaagggcttaatgtcttcctagagtttaaaagtgatgtttagtttttgcagaccccccaccccaaaataatatagtcttaaaaaaatttctggccggtactgaagagttctgtggtaggtatgcagaggtgtggttgattgtgctttgaatgttgtttgtatagataaggagttattttcatagaacagaaacaggacttgagcctccagcacagtccattgtgcaaccattgcttaatgaggatgctggactcacacttgtgagatcataatatggtttgctttttactttctaattccgtctgaaatatacataatttcaattcaacaaactgtttcgagcacatagtatatgcagggcactgtccaaggtccataagatgttaaaaagcaaaataccccactactctaccccctccccacccaccttcccccgccggggactctggaggcatcacagagctttacaaggaaaactggaaccgatgctctaatagaggtacagaattcagtgagacgcaagtcaaagaaagcttaattgtgagtaagtctcagacaactttatgaaagaaggggcttttgtacatagctttgaatgctataggatttagagacgcaaaaatttgtggagaggctgtttccaagggcgagtagctggagcaaagcagaaatgttgggcacagttgaaaaacagtaaatgatttggtgactgggttgctttgttgatggatgaagatggggtggggtggaaatctgcctaggaatggacagatcataggatttttgcacaggagattgatgtggtccaatctgtgggcagcagaggctggactgggaaggtagaatgttggagacaggaaggagcaggtcttgggatggagtggaaggaatcaaccctaaatctgagatttgagctcagtgactgggagatggccatgccactccctgagttggtaacaggttttgtgagtagatgagactgactccagatttgtgaacatgagcttatttattcattgttttttttttttagagacagagtctctctctgtctcccaggctggagtacagtggcgcgatctcagctcactgcaacctccgcctcctgggttcaagcaattcccctgcctcagcctcacgagtagttgggactacaggtgcacaccaccatgccctgctaatttttttttgtattttagtagagacaaggtttcaccatgttgcccaggctggtcttgaactccggagctcaggcaatccgcccaccttggcctccgaaagtgctgggattacaggcgtgagccacctggccagcccaaacatgagcttattaattcacctcttctgtgccaggtgctacatatgtactagctcaaccagccttaagaaccaactgtggcagggtgcggaagctcacgcctgtaatcccagcactttgggaggctgaggtggaaggattgcctgaggtcaggtgtttgagaccagcctcagaaacataacgagaggctgtctctacagaaaatttaaaaattagccaggcttcttggctcgtgtttattgtattagtctgttctcatgctgctataaagaactgcccgagactaggtaatttataaagtgaagaggtttaattgactcacagttctgcatggcagaaggcatctcttcacggggcagcaggagagagaatagatgcaagcaggggaaatgccagtggcttataaaaccatcagatgtcatgaggctcactcattatcacgagaacagcatgggggagactgcccccatgattcagttacctccactggtcccgcccttaacacatgggaattatattacaattcgaggtaagatttgggtgggggcatagagccaaaccatatcacttgcagtctgagctccttgggaggctgaggtgggaggattgctctagtccaggggttggaggctgcagtgaactgcgctccactgccactgcgctccaacctggatgacagagcaagttcctgtctactaaacacacacacacacaccttgttgataggggagtaagttacctgggttcgcttggctaataagaggcgttgcagctcccattgcctgacggtccagcatatctgctttaggtagatccttattagttaccaagcagggagggagacagccacagatttttccactcaggtaaaataaaactgaactgaaaaatcaaattgcttcagcaggagtgccaaggggctgggcttgggtccgtttctactggtatatatgatgataactagctttataggccagacatttcctcacactcctttggaaggacatttgtggagtaggcgtgacctcatgcctgcatacatgtgctcggctacaagtatgcatacacactcttccatgccctacttgaaaatccagactccttccccagaggtctggcaggacaagattcacttgtgtctgctctgcatattgccacctgtgtgctgatataaatcctaagttacatgatggtcatgggagactctccgttttcctaatgaattttaggacttgcttatatcaagtttttgttgtgattttgaatctttaggatcactatgtaaaaatggacttaacagttatccaaaaagctaagtgttactttatccttttaaattacatttaatgatgttttaatctttaaaaatcattacttctttatgccagatttattgtttgtagtaggcaaagaagaaaatatatctttttaaatgtgtataagaaaaataatgaattttaccatatgaatcataaatataaaacaagtttgaaaatatttgagttaaattacaaatgtactgtgatttgtaggagagcaattttgggagagtcttgtgatttgtcttaaagcaagtctaattaaaataatgtttttcatgtatttatttgataaaatcacaaactcattttaaaggcatatttattggatacctactatgtggttgacattgttctagggatacaccagtgcacagaatcctccaccaacatccatcccttcaagtggtgaaaacagacaataatgaaaataaaatatgtggtaggtcagatggtggtgtaagtactatgaagaaaaataaaccagggaaaagagagarcatgtttccagggtgggaggtggttgcagtttaaataaaagaggccagagaaggctgccctgatatgttgacaataagcaaagacatgaagatgtgtttcgtggaggagaaaaaaagttcatccccaaactcaattaaaaacaggctttagactataaatgccatttaaataaaatattcctgggacaaactatgttttggattaagcaagatatttaagagtacaacctgatgctaggaaggctttctttggagctatggtttccatatacatagaaagartgtatattctttttccctataggatgtctcagtggtacgaacttcagcagcttgactcaaaattcctggagcaggttcaccagctytatgatgacagttttcccatggaaatcagacagtacctggcacagtggttagaaaagcaagactggtaaggaaaattcactagacagaagaagaagtttacaccttaaaagtactggttgattaagtgacttggggccatgtttactggaagatgaattccatcaatggccactggaattatttgttgtagaaaagtttgttgatttaaaaaatgactcaacaaagttgagccaaaaagtgtctcaacaaagttaagtatattagtcattaagcacttttatacagttttgccaaatttaatttatgatagatattcctaaatgctttggacaagttacggaatactgacaccgattattttccaacttaggatccagactatagaaagaagtaatttaaaagaaataaagccaaattaatggttaaacattgattagaaatatgaagaaggtagtaaaattaaggggattttttttaactgataggtgttctactttaaaatttattatttgctaatttaaaaacgtcctgaaagtatttgacatagaaagtgaagggtcccctgttgacttttcccccttcagagatagtcaccatgaacactgtcatgcacaatctcttagagtttagaattttttgtgctaattgcacataagagaaataccacataaactgctgctaaaagcaatgtcagtttcaaaagaagaaaataaacctaagaaaatacttaaattatttttaataatttcaataaggaaaccracatttgttttgtctgttttacatagacatttagttctagaatgaaatgtgtaaatgttaaatctcctagggagcacgctgccaatgatgtttcatttgccaccatccgttttcatgacctcctgtcacagctggatgatcaatatagtcgcttttctttggagaataacttcttgctacagcataacataaggaaaagcaagcgtaatcttcaggtatgacctggtttttgtattttagttgaaatgttctcatgtttatggaaggcagttttcttcattcagcaaatacaattgagcacacacttattggtatttagagaagtaatagagactaactccatttatgttwtctacagcatcagtaaatatagcataagtaaaataagataccaatttattttataaacacagaaggaatttttagggttaaatgtatcacctcttaggtatcagtaatcctgagaaaaatgtgatgctataattttgttttactaaaaattgtcaatatttaaaccaaagaaaaggggctacattttaagagcaatgatctatagtaatacattaaagctccagggaacattagtggttaggttcaggtccttgctatgcaaatgaggaataaaacaggaaaggtttgactttcacctaaggaagtcaggtgacttcaggaactagactccaccttgccttgcttctggtggagttggcctctcctggaagagaaagtcaaagaaagatccagacatgagagaacatgctatagagttttaggggttcttcagatgtactcccagcatgcccttggggtggctatcatatttatgttgtgtaataacagaacttttctgttttaatggaggtgaaagctatcattttcttctttcatacaatacaactgaacttttcagcttaggtaattggaagttgtttttttttcctttgtgaatgtatttatgattttatttacgagtggggaaatcaaattaactttacagaaatttgttctcatacagaccttgcatgaatgtacctgtataaagagccattattgctattggtagtgttttgcaaactagctttgacaatggcaacagaaaaccctagatgaatatctttggtytagttcaaagcttagaccaacagatgcattcattgaggaatgtcatgtatagtttttatatcatttgcattgtctcgggatcctaaccaaagataattggccttaagaaatatggaaagatattaaagtaaaaatattatgtgaaccatatgtgaaaatacttgtttttaaatcaaaaagtacgttaggtacctgcacttagaaagttaaagcaatttttgtcataattcgtgaaagaaatattttgattttaacaaacatagcttatatagaatttaatagatgagagatgaggtttcccggagaatataaacaaattcatatcaacttacaatacacaataaagtaaacattctgcattttaatttatttttgttctaaccactcaaatctaggataattttcaggaagacccaatccagatgtctatgatcatttacagctgtctgaaggaagaaaggaaaattctggaaaacgcccagagatttaatcaggtacttttttctcattgaacacataaactgtaataaaataaaaatgtattcattcatcaaatactattagggcccatgtcaaagcaatgatgaatatctctctaattttatasccccaagaagtgggagaatcagatttagagattttatagaaccaggctttaagaaagatcctaatctaatggaattaagttctaacgaggagagagaacatataaasaagatacttctgggtagcataaagtgctgagaagataacatgctgaattcatggagtggctgggagtggggttgttcctttagatcagggtcaggaaaggcctctgagttgctggcacaggaatggaagcaggcagatagagggttcttgcagctgtccaaggtagaggcagtggaagcttgcgctcagtagaatcagtggaggtaggaagaggtggacagattcaggttatgctttggatgtgataccaatatagaaggatccttatgttgaaggattagatgcaggagtgagagcagaaagtcaaggatggctctacagcagctactagaaccccttgaaaaatggtaatgctgtacacggagctgggaaggcaaggagggggcaggggcaggagttttgtaggactcaataggtttgtggagagaaaaggaggctgatgggaaaatcaagggctttgttttgagcaacatcaagatacctattaaatattcaaggcatcaaacagtaaatgagtcagagttgtactagtatcaagatttttgatcattgttttattaatcctaatacaaaccttcctagttgtcagggttcagcagagttttgaatttgctatggcatttagtattcctttcttgagcactggggtggtgacaacaagccaacaggcaggcagtgtgaagccaccatgttatggattgttctggaggagcccattgctatatggatgccagaggacacagtatgcatcctgtgtgcatttcaccaacaaataactaccraagtgaactgtgtgacagtggagagggagggagtttaggtgtggtggaggatgccattctccacacactgcctgagcatttgtcccagtccttgtaatcctgtcacttccctaggcgtatagttcccatcttcttgtcacactgatagcatcttgctgaactgagcatgtaaagatacatattgcttattctaaactcaagctggctagctcatctggtacccagcctagggaacaaaggtgtatatcaacgctggaggagaagctggccaggttgtctcctctgaaagaggtgtgcctgtctctaacctggcatatacctgggagattttcagccggcagttttgattatatggggcttccatcctaaaagtagtatgcgtgggcctcctctgtatttctaatagacttgaaaggacagccaggagcaaagatgggcagaaggacaacctgtttcccccagctgcaagcatgtcatcctcacatttggccccttggcccagagatggcattggcagcagagtaggtgacccctgctctcccacatgaacctcatcccctggctttggatcttgaaggtttaccagcttttgagctccctccccattaaaaatgtaggtaatctggggattgttttgagcctctcagaggacacctgagtccrtgaacacctttgcaaagccttcttggggtgtgagggaagtttctgggtgtctggggatgtcagggaaagggaaaaggcacaataggtgcctcctttccaaagttatccagccaactattggctaggtaggtcagaaacatttcttcaccatttccccccttgttgaagtaactttattttattaatacagacatgcatcacttaatgacacagatacattctgagaaatgcaccactaggtgatcgcgtttttgtgcaaacattatagagtgcacttacacaaacccaggtggtataacctactatacacctacactatatggtaaagcctattgctcctaggctacaaacctgtacaatatgaagttgtactgaacgctatgggcaattgtaacacaatgttatttgtgtatctaaacatagaaaaggtacagtacagatagtgtgtaaaagataaaaggtggtacccccataaagctccattctaatcttatggggccactgtcatatacgcggtccatcgttgactgaaccattgttatgtggtacatgactgtgtatattctattcatgctaaagtatatgtgtatggaatggtgtgatgtctggtatttgcttcaaataatcccatttggggactagaagwgtaaggagaatagggatgaaacaaggccatccatgaatgctaattgttgaaactgtgataggtacayggggattcaacagattcaacaagttaaaaacatgcaaaattccgagttagttcagatcatttagagaccacaaaattctatagacatgccgagatgggaaattattgttcccattgttttttaatataagagcttttagaaaatacatttaagagaatattatgctatacacactgtagtagactataaatgtttcgtgtgctgtcttacagcacactaagtttttttctttctttttttctttgtggtgaaaaagctagttgcatgtctagacaaaaatttaggtccatagggtctgaagggatggggagaatttctttcaggtgggagggaaagacatgaggtggattctaagcttcctttgctgttccatctttgtgttcttaaggactaatggttaccatatgctgagtgcttatcatgtttcaggccctgtgctaagcactttataaacattatttcatttgagtaaatactttcgaaactatcactgaagttaggtattcttatccccattttaaagatgagaaaactaaggtttagaggtcaggtacttcactcagagccacagagctaatgagaagtaggtttggaatttaaacccagtattgtccaactctaaaactagttcactggagaagtcacttttcagttttctaatctgtgggatgggatatgagggctttctggctggaacttctcacacccatggagtgcctattcccttacttggacaactgctcactcyattggaaaggacccccttcctgagcagaagacttttctttgctctggggtctggagtaaccaagttcccatccaaacaaggtctctagaggtacagtagtgaaacgagaaagtaagagtcaatgacagccgaagtcccttccaacttcagtgtttgaaattcccgtggtttcagtactcctggtttcttagaaagttaaaaagttaaggactcactgtgaaagtggtatcagtactaaagtgtacaggagcagccaagcatctgcttagcagatgggggcagggtggagggaagcagggagggatgagtggaaggggtaagagagcaccaagggtttgagtgacttggagggactactgcccaagttggaagcaggagatttcttaggccctgccacagtcaccaggtttttccaccaagcatctcccagcaagtcagtagaaaggggatgtagaagctggggatgtagctgctgttttacagccattgtttatatccctgttctctaaaccgagccttggtcatttgggaggaggcctgggaagtcagaattctccagtggcctggtccctctctctaggtgtagtgtcccagctgttacaaagcccacaggacaccgtgcccacatcctgctggcttagaagttgtattagtctgttcttgcatggctataaagaaatacctgagactgggtaatttataagaaaagaggtttaattgacttatggttctgcaggctgtacaggaagcatggtgctggcatctgctcagtttctggggaggcctcaggaaacttacagtcatagcagcaggtgaaggggaagcacacatatcacatggccagagcaggaggaagcaggggagaggtgctccacacttaaccagatcttgtgagaactcgtgatcacaaggatagtaccaagaggatggtgctaaactattcatgagaaactgtccccgtgatccagtcaccttccaccaggccccacctccaacaatggggattacaattcatgagatttgggtggggacacagatccaaaccatgtcagaattagacaacagcaaagatttccctgcacaggcagaaagctgtatggaactcctcaaagtgacaacttattccaaccgcccagagaaaccccttttgtcactgagtgatatgtggcaccttggacttacagaggataccagtaacattcatgtatttctaatacacactttacagctgatacaattcacatgctttgaacttctgctgttggagaatatgtaacatgaaggaaaacttcctatgaagagagaataactttgatgacgtatgcctgataaagataaaacaaaaaattatggaccaattttacttatgagtatcaatataaaagtcctcaataagatattagggatcagaattaaatactacattaagaaaggacatgaccaaatatgatttattataggttacaagggtagtccatgactgggcaacctattaatgcaattcactaaattaatagctacaaggagaaaaaagcatttacttccttccacagaagctgaaaagatctaacagaattcaatactcattcctcataaaaacattgaataagataggaattgatgggtacctctttaacacaaaaaaatatatatatctccattctagagacagtatcttacctaactgggaaaactccagtaagtcagaaacacagcaaggatgctgtgtttccactgctatttagcatcgtattggtggtattggccaatgcaattagacaagagaaaaccattagaagcataagaattaaaaacaacatcataaagatgttagctctccctgagttaacttgtaattttaatgttattccaataaaaataccaacaagttgttttctggagctacacaaatttgttctgaaatttatgaaaaataaacatgcaagagtagcgaggcaacttctgaacaagtagagcaatgaaatgggactggccctactagacagactataaatcctctatagtcaaacatccttcaagggttcaggcttatgaataaaaaggccaatgggaaagaagagaaaaatctagaaggaaacccgtgtgcatatggaaattcatgtgataaagttggcagctcagagcactggggaaaataatggacttttcagtaaatgctgttaagacaaatggaaagctaactggaaaaaaagtgaaagcaaaaagtggacccatacttcactctgatcatgagaataaacaaatatatcagcgatctaaaagttaaaaagaaaaaaaggaaaccttgcaagtgytagggaaatgagtgaatgatgtaatgtcaatagggaaaggctttctaatataaggaaaattccagacatgaagaaaagatgatacaattgcacatataaaaacacccccgtagaatctgtgctgtatagggcactgtgtaagaaaggttgacaagcacagtttttgctgtgtgggggatttaactctaraaaaataacatctttctagaatttaatctctatgagaacaggratcactggttaccactctaacacccgagcctagagcattgcctgacatttacttagtacctagtatgtgcagggtacatctggtgtatgaagcaagtagagaccctgtcacttctgagtgttctgattatcaaaaataggactgaatactcccaggcaagtctgggtttatattcattattgactttatagtagcagattttcattgatggccttaatggagtgatttcatatttcagtatacctctggatcacccggaattgtgttaaaatagggttttctgattgcctaatcatattagcccttgagattttccaacaagatcctaggtggtgagatgctgctggtctgaggaccacactttgaatcagaaagctttaagataaataaggactgagttaatgagagtaatcttgtgtatagtatctgagaaaccgtgaactaaattccagcgtggtaccatgcaactgtatgaattaatggaaactcccagaaatactgtttattttagacatgaattgagcctagtttttttgtaaccttgttaacagtttgccagcattttccagggccttgggaaaaatttcatattgacacataagcaggaagcctgtagtacatgtcagaagatctggaaggcaagtggggacttgactttggagtgtaaccagcaagtacacaccctgaagaaaacgatggctrtaatcatgcccttcccattacaggctcagtcggggaatattcagagcacagtgatgttagacaaacagaaagagcttgacagtaaagtcagaaatgtgaaggacaaggttatggtgagtattgagtaaacacatgmatttattctgaaactttctgtaggggaaaaarggtttcaattgcttggggtgtaaacctcgtaactgagttcagtcttttaagtagttgggaagaaaaattttgcagaagtctcaagctataagtaaacaaattggcaaaatcaatgaccagatagactttttgaatggcctcttataactgccaaacattgagtttagctttttcttccctgaaagatcatgcagtaaatgttgactttgcccagtacccagtaaatgagatgttgctgctctaaatgggcctttatgtccacacctctcaaatcacagtgccccaggataaacatggcccatccttcccagtcatctgttttatcctaagacttggaagaggaacaaaaatacattttattgaaagaaatttggatacatttctgattaagacatccacagcaattttaggatacaacttccaagtcaatttatggaagcagagggctgctctggcgtcctcgatggtgcgcatttactcctctccactgttagggctggtgtggggagggtttgaggagttctttttcacagaggcctgtgtttgtggaaaaggccttccagcttaggggtttggtcctctgtggatctctgggtaatagcagtatggccttgacttacatgcttcagacagcatctttccaaactccacattctttggagcaacttcatcttgcggtctcctagggaaacatttcattaaagtagaaaccgagtgagcccagtccagaaatagccatggaaatccagagaagaatatgtggaaatgtgaccaaatcccaaacaaatgaggcttatttgtagaatgaacatacaatttattgtccagatggagatgcatttgagccgccaagagggcactgtttataattacagcaagtatgaaaccaggtctatcccggtaaagcagggatgtatggtcacttttcttacttggaaggaatgaggaaattttctgtgagctttttccccgcctgctgtgggcttcacagtggagttcttaaatcatatctcagaggtagtctcaaaaatgatgaggaagaatcaaaatttaggcgctggaaccaggttaaggacatacaaatcagtttgagaattattgtacgtttgcttttttaaaaatgttatgacatacttattaatgaaaccgaaattatttcatgtatatgattagaactgtccaagtcagatctctttttgggggagatggaattgttttcgtgtttctctgggttccatagaagcaatactctgttgcctaaagtctttggaagttgctgatcagtagaaaacatgtttacatctttstttgtagtgtatagagcatgaaatcaagagcctggaagatttacaagatgaatatgacttcaaatgcaaaaccttgcagaacagaggtaagggttcacaactgaagtggtgcccgttggctgcaattttttctgtycacactagataacgaagatgattactcctttctatttgccgagtattttatgactctgaattcttccttgataacccaggccagggcttctcaacatccaatattattgacatttcgggctaatttgttgttggggctgtcctggcattgtagcgtgtttaacagcatccccgacttttacccaccagatgccagtagcactacccaggagccctcactagtgacaaccaaaactgtctccagagattgccaaaagtcccctaggggtcagtgacccctacttgataaccactggttatgtgttactcaccatatttattgcgcctagcccactgactgacacagagcgatagatatgtggagttcccctgccctaatatctcaggtttcttcaaacgttgcagggccacgtgtatacacagcagataagctcagtatttttctcatgttttaaagcagttttactgtattttcttactgttgcgtgtttttaatgagagtagcaacagaaaagatctcaagaatgtacattgtgtaggacacgtagggtactgctgttactctattcatcatctggggtataccatggttcataggcagagattatcagtatgatttgggtagaaagtataagagacagcaacttcaactaccacttcctrctcatctacttctctttgaaagctacagctatgctttgtatacattttttatctgaattctgttcagataaaacattttattatttacatttatttttataataataataacattattattaatgttatttacatttatttaggtaattacctgacagtgtcttaagtggcagatactactatgtctgatttacatgggtcactgaaaacaagttttttttgttttttttytgttttttttgtttttttttggagacggagtctcgctctgtcgcccaggctagagtgcagtggcgagatctcggctcactccaagctccgcctcccgggttcatgctgttctcctgcctcagcctcccgagtagctgggactacaggcgtctgccactgcgcccggctaatttttgaaaacaagtattttgtttcagtgtgtctagttgttatacttaggactttttttcatgttcattaaagatcgaagaaagccaaactttgacctgtcactaggcagcatttgtgtcatatttatcctaaatttatatgaatcttggcttttgttggttttgtcttctttatatatttactggctgtctctcaatttatagaacacgagaccaatggtgtggcaaagagtgatcagaaacaagaacagctgttactcaagaagatgtatttaatgcttgacaataagagaaaggtagttatttactttccagaatagcatgccacttttgttatrcactgtaaataatggactcaaagtttagaagagaggaaaaattatagccacctggcttagagccccagttgagaatgaaatgatatttgcttttcttttaaaaaatattttaaarttcagtgatwaaaaakgaatttatttcactttgtttyttctattgcctttaggaagtagttcacaaaataatagagttgctgaatgtcactgaacttacccagaatgccctgattaatgatgaactagtggagtggaagcggagacagcagagcgcctgtattggggggccgcccaatgcttgcttggatcagctgcagaactggtaagattctccaaagcagaaaactggcagctgactggctaaccacataaacacataaatgtacctttgagctgtgttagttgaatggaccctgtcaaaacattagtatagagtttgacatagtccagcttctgcttaccctggaaacactcccttggaaagcacagtgttattcatgactctcgccacgttcagccacgtctgcttggtttggagcactcctgtaccatggggtgtcgtttgactgtacaaaacatcagtgacatggtcgttatagaacacatttaatgacttgactcttaatgtttccttaaaaacaagatagcttgaggcatttttctaggcttacagaatagttttttaggaaacattcagtcatccatccagtaatacttattaaatgcctactgtgtgccgggcactgtaggacctgggcacacaaggatgagtgattcttggcccttgccaacaaggagttctcagtgtggagggggggatgtagacatggtaataattcgtgtggtaaaagtatccaggtgctctagcaaaaggccatcagaattctgtggaggacaaaggaaagcatctccagggaaggtttcatagaggaagtggccttgtgctgactcaaaagtcactaggattactccacgtagatcaaggggaagtgctttccagcacagagcacagcgtgtgcaaaggcacacatgtgggagactgcaggggctgtattgggtggctggagagtggggtgtccagggagatgggaaggaaagtggacccggtgggagatgctggagcctgatggtgcaggttctcagcaccatgctgggaatgggggatgtacgcagctgtactgctgagccaaggcaggcttttttcttaagcaggagatgtatttctctgatctttgatttagaaagggcactctggccacagcctggaggataggatagagacagaaagaccagttggaatactattagcatattagtgtggtccaggtgaggggcaacaggagctgaacttggaatcacagagtgaacatgagggaaggtggcctgggacaattgctaagggtccaaggaccagagatctcacgaggttattttctatattgccagtttttaaaaaaatcacaattaatattcagccatttatttttgttctgtgaattgcctgtaggtaccccagatttcttgtgggttagagcagagcttctgagcccagtgcaccccatgtgccttgagggatacatacaaccctaaagcccttcaggtggccagggaggccctggggtgtttagagccccctagtggtcctcctagaccacaggagcctcttgtagggacacacatgccctctagttttcccactgtgctgtcattttctctgtgtgcaagcagagttggggacactggtttagcttctccgctggaactcagccagccgttatcctgccttctcctttcctgacgaagggctgctgtcccagggctttgaactggaatcgagcaaaatcagaaagtgaagtagatacttttcccagggaagaagacacttttaaaaggttttcttctgtcattactgcaagtgaataaaacagcgtttccccagcctgtgttgctgttagcagttgactgcaaggaaggaagactaagagcaatcactgggtttactcattggctttttatgtttagggtctagactgagcatactgccttctcctttcagttgagtgaaaccagaatcatcattccttcctctcttcctgtccccggccttgtctcccatctctgtctctcctcctgcccctctgccccacatctctgactggtcctgccgagacactgcttgctgatgccactctcttgacagaacctgcagtggctctttgctgcctcttgcatcacctggaagcacctgctttgctgttttccctgcctctggcctcctctttgccctgcaccagtcacagatcacctagaagccctgcctccacccatctctcctcacataggcctcagtggtgtgtagaagtttttgatgtagrctgtaatcattcagtgcatgttagttktactcctcaaataacaaagcttctactgctggcacaagcctcgttccctttgtttttccctagagggcagagcatggcatcctaggtgacattttgtgttgcatataaccacttgttggtttccatgccatatggtttggccgtgtccccacccaaatctcaccttgaattgtaataatccccatgtgtcaagggcagggccaggtggagataattgaatcatgggggtggttcccccaatactgttctcatggtagtgagtaagtctcacgagatctgatggttttataagtgggaatttccctccacaaactctcttgcctgccaccatgtaagatgtgactttgctcctcatttgccttctgccatgattgtggggcctcctcagccatgtggaactatgtgtcaattaaacctctttcctttataaattctccagtctcgagtatgtctttattagcagcatgagaatggactaatataccatgaktccctttaatccaggctgcttctggactgtttctcatagagacatctgtgtcttgtgtcttcccaggttcactatagttgcggagagtctgcagcaagttcggcagcagcttaaaaagttggaggaattggaacagaaatacacctacgaacatgaccctatcacaaaaaacaaacaagtgttatgggaccgcaccttcagtcttttccagcagctcattcagaggtaactcaagggacatttatttgtaccttctgtaatcggtctatacagaggaacattttaccgttaattcagatgatttacaagggtttaataggtgttttwwwtatatatatatatatatatatatatwtatttttttttttttttgagatagagtctcacctatcacccaggctagagtgcagtggcgtgatcttggctcactgcaacctccacctcccaagttcaagcaatcctcctgcctcagcctcccaagtagctgggactacaggcgcatgccaccccacctggctaattttttttagtagagactgggtttcgccatgttggccaggctggtctccaactcctgaactcaggtgatctgccctcctcggcctcccaaagtgctgggattacaggcgtgagccactgtgcctggcctcaaattttttaatgacaatgactcttcctgaattatttggttataccagtggttcttcactcttgtggccagctaggctggaagctatagtaaccttccactcctccttcccctttggctgagtctccgccgtgaccctaacatgcctcacctcctcctctcccctcctcatgtctcaggctctcaaatcctcctttctggactcttccccagcctccccaccagtcctccttcccagtccttcctccctgtgaccagtgctgtcccagagcagagttccattctggttcctcatcacctgctgatccaagtgaatgcccagctgggcattcacggccccccttctgcagcctggacctagctgaacactccaygcttcacgtccacacacgcccctttctaggcaaacttgacctcttgctgattcctataggggccatgccgcatacttgcttttctgtggctctcctgaggatacttcctcttcctcagagccttcttttcatgtacctgctttcaaaattgtatcatcccgaaagcttcaccttgtatctcatcatttaatcttcccagatttcccaaacagatgttatctcccttcgtggcctacagtcacccttcgttcctttcctactctgccttttgttatatagttgttatgtatttctttatatttcttgaatatcataaagttctggaaggcagagacatgcctttgtcaccctttkcccccagcaggacctagcgcagtgccttgtgaacagtaggctctctagacacacttagtagatagataaatgtcactgagtggaaaagaagggttcatattgcaagtttttttttttttaatgcaaacttgacatgataaaaatgtacttgattttgggtggaagcaatagctgagtggcagcggctgctgattgcgttccagggggcagagtcggggaagacatttactctcccagaacagcctatctcattcctttccttcagttacccgtggtgcagagagtcagggcagcagctgtagcagcaagggtggccgtggcagcggtggcagctacagtgacatgtccagcatgaatcccaaattgattatttattcaaattacttctgattggcgactctggggttggaaagtcttgcctccttcttaggtttgcagatgataacatatacagaaagctacatcagcacmattggtatggatttcaaaataagaactatagagttagacgggaaaacaatcaagcttcaaatatggaacacagcagaacaggaaaggtttcgaacagtcatctccagttattacagaggagccaatggcatcctagtggtgtatgatgtgacagatcaggagtccttcaataatattaaacagtgactgcagaaaatagatcattatcccagtgaaaacgtcaacaaattgttggtagggaacaagtgtgatctgaccacagagaaagtagtagactacacaacagccaaggaatttgctgattcccttggaattctgtttttggaaactagtgctaggaatgcaacaaggccyggcacggtggctcatgcctgtaatcccagcactttgggaggccgaggtgggtggatcacctgaggtcaggagttcgagagcagcctggccaacatgatgaaaccccrtccctactaaaaatacaaaaattagccaggcatggtggcgggcgcctgtaatcccagctacttgggaggctgaggcaggagaattgctcgaacccaggtggcggaggttgcagtgagccgagattgcgccattgctctccagcctaggagacggagcaagactctgtctcaaaaaaaaaaaaaagaaagaatgcaatgaatgtagaactgtgttccatgatgatggcagctgagattaagaagctaatgggtcctggagcaacagctggtggtgctgagaagtccagtgttaaaattcagagcactctggtcaagcagtcaggtggaggttcctgctaaaatttgcctccatycttttctcacagtaataaatttgcaatctgaacccaagtgaagaaacaaaattgcctgaattgtactgtatgtagctgcactacaacagattcttaccatatccacagaggtcagagattgtaaatggtcaatactgactttttttttttattctcttgactcaagacagctaacttcattttcagaactgtcttaaacctttgtgtgctggtttataaaataatgtattttcctgatatcagactgttttctcgtggttggttagaatatattttgttttgatgtttatattggtgtgtttagatgtcaggtatagtcttctgaagatgaagttcagccattttatatcaaacagcacaagcagtgtctgtcactttccatgcgtaaagtttagtgagatgttatatgtaagatctgatttgctagttcttccttgtagagttataaatggaaagattacactgtctgattaatagcttcttcatactctgcatataatttgtggctgcagaatattgtaatttgttgcatactatgtaacaaaacaactgaagatatgtttaataaatatcgtacttattggaagtaatatttaaaaaaatgtamttggttccctatggctaatgttcaaacaagaagtcctgtatgttgggttttttaaaatttaaaaacattacttgtactttgagtgcacattttattcttaattctgacatgtaaatgaacataattaaatacggggtttttattttttattttggatttttgagacagggcctcactctgtcatccagactggagtgcagtggtgtgatcatggctcacttcagcctcaacctcctgggctcaagtgatcttcccacttcaaccctccagtagttgggactaattagccacgcctggctaattaaaaaaaaaaaaamaawttgtaaagatacggtctcactatgttgcctgagctggtcttgaactcctgggctcaagcaatcttcacacctcagcctcttaaagtgctgggattacagacatgggccactgtgcctagccttcattgtatgtttgtttcaatgtaatagtttcacagatcattacagttattctgtttctgttaagtccctattaggttttgggatttctttactaattagaaaatatcactttgttcatccaacttgtcagaatctttcaaatgattttttagatcgtactctctaacccccttttttctttcaggaaaatcattgtgattgcctcaaccttaatggaaatgctaacttatctatcctttgctgggtatttgcagctcgtttgtggtggaaagacagccctgcatgccaacgcaccctcagaggccgctggtcttgaagacaggggtccagttcactgtgaagttgaggtaacaagggaaagatggcatcccatacatcacctgtcacgtagtttgtacccctagtttccttttataaaaactgttatatagggtgcttttgaggaaataatttttcagggggcactttaatatgaactcttactgagaatatctgagagtcttttattaatatattcatagtagaaatgtaactgatatacatatatgtacacactcctggtttttttccaatcataaatgtaatgcgtgttcacaggaaaacagaattccaaattgcagaaatgtgtgtaatagagagtaaaagttcctggctgcctcacccctcttgggcataggctcataacctgagccttatgaaccccagaagctgtatgaatgtggatttataacatgtacatttttctgatggatggatttatagctttcatcagtttctcaragcagtccgtgatataaatatctgtggaccaccacagtaaatggcctagtgtctgtcctcccaggattttgtccatgtctacacaaatatatatttcatacggaaacacacacgcacaaacatgacataatgtttcctttttaaaaaattaggattccatgtctacacaaatatttcatatagagacacacacacacacaaatatgacatatttcttttttaaaaactcggagtaggctacatacattgttttgtagtctttctcctcgatactaattgtagaagtgtttccaggaatatgtggctttactttcttccattgaatggctgcattgctttaagcattcttcttatgatgagtagctagacgctgaagaactggactggccttcatagttggcccgggtcctttttctggggtgttgctgatttaagtctgtggttaaccctccctggctggtaggtacaatgtcacactgaagccctcgtggaattttagaactcagcagctggaagggacagtagaaatctgatcccatccacctgctccactgaacggagcagacagagccccggggtctccttctcaaagtctccagctcagtggagcagaggtacaccctctcacctgccctccatctttccacgctaccctggggtgactatagatgggacgctattttttctgcttatgggcaatagtttttattgtctcccaacaggacaaagattagatacaagttttaatagaaagtaatgtttgctattttacccatataaattggccaaaggtcgaaattgtgatgaaactgaatattggcaaggttatagaggtaaacagctaccctcattaacttttggtggcaatgtaaaatcagggcggcatcctgtcagaattagtgttacaatttttcctaagcggttccacagctaggaatttattcttacaaatacacttacaaaaatttaagtagatctacaaaactgtcagtttttttgttggtaataccctaaaactggagggggagtagtttatctaaacgttaatagggaattggcataataaataaattgtaacagataattttttttaagtartggcttttatttttctttccagactgttggtgaaattgcaagagctgaattataatttgaaagtcaaagtcttatttgataagtaagatatstttaacattatataacatacatgtactattgaaatgttgattttgttactcaakcacagattcctccactaaataagcagatttctagctgtggaagggtctatactgggtggaagtttgcctccctagggccccagggctgaacccagagtcctgacaatgctgcgcatgagcagagacttctagtcagatccaccagggccatcacaaatgaccccagcagatttaaatcagcagctcccttggtggatgttgggagcttcccctggagctggtatcaacattcctgtgcctttttagactataaatgaacaaaagagtgagtgtctctttgtgcatatgagattgtaatcagcaagtctcaaagtggctggacttggcatgccaccccttccttctaggtcagccccaaaggagaggcccctgatccaacccgaggctgaacgtccaggctgccatgattctgtggtcatttgggggtttttttctggagcgaggtcagcagcatcttggggagactgtgtggagcctgtgggattcactcttgtctcttctgggcagtgggaacccaggaatgggcatctctcttgggggtccaggtggagcagcctcatcctattttgccctgagaccctagacctggactggcactaacttggccactctcattaaggaacaagatggctccccccccacccctcccatatttaatgtttttgytagcttgtgtcacatactgttttggcaagtttcaaaaatgatttatgatcattcagatcattttcctctggctttttgctttttcccactcctataagaatattcttcctcatagcatggtctgtgccttgtcttccctgccatcatctttggtatatcggttagcttttgcttcctaacaaaccactcccraaacttagtggctaggccaggtgcagtggctcacacctgtaatcccagcactttgggaggccaaggcaggcagatcacatgaagccagagtttgagaccggcctggccaacatggcgaaaccccgtctctaygaaaaatacaaaaaattagccaggtgtggtggtgtgcaccggtaatcacagctacttgggaggccgaggcacgagaatcgcttgaacctgggaggcagaggttgcagtgagctgagatcatgccactgcactccagcctgggtgacagagtgagactctgtctaaaaacaaacaaacaaaaacttagtggctaaaaactcaaaaactcattatttctcatattctgtgagttgtaggttgtcctggtctgagctagtgtggttggagccaggtgctctagcaaggccttattacatgactgggactcagctgggataaccaggtccttcttcatgcacctcaaaaaggctagcctgggcttttcccatggtgacagtgttccaagtgaacaaggcctgtgagtgctagccttggaacatctatagcatcactcccttccatcctgttgctaaaagcaaatcaaggccagctgagattcgggggatggggaagtatatcctacttcctaaacggaggaagcacaagagttgtgttgccattgcagtttaccatcttctgcgtcagctcagctcctctcagctgcttcgggcccttgtgtcttttctgtcggttccagctctgacggtcttcttagctttgacaagtcagcttttatcatactatcccttttattttaaattctttttttttccaaacgggaaaataggtcccttccatagctaatggtgattgtcattcacaaaagcattgaacttctggttgagattggaaaggaaggggaactaatagatctgtgagtgagcccatgatttctagtctacatctaggacgctcacggatwcattatttggccagaacatgacaaagtaatcactggatatagaagtgcaaggtctttcaaaattttaacctcagacttaaaacttaaacttgccactttccccagataactgactttcctggtactttcatgagagcattaaagatcatagagaataaaaatgagaattaaatggtcacattggcagtcctctgagctttgtgactactgggcagtgctgttggctggatccccagtgcttagtgcagggccttgcaccaagtagctgctcaataaacaataacgatagcttaaacatttattgagggtgtactggtgctggtgcttacatttattgagggtgtactggtgaggaattaactagtttattcctcatgatgtcctatatgttggcactgttagtatgttgtgcaaatgaacaatgtaaggcccagaccatttatttgccaaaggtcattcagtgatacttgccagacctagtatgggtagatggaagcagggagtgaatgaaaggctgcaaatccataggtgtagatttattttttattyatcattcacttacactcttatgctcttatactcttataattttgttaaagcttatttcaaattttaaatacgcatatgtgattatatatatwttttttgcagagatgtgaatgagagaaatacagtaaaagggtacgtgacgtactttacgctatackgtgctatatttttatttatttaatagttggaakacttttcagcatttctttcctatattgtatagatttaggaagttcaacattttgggcacgcacacaaaagtgatgaacatggaggagtccaccaatggcagtctggcggctgaatttcggcacctggtagggacatcagtttcctctctatgttgtctctggtttcttaggacttttgacaatagagcagccctttttggcacattgccatgtggaggacrcccccctgctggggtttgtagactttgtggctggtgtcttcctgtcgccagtacttggggcattttggtttctcctccttatcccacgactgttcactctgttttctgggctgtatcacttgcagtaaaaatatttcctaagcctgtgtttacgtaaatgatttgcacttgctgcctgcatgatccccacggtcactcacctacgcttgcagttttctcaaaggttatggctcccgtgtcctgactgtgatccaagtgtggtcctgtacaccagggttcactcctcagcccccgtgttccccttcctggtggccctgcccacagcccctgcctccacgccagcctgactctaccaccttttctccagggcagtagggctcattccccaggcagtggagacccagcaggatgctctgtgtgggtgcaccatctttcctcctctgtgaacatgggggctgccagttgctgtgaggctctgtgggtgctgagtccgaagctttccctgggcccagaacctgcaggaggttaaaggcatcctttttcactagagaccactttgtgatccagcaagcctcgtagctaggaagctctacctaactcgaaagcttagcccaactcaggtgcctgagggtattcagagccgccctcagggccccagcctgctccctcgtcagctcagggattgacagctcagagattgacgtccacttgagggcagktggacctggagtcactgggcccagcctggaggactctgctgagggaaaggggagggagaagctgtcccgagcctcagggcatgaaacagttaacraaggtgcatggggaaacattcagggaaagtttgaacacaggagaggagckggttgtgattccaagagatccctccagactggtgtccgcaccatgaggccactgrggaaacgtgcttctgctcatggaccctgaacgagggccaatttgtcccatgttctgcattctaaagataaagtcacgtctgtcattctttctagtcctaactttgttctcatttgtaaatgaagatagcaactttgaccattaccatggtgtttactaagatgattatttgttttatagcaattgaaagaacagaaaaatgctggcaccagaacgaatgaggtgagagtccctttatgttgtgaatgggcccaaatcaggcaggtctgtctagcaaggacaggtcagttggtggctggggacacctcacagaggagttcagacccatcagggaagagcagcaaaggagctgggtatttggtatatctgtgacaacagtaaaaacaccacatttgtgctttactattgtcaaacgattttgcacacaaattcattagacactcatggacaactcagtggagtagctgytgtgggcttttgtattcttcgcatcttacgggtgaagaaattgactcacagaagtttgcaggatttagctaagggtgcacagagttactgtcagagttggaacgagaggccactttgatgactgccttgctgtgtgccaagagggcttttcggccattgcatcccctaccaaaagcattgcctttgcatcagtttccttcctacagcgtgatccttaaggagttgggtttgtgatgcattcagaaatgaactatggacaaaggatgaaatatctggagttgttttggttgagaacactttcgtcatttatgcacacacagtgtgcagtccttccacaccaggaccagtggaggtcacatggagcagcgggacaaacacaggcccaggcagtgcaaagatgccttctagccctggtgtgcgcctgaactatgttttgacctccctgggtctagctgttgcacctctctagttctaagttgtgaggctcacatgaggtaatgcttatgaaggcactttgaaatctatccatttctaccgaaaccaagacaacttgtgacctgccaagttgatgtgagtcagcccttccggtaggcagtagacaatcacaagtatgcacttactcccagtcctctcaccttctccccacccatctgcattgagatgtgcagccacactgggcaggcagacagagctgagggtcgagaagccttaggtcacaaagccattagttgctctttccccattgacaatcattgctctgaatctataacccttgccgtaacttcagacacttatctttcagagcacactgagatactaagaatcattaaatctgggagagattgaatattgagtcttcagacttgccactgattgggcccaggatctctgtggcctgttgcaatgttaattgggcttttgaaagttttaggatctgtgaataattatattcttttcttctttccttttctcttccaagggtcctctcatcgttactgaagagcttcactcccttagttttgaaacccaattgtgccagcctggtttggtaattgacctcgaggtaagacktttatggtcccgagttggaaaacttcattatttttacttttaattgttacatgtatttttatttctcagtgtttgttctggaggtatttacctaattgttttaaaatgatctttttcagctaatactatcttaaccttaatttatggtccagaaagctagacaattgaattaaccttcaaattcaataacttaaaagttccagttgagatcgctgatgttaattttttttttttacattaagcattgggacttatttattttgctctgccctccccccacattttatgttttcattgtgacagttttcatcttctcatattgcatatcccttaattaattattgtagctattattatttttagggacttatttcttaactgaaagatacatcaaagacaagttaaactggacagaagaacagaacttaacacttctcattttcaagtattaaatatgtacaaatttacaaataatcccctgcttttagttgaggctaagcagttatctgaaggtgacatttctgtgattcagatgatttcaaggtctttgtcatcctttagacgacctctctgcccgttgtggtgatctccaacgtcagccagctcccgagcggttgggcctccatcctttggtacaacatgctggtggcggaacccagggtatggaaaacacatttgctttggtcccagggttaagcagagaccccacgctctcgctgctgcatctctgaaatagccccaatggccagttgttaagggagaagtgacaaagctcctgtggtatttctaaggcttttgagtaaatctgggaatatgaagcatggatatgtatttgaaatgagaattacgttttttctcccatgtgggtaagctagggcagtcagtgattccataccactttattgttattatttttaaaatgtatacatctactaaacaagcatgctccattcttagagtgtggatactcactgttaattaattacagtcatttataattattcaaagtacttatgttttttaaagtcaccaggaacacttaactagcaaataatgaattgttgctcctaagggaactacgaggctaggttccttcaagcctctggtcacaacatttttgtcaacccatcaatgcataacattgtttatgtgtgtttctgtttaaagacaccttatctaatacacttgttgaggcattaacattacacctatagctaggatcactgtaactcatgcctgagtgaagcttgcctcacacatgtattttctccataaggcacatcccagccttcccatgcttaggaacagtagaccacactgtggtactatgctcgggcaccattttaaacagggatcaccaacagcagtcacaaaatgcaaaaaacatggcgctaaataggcttcaaaaaggacacgtttttcttatgagaggtgaaacaggaagcgagtgtcattttgtttggcttcagttggaagcgtgttaagagactcgaattctttgctgctgtgtgctgctgtgtgtgcacgggtgtgtcttcaaatgaccccaaagatgccatgtatttagattttggagttacaagtaaattttagtgagtaaacaagttcacaaatgtgcatctgtaaataatgaaaattgactgtatttctcttcccctactgtgaaagcacctgtgtgtcatataaactagaattgaactttgggatggacatatgttttagtgccacacttgtgactggtgtctctgtagtaacccttagattttgggtgttttctctctagaatctgtccttcttcctgactccaccatgtgcacgatgggctcagctttcagaagtgctgagttggcagttttcttctgtcaccaaaagaggtctcaatgtggaccagctgaacatgttgggagagaagcttcttggtatatgcatattaacttgttatgtttataaaaattgaaattcataaaaatatctctctaattgctcttttcccctctgctattttgttaaaggtaaaaaagtactaaaatctgtcagcttttcaagctatagtttattatagctaagtgagaatcatatgtcaccttagaaagaaatatagacctgataacatttaaatgaatccgttcctcattgtctcatattaagatttctgagatgaattcccaagggaaagttttatgaattatgtaaaatatattatttgtggctgaaataagttcctggatgagaaagatgaaggcctattaaccattaaccttggggagaaaaaaggaagtccctgacatgatgagaaataaagtcctggggcttgcccactgcagcataaacccagggcccttgcctcaggtggggcccaggtagcagaggatgccgtccccacaagaggatgcctcttttgatctgcagttttgcctgattggacagagtctagacagtggtagataattccctttcagtggttaatgtcagtgcatttattagtccttcatactaaacaaatcaaagatccactagtctcaaggtcagatctttcagtgagtgaggctatctgaactatttctttaaaaatccgtggacaacttgtatccagatttgctttctgtagagcagcactgcatttactccaaacagcagtaggctcttcctaactcagtgactttcaacagtgccttcttctcttggatatgcagctgtcacagtggtggtcttgtgctgtttaatacaagtacaaaatccccttattccatttctttatttggtgagagttaagaaggatatcttttctagctgtaatggctcatttgtagttctctttgaagacygataatgggcttaccgcctcttctcgcccaggctgctttaatttgtgtagctaataaccccgggcktcttcctctcgtttctctcacttggtttttgatttgcatcagactscctgagcccatgtcctatttggaggaaagctgagggaaatgcataaataatgtctaaaataaacttgtaaagtcaagtatcagttacattgaagatctaggggtgatcttgggcacctaggttgaactttgaaaaaaattctgtaggatccttgggagagggggctctgctgagcagcagaggaaggcagtgggaagaggcactggatagggaggcttctctaggaggcccagcagaacacctttgatttagtgcaaaaggcaaagtcagctgatggtcttggaaggaagtgtaacatgaagagggcattaaaaggactgtcctctctttagaggagggagggaaaaggggggctggggagggagasagcagatggtaaggctttgtgatgtttccgctttccctaaaaactctcatatcgtggtgcccaggaatctgccatccattcctttctgccattaaactcaaaccaacatatacatattttagaccatttaaattccgccctcttacagcacgtattataattgctcagttaatttggcattaaggtatccgaaaatgtcaactgtgtacatacaatctttgttgggtgtttggctcttttccttgagagcaaatacaagagccatccgtccaaccaaagctttagaatcagtttctgtttgctgaaaaatctggtttttatttgtttaggtcctaacgccagccccgatggtctcattcygtggacgaggttttgtaaggtgaggactgtctgggttttatgctctctaagtcctttttgctcttggttgaggttctcatgtttcttgctgtgatagttacttaactgtttgcttattttggcgtgttcttctctggccaaggagcccctcgggcaagttgtttacttttcttcagtgcaggaggttggtctccgagcaggagtctgacaggaagcacctgcctgagtgataacattctttcatatctgaaatgaggcttctgttcactcacgctggacccctgcccagcagtgttttagccatttctgtgtgaaatgtatgttgtgggctgggtggcgcagcctgaccagccagacgagtttaacggcctgctcgagcagaggggcccactgcggggaacatttagattctgctggagtcaccagacagtgcggaccagcttgcactgctggattttgctagtgtggggcagcttgtgtttccgtgagtcacgctggaggtcacccccaggctagcttgctactgtttggaaagggaagcagagcccggcccagggaagtggagagctctggagagctcctggtctgaatgctgataagagcggggagggaacttgatattccctgccaggggagggatcccattgctgtgctgaatgggacagttccatccttggcacctggggagtctttgcaaatgatggtgggaggggccatggtaagtcattgttttagatttttgttcataatgtctgcatttgtatactttcaggaaaatataaatgataaaaattttcccttctggctttggattgaaagcatcctagaactcattaaaaaacacctgctccctctctggaatgatgggtaagggccaccgatagatgtattttgaaacatatttttagtgctgcgaggttgagacaaggcctgagtccagcttcagtatttgactaggcgtgtgtgaatctcacaggagtgcgcatttataggctgccccttcagggcttcagaagagtagaacctcataacattaaccttacactttcttagtacaagtatatgtattggcaaagctaaattaaaaaaaaaaaacaactcttgagtgccattcatgcattcattcactcaacaaaaattttttgagcacctactatgtggcccctaggaaggaagaaaaacccttttaactgggtaaatcatttctatcttgacttattgccaggatcggctgatatttcaacagaagctttaacttgatcagaagggctaaaatatgaaaatatattgcctaggtcttcctctccagtaaaaaagatgtatacattcagacattgttatggcctttaaaataataaaggaacaataaaaggctcattaatcccacacgtgttattgagcatctgtagcatcctactgacaccatgttcatatcgctttttttaaaaccttagtatatacatgtataagtgaaatgcttccttaagtgtcaactgaacagattttaaaatagtctacgttttttaccgtaggtyttttttctcacattccagccattttcttggtttgtaagttagcatgaaaatggaaatcatgattgaactaaaagcccatccgtccatctcttcgatatccaggtgcatcatgggcttcatcagcaaggagcgagagcgtgccctgttgaaggaccagcagccggggaccttccygctgcggttcagtgagagctcccgggaaggggccatcacattcacatgggtggagcggtcccagaacggaggcggtgagtgggagtttgagcacatagtcccaccattccatgtgtgtgaagtccctcttcatcgccgccagtcagctcatacagatagtgcgtttgggacatgaaattgcagatcttatacttaccccaaatgagccccygataggatttaataaaccaccacaaatgtttgtggttgtggttcactctctggaacatattgtggaaatgatggttttgaaaagacaatgccaattctttcctttgcatcaggtttgttatctgcagatcaaggatgtgagtcaatgtaatctgcaacccgttcttggaaggaatcacatttcccacaggagtaagcatccacattctcttagggtcatcccagagtagagtgtgcagatgagacaggcttcgggagaagacttcatacacatcatcagccagggagttgatgcaggacctgttgggacgagtggcagcctctaccctgccttcaaacagagcagctgcaaatttatctttatcatatatggggtttctatttaatcaaatgagtccatggctaaaagactccagaaaccttggtgttatgaagcaggtttctgagggtgaagctcaacagcgtaaatgaaaaaatcataaagaccaactgattacttttcactgttgtttagagtttggtctgtttgaagggcaggaggaaaaactgatttgttttagtaatttttatactttcagtgggtagacacaaaatggaatactcttcttgttctatttatttttctgaaatattcctcttctcctgtttttctggaatactcttattctatttgtttttctgccatactcttcttgttctgtttgtttttctggaatactcttctattttttttttctggaacggtattctttcttgttctgtttatttttcaggaatactcttcttgttctatttgtttttctggaatacttttcttgttctatttttcttctgaggaaaaagcagggaggctgagatgagagtctggcgtgggcagtagtcattagaacctgcccttttcctcttatcctgttcccttcctgaaccagctgagagacagatatagtagaccaagcagagatgaagaaaacccttggcaaccaggaaaggtcaagcaggacactaccagccaggaagggttaggatggcagcatagtctcatgttccacagcaggctccccagaacacctgaaccgtggcctctggaaggtcgacacccaaagggagattctgtatcagctaggaagaaggatctgaattcagtctgggaataagaacgggagtaaattaaaccatggtttattacgttaagggttacagggaaatgtagcaaataggatcatttttaatttgaaatgttgttttctatatatcataatttattttaataaaaaattagatttttcaatatgaaaagaaaaacaaagtgagtttatctctagtaatttaaatctgtggcttaagccaagatgatccacttagtagtaagttatttatgtgcctatgggcagcacatcattgaagatgcaggcttttaaaggtttttaataaatcttttttgcccagatttataaatctaagcaaataatggcaaatagaatgttattgagaataatacctccctttattttccctgagacagtattataatttatttagaaataaagcagtctactgtatatgttacaatgcttagattgtgattagttcttatgaggttcactcaaatccatcaactctgcagtgttttatttctctgtcctctttcattttgggatgttctatgggatttacttagcttttctcytttttagaacctgacttccatgcggttgaaccctacacgaagaaagaactttctgctgttactttccctgacatcattcgcaattacaaagtcatggctgctgagaatattcctgagaatcccctgaagtatctgtatccaaatattgacaargaccatgcctttggaaagtattactccaggccaaaggaaggtaagtggggcaagcaggtggtaacagcgtggcacagtctttcctgatgagggggtgattattctgaaactccacccatgcagtgttttgctttcgaattggtaagagtaggctttcaaaagatggcataaactcagtgcaggtgaaacataatgcattatttggcctgatacagctagtaagaaatgaatggacaatttcctattttaggaatgttggaaaagtccattgctggtcttgtgtatttgttactatcactgtttccacatgaaaagggtttaaataaggaactgtggtaaaccaacagaaggcatcttgctcacgttaaagttgaggaaactgaggcctgggagaagtgaagtggttcatttagggtggcccaattacttactagatcctatttttattagataattattaagaggaggcctcatctgagaacacaggtctcttgcttctcagttgtcaatgaattgcatttgagaaggttcgaattagacctgttttgtttggaacacaccaacaaagctgtttttcagaatcagaaatctcaatattaggacaattactttggaatgaagatgtccccagcttaccttgacagctgtgaatattcattagccaggctaatgccaataaactggatagaactttgcatattttgggctcagacttcttgtaagatttcaagttgtgtaaagagaaagctcctagctagtgtcctgctgaacactagcttatttccagactgaattcagatccttcttctcgttgtttctgcattcccactagaattttaggtgactcaggcagggaggttatagctccttaaagttttaggaggctaagctgtctasaaacacagtagaactttaatccccccgaaaagttgatgttgtattctgatggaatttcggttgatggaaagcgtacacaatgtgtttatttctagcaccagagccaatggaacttgatggccctaaaggaactggatatatcaagactgagtygatttctgtgtctgaagtgtaagtgaacacagaagagtgacatgtttacaaacctcaagccagscttgctcctggctggggcctgttgaagatgcttgtattttacttttccattgkaattgctatcgccatcacagctgaacttgttgagatccccgtgttactgcctatcagcattttactactttaaaaaaaaaaaaaaagccaaaaaccaaatttgtatttaaggtatataaattttcccaaaactgataccctttgaaaaagtataaataaaatgagcaaaagttgatcagagtgggaaagtagttcttttcaatctagaaaaggccaaagtaatgattgagatacactgtctccacttgctttgattttgttgtttcattttataaaaggtaraaaaaattttggaaatgtcattgtcagttatttggcctgcagcactgtcttggggtgaatggatgtagccttcatgtaaaaacactgtgtggagcagctttatctgcattcaaacctcaaggtagggatgagggactccccagacatttctctggtgcttttctgtccagggtaagccacraggcattgtcatctcagggtagtgcaccgcacatgctcacacctaggcttacccaggcagaagcggcacagattccagtctggctattgcttatcacatccctggagtgtgaaacatttcccaaggggctgggctggggacatgagcctcccatgagctgtacttttgcaaatgtattttacaagtgtatgcacttacccaaaataaaaatataacgtgataattcaattacagacaaaagataaagtgtgtaagtatgcactagtgctttcatcactcagatgttgacattgctcttttctttttccccattttagkcacccttctagacttcagaccacagacaacctgctccccatgtctcctgaggagtttgacgaggtgtctcggatagtgggctctgtagaattcgacagtatggtgagtaccacggctggcctgtgtgtagctctcaataagtgtgtgtgctcagaggcagggagcgcaccatggcagatcccgggcctgtctgygggakggagccctggcggagccaaggagagtgcagtgctcagatgagccatgacaagttggagctgctggatttaaaccacctacatcatcagtgggatttttattcctcgcattcagcaccttccaaaaaacaagtgacatttctaatattcaggtttcctcctctcccctttaaagttgtccatgtagaaatttcatatattaaggaactaagatttctttgataagcaaatgtttttcttcggaatgcgatttcatcactgtgtctaggggagggagtgttatttttagaaagggagggactaacgcttggtagttacagtaattagagagaattatactttagcagcaatgagattacttcatctgccttatatttgagagctaatttgtacaagtagctcctggggctgtgaagggcttgccaagagtaaaaggttcaaggagtgaaatagttaatgagattcgtgatagaaatgggaatatgattgtccacaaaagggaacatcttccttttggagggtgcttttttagtatatcaactagtattgtttgcctttcagcctaaaatccttcctcttaaagattgtgcttgcttggctggatttttgctgatgctgtttaattttaagctcttttccacatggagctattccagctcatttttaaaaatttatttaatgcttccaaaaaatatcctgagttattactggcctttcttccttactgtatacccggtgcctggcaaaaagtaggtgctcaacaaagagaggaaggcagggaggggaaaggtgagcgagaatgagagggcgtcactcttcagacatttggggaatgcgatgataaggcctcagtaagatctgcctggattcaggtttctcatgtgtaattttttgacttttttcctcaccttaagcacgggctacaatcattagagattgtaccttcctacactttcctgattgttgttgacgaaataggccatttagaaaaacagttagctattgtggcagcgaaatagtttcattcctattggcaagtgtaaaatgaaccttttctgcatgtaagaaggatcctgctagagtttcgctcccaacactgctataggcctggcacaaaaatggaataaatataaagccctattcagaaaatatgttacatcacaggaactgtaaaatggggggattttttatacctcctttgttgttcctgagcaaattacatcatcatcaccaccaccattaataggtgacattaarcacctacagtataccatgtacttcacaggtagtaactcattcagtcctcacagccaccttctgagttaggtgttattgttattcctactttgacagatgtgggaacagagcccctcctccccacacagccccttttatgtaacttgactaagatcaagcagttagtaaatggtagaaagaatatttgaatctacctagtgagtctctagtgcatgcttttgtccggtatcctggaaagcctcccacaaaaagctaatctttgccccattcaaaacatgcaccctgaagaagctgtttgtacaggattgggtttattctgttattaagacaaaggcatcatggcctttgggtgagaggcccgtatgtgtttgggatttggcaatcagcattccatctctgtcatcaccattattgagaaaatagatggattggttccctctctgcagtcctgtggagcagttggactgctctctctgctctcaggatgatactgtgagaacaatttaaatatgctaagcacatgtcaggaaacagttttgtggtctttggacactcgctgtagccattccgttccatttcaggtgattttattcatttcatttgtagaataaaataaatccatttcacacacacacacacacacacacacacacacacacaccctctatacaccactaaagcctcccattaaacccatagaagacttaaagagctaaaagaggctataatataaaaaaaaaaaaagaaaagaaaagaaaaagagttcataatataggcacggcactggttagacaacggttgaatcagtctctaaattgggttgacttcacaatggtttgctgtcctgccccttggccatgacttccatccagcatctactcttagaatcagagtgtatactctgaaacagaagcagctctccccaagctggctgtcttctgccaagtctggaggttgcagctctgaaagagggtggtaccaggggccaacgcctggtgcagcctcaggagcaacaggaccataggctcctgaggaaattgtccaagagagccagagcaccagtgttctctgcagtatgacttgggcatttgtttagtctggatttcctgtgtaatcagtgttttcctctgggactgtaatagaaccagtctactctccaagaggcctttagccaaagctcataatgataggactagctattaattgtctactactttctgtctactatactaaacattttacgtatgccatctaatttaacaagcctatctgctaggtactattaatccccttttgatagatgaagactttgagatttagagaggttaagccacttgccctggtcacgcagtgacaggatctgaatctgggcttcctctcttcctctatctatctatctccccctccctccctctctttacccccacggtccaccctattaagcacacatttgaaacatcagccaggccgggcgcggtggctcacgcctgtaatctcaacattttgggaggccrgggcaggtggatcacctgagatcaggagtttgagaccagcctggccaacacggtgaaaccccatctctactaaaaatacaaaaattagccagccatggtggtgtgtgcctgtaatcccagctactagcggggctgaagcaggaggatcgcttgaacctggaaggtggaggttgcagtgagccaagatggtgccactgcactccagtctgggcaacagaggaagactccgtctccaatttgaaaaaaaaaaagaaagaaagaaagaaaagagaaacataagctagactgaaacataggggcaacactttcactgtgcttttcaatccaaaataattttcctaagagcccactatgtaccacacactattgagcacttgggattaaaaaaaagttctccagaggctttccagtctagtgccatgtgtctcagtcttggtgctactggtattcggggcttcagaattatttgttggggattggtggggtggggagctttcctgtgcttcgtaggaggttcagcaacacctctggcttctaccaaatagataccagtaagcacatgcaccctcacagccagatgggacaatcagcaatgtcttcagccattgccaggggacagaatcatcctcgattgaaagcatctggtctaaggggaaagaccagtgtggaagtcagacaggaagtcactggcaggctagtatcctttggatgaacagtttacttactataagttgtcctggtcaaggcagctgggcagaaggcactggtggggagggtgaaggggttcttagtaattctgcttctttagtctgtacctgaaacacagtcattgattttacccactgagtggcctttaggggaagtgtatcatttccctctccttcctctctccctctggcatatggctcagcatttcctcacccgtttcacatgagcagatttgacacgttgctctgtccccagacttgcataacagcaaaaagctttatgcagtctggatggattcacaaaattaagccagtgggcagcagagtaataatccgtcagcttaggtgatataaaaggtcttgattagcccaggataatacatagtacmtgctgaaggccctcttattccayggtatttatttgccattgcaagtatcttcctactacttcattctagaatagacaagcaatgtttaatgtatgagtctgcatttcacaagatcagtgtaataaacttaaccacattttgtctttttacagatgaacacagtatagagcatgaatttttttcatcttctctggcgacagttttccttctcatctgtgattccctcctgctactctgttccttcacatcctgtgtttctagggaaatgaaagaaaggccagcaaattcgctgcaacctgttgatagcaagtgaatttttctctaactcagaaacatcagttactctgaagggcatcatgcatcttactgaaggtaaaattgaaaggcattctctgaagagtgggtttcacaagtgaaaaacatccagatacacccaaagtatcaggacgagaatgagggtcctttgggaaaggagaagttaagcaacatctagcaaatgttatgcataaagtcagtgcccaactgttataggttgttggataaatcagtggttatttagggaactgcttgacgtaggaacggtaaatttctgtgggagaattcttacatgttttctttgctttaagtgtaactggcagttttccattggtttacctgtgaaatagttcaaagccaagtttatatacaattatatcagtcctctttcaaaggtagccatcatggatctggtagggggaaaatgtgtattttattacatctttcacattggctatttaaagacaaagacaaattctgtttcttgagaagagaatattagctttactgtttgttatggcttaatgacactagctaatatcaatagaaggatgtacatttccaaattcacaagttgtgtttgatatccaaagctgaatacattctgctttcatcttggtcacatacaattatttttacagttctcccaagggagttaggctattcacaaccactcattcaaaagttgaaattaaccatagatgtagataaactcagaaatttaattcatgtttcttaaatgggctactttgtcctttttgttattagggtggtatttagtctattagccacaaaattgggaaaggagtagaaaaagcagtaactgacaacttgaataatacaccagagataatatgagaatcagatcatttcaaaactcatttcctatgtaactgcattgagaactgcatatgtttcgctgatatatgtgtttttcacatttgcgaatggttccattctctctcctgtactttttccagacacttttttgagtggatgatgtttcgtgaagtatactgtatttttacctttttccttccttatcactgacacaaaaagtagattaagagatgggtttgacaaggttcttcccttttacatactgctgtctatgtggctgtatcttgtttttccactactgctaccacaactatattatcatgcaaatgctgtattcttctttggtggagataaagatttcttgagttttgttttaaaattaaagctaaagtatctgtattgcattaaatrtaatatgcacacagtgctttccgtggcactgcatacaatctgaggcctcctctctcagtttttatatagatggcgagaacctaagtttcagttgattttacaattgaaatgactaaaaaacaaagaagacaacattaaaacaatattgtttctaattgctgaggtttagctgtcagttctttttgccctttgggaattcggcatggtttcattttactgcactagccaagagactttacttttaagaagtattaaaattctaaaattctattaatctctcattaatagtatttaatataaagattcttaaaattactgacgttatgaattggtttgatgcttttctcatgtacctcaatccttattttaaaataagatcaataacactattttcctaaatgttgtccttacctgccctacacatattcagaattgctatggcagattaagacatgtcaatggaagaggtcagaggagtaatattattggaaacagctgtaataggtgccataaaaagcaaacaaacaaaagtattttggttctttgcgaccacagctgtccccaaatatacagatgattcagcacttattttaaaatgaatctgggtattgctaatacccccaaattagcagtttttaattttaaaatacatgagaaatgggactttgtcttgtctccaaagcagtcatctaaaatctacacccccacgattagatgagttattactgagaagttattgcacccacaaaaaagctgccatttttttccaaagatgtcaaaagctagaaggccaggtcttctcaaagtaaaatacactgtgtattggggaaaaaagggtaagaggcataattaccaagttaggcatagtctgtcaagttgtatttagctattatcatggaatagtgttattccctgataatgaatgttggcatcataaccagaatgattattctcatctccatatcttcgtatttacatctaggaaatataaagcttatttatagtgaacactgagagtggtctctctccaaggagtaaagtaaatatgccctggctaactagtgtaagtttgtattctacataattaaccattataagaagtcactgagtagatcctaacttaagggatatttgtttgtgtttgagtatttctcgtgtggtgtttctaagtttgaaaagtgttttataagcatagagcttatgtgtgctactggggacaaatgtctcattttaaaggaaagagggttttctgagatggcatgaaatgagtgaaatctatttattgcctgaaagctaaagtggaatatgaaggcaagtctttctgaacagagcagtcctgtcactgactaacccagggaaaggacaggaaaaagctagaaagtgttttgaaaactcttctgcttaccttttgaattgggacattaacaaagtaaggaccatttatgtgactggcttcctttggttagttatgattcattcattaattaattcatcagatttatatagagcacctgccatgagccaggcattatactaggtgtttgggaaacattggtaaacaaaagcaaagatccctgcttttatggaacttaagatattctgagacactggatcatacattctagtgcagtcaccttattaaaacttaagattttgtgatgcaaacaaacagccagaagctacaaataatgtaaatgttatatttaaaaaatacaatttcaaagaaatgacatttaaaccagttttaggaaagctgaagacaatactgcttttagagctttttaagatcagtttatattgctcttaaatgataatcctcagcttccaagtttttgtgaactcactttggtttatgtgtttgctacactcactgagaaattaaacaccttgcttgatttattgtaaaaaggaaaaaacaacagagccatacttaagcagtcttaaacttatttattaacgttatcttgagtctacagagaacagaaagctatctaagaggtagaaagctgtcaaatacctattatcaaactctgaattctcctataatatttcataaagctattataacaccttaataccttactgtcagtgtctgtttgcagcctttccacatttcttctacataattgaaacagtcttgatattcttttgccattgggactgcttgtcagacacacttcattgcagccttttattggctatttggaaaggaagcaaggggtacagtgggggcgcacacaggcctggagtctggttcattctccagaatagaaataaaaccccccagtctctgcctttaatgccttccatccagttgttttgctgtatctcatgcctcctttttaaaaaactgccttaattttctaatctttctcatccccaaacacatataatctagtgaatcacatcatttccttgcataactataaaagattatcctttcccaaaaagcctttttataagtgccacctaacacattcatgggctgcttccctgggccatctggtatatgatttatgaatttactcattttactatgaggattattagcaagtaaaattaggaaggttatcccaactcctaaaaaagttatacaaaaataaaatgatcttgtatcaagaataaaaataactattcactatttaggattattcacacatttgttgtgcctgcactgatatcctgctcctatccatggatgtgtgtgtgtgtgtgtgtgtgtgtgtgtgtgtatatatatatgtgtatatgtgtatatatatatatatatgtgtatatgtgtatatatatatatgtatatatatagctgaagttgactatatgttgcaggactttctgttgtagcacttaggcctctgcctaaaactcagcagagaagaggccttagctaataggagatagtgcatatgaataagctaatatgtatattctatccatactgggcataatcagtgttgtaggacgtagaacaacagcgcaggactaagagttctgtatcacagcccactcttgggtctcagcttcatctataaaagaagagtgagttagattagagaatttctgatgtctcttctaatcattgtggtaaccccacttgtcaccttgcatagtacctggctcatcacagttctacaatgccagtaatgcagtgactcttctagccaagtaacttactttgtgacagataactttgataaatgaaaatgtaacagtcatggtgttcatgtactttctctatggttggaaaactatacactaacccctggcctgaaaggaaagagtgctctgaagaccagggatttctggcattggaagcgaatgctattcccacgcagaataaattaggagctgaggtgtactggctggtgacactcagattctagtgtggcagtactagcttcaactctctaaataaatttcaaggctttgtgaaaataacctctcttctcattcaagggtatgtttactggttccattcaacaaatatttactgagcacttcctaactgtaaaaggatagtgtttgcatctagaggactagagacatgcctgcacatccctcaccttcaaaggtgaactctacacaggattcttgtcctagtcattgtggcaaccccatctgacaccttgtgtagtacctagctttatagcaggcattagaaatggattggaacctaaccagagatggtctgtatgctcagtggagttcctggctcttaattgttttaagaaaattcattttttccacacagttttttttttgatacatatatttattatgctgtaaaaagcaacactacctgattgcatttaaaataaatgtttcccaatttcagaatacttacaacttgtagttttaagattagattcactttgggaggttttagaagcaaatacattcatagctgtgtaatccccaggaagaatctaaatctgacatcaggtcattcagtccctgccagacagacaacagcatcaaatggtcaacagctaatccagctctgcagctaaagggcagtgtcgggcagcagtggggtatagcatattaccaaagatgagaccagcaaaaacaacaatgtgtataaagctttaaattaacatgatcatatagagcgctcaggatacagaaaaagcacatatgatactaaagccaaaacaaaaagatctttggagtttactgacggcagcagttaatagcacagtcaacagcatttaaatcaaatatattattaccagccaacagcaaacagcccgagcaggaatcggcacatagtcataaataacatcaggggtaaataacggcacatttaattaaacaacaaagattttacagaatggttttgatctgaaaaaagatgaaaactctctttgttcccaaataatggttagaacctctttttattatagaaaagcctcaaaatcattggtaatcttcaagtcacacaattcaactgtcttgtttcattttagtcacacaaagcgggctgctctttgaataaagttatcttgattgatttcagttaaaacgtgtctaccctgtaatatctttggggataatgctgctcctgtgcagcatcttacaaatgctacctgtctccatggcttgctagatccacggggtaggaaactgctcactcagcatcctccccatggaagctcaagcatgggaacagcttcgggcctggtgcagctaaggaacattggccgtggtttcaccaaaggaggtgccatctaggtaatgggagggcagtggcaggagccactggcttagactggaagtgaaaatgaaagcacctggaggctgctggagtaaggtgccatcaggcatgtaaagtttagaagcagcagagtgtgctcatagaaaaagaaaaaaaaaggaatttgctgtatgtgataacaactaacattcatgtacttgagctcatttcactaaacacagcttcagagaagtccatttgtgtgcatgtgtgtgtgtgcttaatatcagaactcctcactaacatgccactttatctcgaggtatgacaggataaaatgtatgtgtaactcctagaaaatcctgttctatccgttttttgaagccccttttacccactttccaaatgaatcctgaattaccaacccaagacaaagaattataggtcacaatttaaaatgaaatggcctttttcttattattaaactacagagcccaccaagaattacacaatagaaaaatcacaagaaatctggaatgatccagtggtcccccaaggaggacaaatctcttgatgcagactcttaatgacaggcttggaaacaaatgtttgttagttgtagcagttcccatactttcagaataactttggtagcttagagcatttctgaatttatctttaccctagaagctaaaaaaaaaaaacttcttaaagagctgcagttgcacatcccttcgctttttagactgataaacttgactaatttatacttagtaattttgtctctggttcgtcttctgtagacaaatggcaaagttctgatgccagaaataggaggcattttctgacttactatggaaaacataaaaactgcatagtatgccagctctcactttcccagctaaaggaaagaggcagatagctaaatgtctgagaagagaggctggactaaggggatatagaaaaaggaaaatttttcaaaagcattataactacattcacacatacgttttggtcaccaaacatatcttaaacagattccctgataaagtctaatcagaattggtctatcttactaacagttgttaactattatagttttttaagagtcacatcatgaagctagggtgagagagagacattttaaacacacaaccgtaagtgcatatagttgttcaaacacttaaactaaatttgtatttgaagtcttgaaaatcacactatttgcttctaaaggcaaccttgacccatttggacagactgtacaacagagcttactttataaatgcatatcagcagatcatcaccataaattgaaaattcacaaaacacaaataaatcatggaagaccacacaagctagcattggtaactatttcttttacatcaaattatacaatgcacgaggtaatattgctcacattatggagggagattgttttatttctattttttcccaaagagatcagatttgtcctgtgtgcacaatgaagaaaactccagtaacactgaaatgacaaatgtaaaatatacatcactaccagatagaaatacacatgttcttcataatcattttccacaattaaataggtaagtgatttaaatcttgggatttgagaccattacaacaatccatcaagat

SEQ ID NO: 97844 - DNA, 23452 bp, Homo sapiens
atcatggggcattaaacaacagaagcaacaaaattcatgtgcatacaacataagagtaccttttaaaaggtatgtagtgggagaagaaaaagcattttatagatacagaaaacatcattctgtaacttagaaacatacataggaaacagaaacagtttttaaaaacctacacaaaaagccacagtattactacattagaaaagttgcttttcagaggaatgggagtgagatggcgataagaggaaataaaaaacaaaaatatttttaaatagcaaaataacccctttttttttgagacagtttccctctgtcactcaggctggagtgtagtggcgcgatcctggctcactgcaacctttgcctcccgggttcaagcattcttctgcctcaacctcttgagtagctgcagttacaggtgcgcactaccatacctggctaatttttgtgtttttagtagagacggggttttgtcatgttggccaggctggtcttgaactcctgacctcaagtaatctgcccgcctcagcctcccaaagtgctgggattacaggtgtgagccaccgtgcccagccaaaacatgtttttgaagagtagttgataaagagtagatgataaaaaggaagatgcttaactgtgtaactaaatgaaaacataatatgggtatgtatatagtatgatctcagttatgtaaaaaactatgcacaaaaaaacctaaaaagaaaaatatcaggatgtatttctagaaggtgggattatctgttgttaaaaatttttgatattctattttctaaattgagtttttatcgcttttgtataagagaacctaaagggtaaagagttttaaaaatgaggacattgaaaaagggaaagaaaaaagttacaaggcaaagttaaactacttgggtgtgggaatgagctgtccatgaagttcttcataggttcttattaccatctgaaacaatgagaggtgagctgagaggccagtcagaagtgagtaaagtgagttatcagtcgaactcccgtttcctcttatcccttgtccagctcttagaacaagctctggtgattgaggaacagctgcgccgggctgcttacttgaacatgtcagaagacccttctcacccttccatggccctcaacacccgctttgctgaggtggagtgtttggcggaaagtcatcagcacctgtccaaggagtcaatggcaggaaacaagccagccaatgcagtcctgcacaaaggtagccagtggctcccctgcctcctgccgattcggcctccctgatctgactgcatcctaatgtacatatatttgttttcaaactttcagagctcctttgtctgggagtttaggaggtgctagggatctttgccatccttgggaggttagtatcttagaggcaatcaaggacagtagttctttgcctttttttttttttaaagagatggactcctggccgggcgcggtggctcacgcctctaatcccagcactttgggaggccaaggcaggtggatcacgaggtcaggagttcgagaccagcctggccaacatggtgaaaccccgtctctactaaaaatagaaaaattagctgggcatgtggcgcaacgcacgcttataatcctagctactcaggaggctgaggcaggagaatcgcttggaacccgggaggcggagtttgcagtgagccaagattgtgccattgcacaggctatcagcctgggcaacatagtgagactccagaaaaaaaagagatgggctctcaccattttgcccaggtgggtcttgaactcctggattcaagtgatcctccggcctcagcctcctgagtagctgggactacaaatatgtgccactgtacctggccacctcttttttttttttttttctgagatagagtctagctctgttgcccaggctggagtgcagtggtgtgatcttggcccaccacaacctctgcctcctgggttcaagcaattctcctgcctcagcctcccgagtagctgggactacaggcatgcgccaccacttgtggctaatttttgtatttttagtagagatggagtttcaccatgttggcaaggctggtctcaaactgacttcaagtgatccacccgcctccgcctcccaaagtgctgggattataggtgtgagccactgtgctccgccctggccaccttttttttttggaggtggaattttgctcttgttgcccaggctggggtgcaatggcgtgatctcggctcactgcaacctccgcctcctgtgttcaggtgattctcctgcctcagcctcctgagtagctgggactacaggcatgcccggctaattttgggtttttttgtttgttttttgagatggagttttgctcttgttgcccaggctggagagcaatggcgcgatctcagttcaccacaatctccgcctcccgggttcaagcgattctcctgcctcagcttcccaagttgctgggattacaggcgcctgccaccatgcccagctaattttttgtatttttagtagagatggggtttcaccatgttggccaggctggtcttgaactcctgatctcaggtgatccaccgcctctgcctcccaaagtgctgggattataggcatgagccactgcgccccagctaattttgtatttttagtagagatggggtttctccatgttggttagcctagtcttgtactcccgacctcaggtgacccgcctgccttggcctcccaaagtgctgggattacaggtgtgagccactgcacccggccacctcttttaactttaaacatattcaggttcttgagatggaaagcaaagcagaataatacagtgtcatttgcgatactttagaggtaacttcaggtgataaaagatcccttcaaattctagacccctttcaacattttgtttctaattaaagtaaaaggttatgaggaggcggagggtgaaataaggaaaagaatgctgttataatggaggtggggagacagattctgaaggtagagaagagaaaaaacgaataagctcaagaagaggaaatacaataatagtaagggatagtgaaggtttaggtgactttaaaaagcacaaaatcatggacagttggaactggaatatgaggagtaggaatttgaacatggtggaggtcaggtcagatgacagaagacaatacatcacagttacttggtcactgagaagtgatggggggctggtccactagggtagagggagctcagtctgggccaccacagctcaccacctctttttctccctatgcagttctgaaacagctggaagaactgctgagtgacatgaaagctgatgtgactcgactcccagctaccattgcccgaattcccccagttgctgtgaggttacagatgtcagagcgtaacattctcagccgcctggcaaaccgggcacccgaacctaccccacagcaggtaggaccattttcttcttgacaccacctcttcctgcagaaccattctggagcttgtaactttgctgtatgtccctagctttacatactgggtgggtggcctatcagtgaattcccttgagattgggtggattcctatcatctggaattctgactcctcgggtctccttctctaggtagcccagcagcagtgaagatgcagactgataccacctccaccgctgagcagtgaccttcctcactttctcttgtcccagcttctcccctgggggcctgagagaccctcaccttccttctgcccatcttccatgttgtaaaggaacagccccagtgcactgggggaggggagggagtgaggggcagtggtgcccttcctgcagaagagacatgcagcagtagcgctggcgccatctgcaggagctggcgggctggccttctggaccctggcttctccccactgtaacgcctgttacacacaaactgttgtgggttcctgccaggcttgaagaaaatgatctgaattttttcctccttttggttttattttgttggtttattttgtgttttcttttctcctttttggggggtattcagagtgggctgggcccctgggcgagacacagctacctctgttggcatctttttaataccaggaacccagcggctctagccactgagcggctaaatgaaataaagtggaaaaaaaaaaaaaggaaaaaaccaaaagcataaaaaaccacagcaaatttcttgatgaaaattgaaaataaaagtttccttgtattttagtgctctggttcagtgtgggtgtaggtgcaggtggatgagtgtgtgcggcaggagcctggcacctgtatagttgaaaattaagggctacgtggtgtcctgataccccactgagtaactgggttctgtgtgtgggtgcagtatgtgccttgccaacgttgacttccacctgtggaaaatgagaggctgcaaaactgcgggcaccgccgcttaatggctctgtgaccttgagcaagttgtttaactttggtgggatgcagatatctcatgtatacctcatacggttgtcaagttaaaccagtgaagtacatggaacggttttaacacctaaccactaccttaatgttagtttctaggaaggctgaggggggttttcttgctaagttgtgcaaaattgggatgcaatttgtggaagaacacagcctcaatcccacacccccggaggcccgacctaacgtcctccaaccttgaaacccttgtagttcaccccttctcatgtcccagaccaggtcagccttgcaacccgttgtttcccaactaattgtagacccacctgaaagcgagttccggcgaagaggccccctgcgaatgaggtgcagtgcagcaccttaattgaggggctgagcaggggtcagcatcaaggaaggtgctgggagggcggggcacggtggctcacagcctgtaatctcagcacaaaggtgggggcaggaggatcgcttaagcccaggagttctagaccagccctggcaatatagtgagacgccaccccctacaacccgtctctataaaaagatttttaaaaaaggggcaaagaggaggaggtaagtggcatggaattccacggttttttttgtttgtttgttttgagatggagtctcgctttgttgccaggctggagtacagtggcgcgatctcagctcactgcaacctccccctcccgggttcaagcgattctcctgcctcagcctcccgagtagctgggactacacgcgtgcgccagccaccatgcccaactaatttttgtatttttaatagagacaaggttggccaagatggtctcggatttcttgacctcgtgatccgcccgcctcgacctcccaaagtgctgggattacaggcgtgagccaccgagcccggctggtttttttgttttttttttttgaggtggagtttcgctcttggtgaggcttaagtggcacgatctcggcttactgcaacctccgcctcccgggctcaagcaattctgcctcagcctctcgagtagctgggattataggcgcccgccaccacgcccggctaattttgtatttttagtagaagcagggtttcaccatattggccaggctggtctcgaactcctgacctcaagtgatccacccacctcagcctcccaaagtgctgggattacaggcgtgagccactgcgcccagcctggaattccgtgatcttgacgctggactagggcagtggatgcgagggagagggctccaatgtcgggccctggttcgaggagaaggtgcggctttcacccaacagaaaccggccgtgaggctaaaagccaactccatgagggaaggtcggtcaagctcaatggtttcgtcacattgctccctccacccgccgcgggtgtaagctgcgcgtctccttcgaattgccccctactcgccgccgccggctccgctggcgttcccagggcgagcgtaagttccgggtgcggcggccgactaggcgcaacaggaagaggcggggccgcgaggctagcgctacccgtgcgcctgcgtggaacgattctgtggcgagtgccggccgaaagctaggtccggattgcacgtggagggccgcccgaagggcactctcggacattaacycgcattctggtgggtctagaggaaattgggggacgaagagtggcagcactgacctggtctgggacgtggggagaagggtgcgctacctgggtttcaggtgggagggcgttcggtcgggcctccagggggatagcgggggtgcttgagtcgcgggtgctgagtcgggagtgctgagtgagttgcgkgtgctgagttgaggctgtgccctttcccactataatacgccaagcgtgcgttctgccgttccctccgacacgcgcgacgccaccttctcccatttctgcctgccacagtaccatggggcgcaagttggaccctacgaaggagaagcgggggccaggccgaaaggcccggaagcagaagggtgccgagacagaactcgtcagattcttgcctgcaggtaaggattagttgtggcctcctgatccctcagcttttgcagtattctgtattataacctcttctcttttttagtttctgttcattttatatttaagtggaatcttctctgtatgagttactaggaggtatgaatgaaacagccgtttagattgtagggaactgtttaggtcgtagagatgtgaagacacggacacaactattattcatgcaagggaaaagtgtgatttaaaacaattgtgagttcagaggaagggggagcccatgcagaactgtaaaagtttttgttaagctgggttttgaaaaatgggtaacattgtagcaagaggaagtagtgaaggggaggggtcagtcactgatttgccttttggaaggggtggaaatggaaaagcacggatctggctgcttcatgccgagtagtagtatactgtgtggaagactggtgggaggtaacactggaccgggagtttgtgttgggcattggataaaggatgcagtttattgagatagtaggaagtcctgggcactgtattaaacttgttggtcatgttatatcgcttaatcatcttagagtcctgtgagagaggcactattaaggaaacactttgggaggccgaggcaggtggatcacctgaggtccagtgttcgagaccagcctggccaacatggtgaaaccctgtctttactaaaaatacaacaattagctgggtgtggtgatgggaggctgaggcaatagaatcgcttgaatctgggagaaggaggttgcagtgagttgagatcacgccattgcactccagcctggaagacaagagtgaaactccatttcaaaaaaaaaaaagaaacttgtatacagttattaaataataacagggctgagatttaaatggactccttttaattagtgtactaattctcttaccatgtttatttccgttcccatttatttttaatgtcccctgtaacttgttctgcctcgtttttcttttttaaacagtaagtgacgaaaattccaagaggctgtctagtcgtgctcgaaagaggtaagtgtgggtgtcaaaacttaagtaggttaaattggtactgctcatctttgaccacagagttaattctagrctctcacatttccctatggtggaaatggcagagcctggaagtatcttcccatttcttcactccttgaatctcttgtgtcttttcagggcagccaagaggagattgggctctgttgaagcccctaagacaaataagtctcctgaggccaaaccatygcctggaaagctaccaaaaggtccgtgaaactaagagctggatgctacatgaggagtccctttgggtcctgggtagggaagaactcgctaaacatttccggagtgaaaggaacagccaaaggacattctgaggggtagaaagtacaggctcccagggtgtggggccagggaatgtgtggctgccattagtccaggactcttcaaacccttagggatctctgcaggagctgtccagacagctggtaagaagggaccccagtccctatttaatgctcctcgaggcaagaagcgcccagcacctggyagtgatgaggaagaggaggaggaagactctgaagaagatggtatggtgaaccacggggacctctggggctccgaggacgatgctgatayggtagatgactatggagctgactccaactctgaggatgaggaggaaggtgaascggtragattcatctttttgggcattcatagaaggatccttgctatttagtttctttcccagattcttgagactgtttcttagtggcaaggataagcctgactagaggaaaggggtttttgtgctccatcactgtttccctactgccttatatcctcccagtgcactacaagtttgaaagagctgtaggatagagcatttaaaaaaatctagamggctgtcttggtgtaggtatgggaaggtggacaatggtgtgctccactgatgggcacagaaatgcactttttataaagcagttatctcagaactttgaaaaatttgttccttttggctgggtatggtgcctcacatctgtaatcccagcactttgggaggctgaggcaggaggattgcttgagcccaggaattggagaccagcttgggcaacatagggagatcccgtatctacaaaaaattaaaaaattggcytggcacagtggctcatgcctataatcctagcactttgggaggccaaggtgggcggatcacctgagctccggagttcgagaccagcctggacaatatggcgaaaccccatccctactaaaaatatgaaaattagctggtgtggtggtatatgcctgtaatcccagctacctgggaggctgaggcaggaaaattgcttgaacctgtgaggcggagatggcagtgagccgagatcatgccattgcactccagcctgggcaacaaagtgagactctgtctcaaaaaaaaaaaaagttaagttaaaaaatggtttaaaaattagctgggtgtggtggcgtacgcctgtagtcccagcttctcaggatgctgaagcgggaagatgactggagcttgggaggttgaggctgcagtgagctgtgatcttaccactgcactccagcttgggtgacagagtgagactgtctcaaaaaaaaaaaaaaaaaataactgcttccttttgacatagtaattccctattaaggaagatgatccaaaatgtcagcaaatagttctttactgaggtgcaggaagttattatacaattagtgtgtggatgtattattagaatcgtatagaataaaaagagaaggtccccatgtgcacccccttcctacatccccttgtatctacagggtcattattaggtttgcaggcaccatgtggatcataatgccaaaaactcaggaaacttccaaaatacacaatatgcttaagtaagttatggttcatgcatatgatgcagttacactggtcattatgtctatgaaaatgcctgtgatgtaactgaagtctaaaaagcaagaaacaaacttgaaaatggattatgtgaaaaatacagagtaagtaaaaaaaaaaaaaaaacgacaaaatgggccaggcacggtggctcacacctgtaatcccagcactttgggaggccgaggtgggcggatcacctgaggtcaggagttcaaaaccagcttggccatcatggtgaaaccccatctctgctaaaaatacaaaaaattagctgggcatggtggtgcgcgcctataatcccagctacttgggaggctgaggcaggagaatcatttgaacctgggaggcggaggttgcagtgagccaagacgcgccattgcactccagcctgggggacaagagcgagacttctctcaaaaaaaatatggcagaatggtagtcaagggccatttttgtccttctttatacatccaggtatttttcaagttttttttttttcttaatggaaaagtgaaaaacataatagtagaaagaaaaatgtaatgaaccctttaatttattacttaggttttttttttttttttttgagatgaagtctttctctgttgcccaggctggagtgcagtggctcggtcttggctcactgcaacctccacctcccgggttcaagcaattctcctgcctcagcttcccaagtagctgggatttacaggtgtgtgccaccatgccctcattacttagtttcaacagtgagcaatgctgcgcccatcttattttcatttctttgctcctctatttccttctgagagcaagtgttggatttttatttagcgaaaaaataagatatagagatagaactgctacaagggctgatggaagggcaggcctgtattaatagcccttgtctctcttcagttgctgcccattgaaagagctgctcggaagcagaaggcccgggaagctgctgctgggtgagttttggaagctattgggatggagcataggaagccactggggtggggaagctgtgaggaaggaggaggtatctgttttggtctgtgaatyactctgttcctggacctrtttctaggatccagtggagtgaagaggagaccgaggacgaggaggaagagaaagaagtgacccctgagtcaggccccccaaaggtggaagaggcagatgggggcctgcagatcaatgtggatgaggaaccatttgtgctgccccctgctggggagatggagcaggatatccttgcagggcagagtgaagagttaggaggaaggtggttgggagagggatttccaggccttaggacatcatgacacagttccttaacaggcccacatgcccaggctccagacctgcaacgagttcacaagcggatccaggatattgtgggaattctgcgtgattttggggctcagcgggaggaagggcggtctcgttctgaatacctgaaccggctcaagaaggatctggccatttactactcctatggagacttcctgcttggcaagctcatggacctcttccctctgtctgaggtactggattgccagaatgcctcttttgcttttcttttctcgcctccttacgctgtgtaaggaagatgttsggyccccttgctcccctcttctgactgagctccttagccagcctcacttattccctgctgtcttgccccgcagctggtggagttcttagaagctaatgaggtgcctcggcccgtcaccctccggaccaataccttgaaaacccgacgccgagaccttgcacaggtgaggggtggcctttgaggctcactcatctcagaagggaagtgacttctgccaaytccagagattcctctgtgctaccctgactgggtggggccttaggacctaagcatgatcctgggggggcaaacccagaggcctgatgtctctggcaggataggatctgggggcctaggacctctgtggaatgggaagttcatactctgctccctgtgactaggatgatgagacttcaggatgagcgtgctgcccccaaggaaattggagggagatcattgaggagctggggaaatatgattcctgactgcacaaaaaagacacatatgcacagtcaatattttaaactcatttccaagggttcaggggccccaggttaaagacccctgttgtaaagtcagttgttgggttatatgtgttgtatatttcctggtstgaagaaaacctaataatrtaatgtggtataaccaatgtcattaaatttttagtatagtggaggggctcagcctcttagaaaatcagatgccacttctaggaaataaagtaacaggaggtggcatcctgctccattgggatgaagttcagatcttgagttaggagcctgaggttaagaaaaaagggcaccataggatggagtgggagagagaaactgctcaatgactccatgatgactgtgtttggagtaagcactataggagttgtggggtatgggccatgtttttatgaagcatgtgtttaatgtcttcatctgtcttctgggtagrgtagcctatgaggttattaaaatcttcatccctaccgggcgcggtgactcaacgcctgtaatcccagcactttgggaggccgaggcgggcagatcacctgaggtcaggagttagagaccagcctggccaacatggtgaaaccccatcctatgaaaaatacaaaaattagccaggcatggtggtacatgcccgttgtcccagctactcaggaggctgaggcacgagagaatcgcttgaatctgggaggtggaggttgctgtgagccgagattgcgccacctcrctctagcctgggcaacagagtgagactccatctcaaaaaaaaaaaaaaaaaatcttcatcccttttcaggctctaatcaatcgtggggttaacctggatcccctgggcaagtggtcaaagactggactagtggtgtatgattcttctgtgcccattggtaagtctcccccacccaagagcccttctacctctgtccctgtccctaccgcatgtcacagggtggtccttctccacaggtgctacccccgagtacctggctgggcactacatgctgcagggagcctccagcatgttgcccgtcatggccttggcaccccaggaacatgagcggatcctggacatgtgttgtgcccctggaggaaagaccagctacatgggtatgagaggggcaggcaggtgggattcatcgggctgtcttgcttttgaaagtagatggggttgctggggttgctgactcactagtgctcatggaacacaatgtgcaggtagctagcagggtggtgaggaccagtttctggagtcggcctgggttccagtgtgccacttactacccatctgactatggattctcttttgtcatccataaaatgggatggtaattgtgcttgggttggcccttgtattacgcttggattgtgagggttaaaatgatgcgtttagaagtccttggcagtgttcagcacatagtcagcagccataacttttattaagctgctgtcacttaaaagaagtaatttagtatgtaggaccacataggtgtttggtaaaaatgggaaaaccacatcggtagacttgccgatcaccagggsctagtgcagagtggatcagcctatacagtaggcaggcttgttgggagcgaagttgccttgaggtgatgacacttctcatgtggattcctggacaggagggtgggagcaagtgtggagacagtggaactggctgatcagcactgttactgccctctctttagcccagctgatgaagaacacgggtgtgatccttgccaatgacgccaatgctgagcggctcaagagtgttgtgggcaacttgcatcggctgggagtcaccaacaccattatcagccactatgatgggcgccagttccccaaggtgagactcrrrctgtgtgtcttctgaggcttcttccggttgaccttctcccttcctgacctcaatgtttagactcgaccctagtaaatattgccctgctggttgcagaagagacatatgattcatctgtatcttttctccaggtggtggggggctttgaccgagtactgctggatgctccctgcagtggcactggggtcatctccaaggatccagccgtgaagactaacaaggtgaggagtcaggtggtgggcccctgagaggccttggctgggtctcgtagagctggaaactgagatggggacaccctctgggctcccctctcctcctgaggctgcctttgggtctctttttgggacaggatgagaaggacatcctgcgctgtgctcacctccagaaggagttgctcctgagtgctattgactctgtcaatgcgacctccaagacaggaggctacctggtttactgcacctgttctatcacagtgagacctctgccatggcagagcaggggaggctgggctggggggctctttgccccttagagctcccttcagctccagctctgctttttcctccgttctttgtcttccccccacatccaggtagaagagaatgagtgggtggtagactatgctctgaaaaagaggaatgtgcgactggtgcccacgggcctagactttggccaggaaggttttacccgctttcgagaaaggcgcttccaccccagtctgcgttctacccgacgcttctaccctcatacccacaatatggatgggttcttcattgccaagttcaagaaattttccaattctatccctcagtcccagacaggtaagtratctttttcttcccttcgtcaccacctttgctctttccacctttcaggaggctttatggtgtgacaagaggaagggaaaggaargattcatgcatcccttactccagcctttgcatgcttggctgagagaaccctctcattccagctagaattgcttttgagtgctggaccccatgtgaacaggctaaagtgttcatatggatggaggcctgttcctttattctgccaagtggctgcagttgttcagcactaaatgcattccaaatgcaggttgtggtttcttttccttcttggcacagggtggacttactggtactggacctctgctggtccagcaatctcagcactgggttggaacagagctccacagagctttgtcagcagttctctgagcccttcacactcattgcagattgttttctcagccatcttgaggagtctggcctggatctcaagggaagggtggggttttctgaaacagccttgagagcactgcttactgggatataaccctgggtttagttggaagagggagagaagtgctactttagaaatagtagaatttgtctgggcgtggtggctcatgcctgtaatcccagcactcacctgaggtcaggaattcgacacggtgaaaccctgtctctactaaaaatataagaattagctgggtgtggccaggcacggtggctcacgcctgtaatcccagcactttgggaggccaagacgggtggatcacgaggtcaggagatcgagaccatcctggctaacacagtgaaacccccatctctactaaaaatataaaaaattagctgagcttggtggtgggcgcctgtagtcccagctactcgggaggctgaggcaggagaatggcatgaacccgggaggcggagcttgcagtgagctgagattgtgccactgcactccagcctgggcgacagagtgagactccgtctccaaaaaaaaaaattagctaggtgtggtggtacgtgcctgtagtcccaactactcaggaggctgaggcaggagaatcacttgaacctgggaggtggaggttgcagtaagccgagatcacgctattgcatttcagcctgggcaacgagcaaaactccatctcaaaaaaaaggaatagtaaaatttgctataacttaaaaagtacatattttaattatcccgcacttcatcacaattcacatggaaagaaacttctctgatttaaaaaataaataggccaggtgtggtgatggctcatgcctataaatcccagtactttgggaggctgaggtgggaagattgcttaagaccacgagtttgagacctgtctgggcaacaaagggagacagtagttccagctactctggaggctgaggtaggaggatcccttgagccccaggagtttgaggttgcagtgagctatgatggcaccactgtactccagcctgggcaacacagtgagactctacctcaaaaaaaaaaaaaaaaagataaataaagcctagtgcttcaaattcatttagaagaccctgcgaggccgggcgtggtggctcgcgcctgtaaccccagcactttgggtggctgaggcaggtggatcacctgaggtcaggagttcaagaccagctggtcaacatggtgaaacctcatctctactaaaaatacaaaaattagccggacatggtggcgcacggttgtgattgtccggaggctgaggcaggagaattgcttgaacccaggaggcagaggttgcagtgagccgagatcacaccactgcactccagcctgggtgacagagtgagattccatctcaaaaaaagaaaaaaaaaaccccaaaaccctgagaatcacctcttccttacagcatcttgttacttcctgtcctcaagagggcgcagcttcctgtagaaaccttttggcccaaggataggcagtgatttttttttttttttttttttttttgagacggtgtcttgctttgtcgctcaggctggactgcagtggtgsaatctcagctcattgsaacctccaccttccaggttcaagcgattcttgtgcctcagactcccaagtagctaggattacaggtgtgtaccaccatccctggctaatttttgtatttttagtagagatggtttcaccatgtgggctaggctggtcttgaactcctggcctcaarcaatccacttgccttggcctcccaaagtgctggaattacaggtgtgagccaccacgcctggcctataggcagtgatcttttaatacaaggttcaactaggacttgagtaaaggccaagttatattaagtaatgggaatttaggtaatctgctcttaggcactgacctaattgtgtggagctcctgcccaggaaatggcaattctcatattttaatatgagaatattaaaatatrrtgataaggcccattttctgacaccatctgtttaattttaaccccaggaaattctgaaacagccacacctacaaatgtagacttgcctcaggtcatccccaagtctgagaacagcagccagccagccaagaaagccaagggggctgcaaagacaaagcagcagctgcagaaacagcaacatcccaagaaggcctccttccagaagctgaatggcatctccaaaggggcagactcagaattgtccactgtaccttctgtcacaaagacccaagcttcctccagcttccaggatagcagtcagccagctggaaaagccgaagggatcagggagccaaaggtgactgggaagctaaagcaacratcacctaaattacagtcctccaagaaagttgctttcctcaggcagaatgcccctcccaagggcacagacacacaaacaccggctgtgttatccccatccaagactcaggccaccctgaaacctaaggaccatcatcagccccttggaagggccaagggggttgagaagcagcagttsscagagcagccttttgagaaagctgccttccagaaacagaatgatacccccaaggggcctcagcctcccactgtgtctcccatccgttccagccgccccccaccagcaaagaggaagaaatctcagtccaggggcaacagccagctgctgctatcttagatggttgaaaactagacgggtggctcactgccattgtcaccaggttggaactcttgcctctgtgaggatgccttctctactgtgcatacccatgaaatttaatacacattttaaaacctctggccactgagtatttttgagggaactgggtgctgcctttgccgctttaagggtaaagatgggaggtgggactgggatcttctgaggagagggaatggttgggtgctactgagaaataaggtcagttttaggctcctgcatccttgggttttcccaggaagggaaagccctggagtcagagctaggggtgattgaactccggggagaggagggcaatagaagtgtaggggaaggcggggcacactagctcatgcctgtaatcccagcactttctgggaggccaaggcgggtggatcacctgaggtcaggtgttcgagaccagcctggctaacatggcgaaacctcgtctctactaaaaatacaaaaaatcagccgggtgtggtggcgggtgcctgtaatcccagctactcgggagactgaagcaggagaatcgcttgaacctgggaggctgaggttgcagtgagccaagatcgcgccactgcactccagcccgggcgacagtgagactcggtctcaaaaaaaaaaaaagtcgtgtaggggagatgggcttgccaccagaacccatggggtactggaggtcctgggctttacgccaccccggctggagtccaggcggtggctcccctcatcacagggctcggcctcagacccggaaaggtccagggtccggcctccaattggagcctgtcattggcttcccctcggcccgccccctgacctctgccccgctgccgagccgcctgattggtcggctctgtcccgccggcgccgcattggctcttctggctcgccttccatccctgctcctgcaccggtctgcatctcccagcagaaggcgcagccatgaatccgttattcggccccaacctcttcctcctgcagcaggagcagcagggcctggccgggccactgggggactcactgggaggcgaccacttcgccgggggaggagacttgcccccggcgcctctctcgccggccggccctgctgcctactcgccgcccgggccgggcccggccccgcctgccgccatggccctccgcaatgacctgggctccaacatcaacgtgctcaagaccctgaacctccggttccgctgcttcctggccaaggtgcatgagctggagcgccggaaccggctgttggagaagcaactgcagcaagcgctggaggagggtaagcagggccggcggggcctgggtcgtcgcgaccaggcagtgcagaccggcttcgtcagccccatccggcccctggggctgcagctgggcgcccggccggccgctgtctgcagcccttcggcgcgcgtgctgggctcgcccgcgcgctccccggccggccccctcgcgccctccgcggccagcctctcgtcgtcctccacctccacctccaccacctattcctcgtcggcccgcttcatgcccggcaccatctggtcgttctcgcacgcccgccggctcgggccgggactggagcccactctggtgcaagggcctggcttgtcgtgggtgcacccggatggggtgggcgtccagatcgacaccatcacgcccgagatccgcgctctctacaacgtgctggccaaagtgaagcgggagcgggacgagtacaagcggaggtagggattgggaaagggggacaggtctctctgtgtcataccactcacaacgggccgcgagttggtgtgggttccgaagaatcaggggtgaaaagaatgagagtaaagtttgtgctgtgtaatgaggagcttggaagcaattggatgcagggagactagaatccgcagagaatgcagaagccctgctcgtgacaggaagaaggacgctgggagcggaacacggggggattcctacttttccggcttgtctctgccatccaggcttaactgcgggttttgtgcggtgtgaaagggactggggctctgccctaccggtctcagccctggggcaggttagggatataaacttcaaaagtaggaggcaaggatatagcgtaaatttgggagactaaattgagtgaaactggaaggggctggtgagggaggggctgtaccttgcaacgagtgattctttcacaccccaaggtttcccaaagaatattgatggaaaccaggtacctgctgtggtttcataggaaaagctccgggacctcaagccattgcttgagtaggtcaacaaactgggaaaagaaagagtgaagggaattcactagggtgagggtggagagcagggctgacaggggaatcttggcagtataaagcgccagtggggagggagagtggagagccagcaggggactgagcagggagaagctgggatatgggccctccctaggaccgcgaggccgcggggcgggcccggtgcattctgtggatgaagatttggctgtctgagaggagcccggccccaaggggcaagggaaagggatgtgatgccaggagtgctggctgtataccaagtggattccttagatggctgataaccaagccgataggacaggagtgagagcagaggtagtgtcttgcagactccaacccaagccttgaggagggagcgggtgactgacaggctttggtttggcggcctcccctctcatctcagctattatgaccccttgtgggcgggcctgggaactacctatgcagcccagtgtggcggagattcagcactgggtgaggattggccgaatgttctaggaaatgaccgctgggtctaggggcgaccttcagggatctccaccctgctggagtttaccagatcacagatcagcaggctttctttttttttttttcccataaatgataatattttattatagaaaaagcatcccaaatacaggatttcgtaaacactggtaggtgaacaagtgcaattttagaagtaaatgcaaagtaaagaggcaaaacctacaagcattttgccttcagaagaagatgtagtgttctcctgcactagtgatcccacccagaacacaaatgtggctctgtctcccgtgaaagcatcagatttgctttctgagctcagtatgcccatttcaataattgcaaagtgatggcaagaagtggcgttgaacacatgactacagacccttgacttaaaatattgagacagggacttgctctgtcatccgggctggagtgcagtagcgtcatcacagctcactgcagcctcatcctcctgggctcaagcaatcatcctgcctcagcctcttgagtagctgggactacaggtgtgcactaccatgtccatgcctggctattttttttttttctttttgcgttgtccaggccagtctcaaactcctgacctgatcagcaggctttctgagcttgagtcctgtcctcgtgctggcttccttagttgtggtccatgttatgtgtccttgggagtttcagttgtcctgaaatcatcgttctgccacccagaaccagcctgctctgcccctgcaggagttaactacgcgctcagcagtggcacaggcacagttctggaatacatccataaccacaggaacaactgctgttctcaggagcattttttttttaaactgaaggagcgtttgtccttggtccagctgtccaggacaggaaggagttattccttggggactgattagctcatcgctctgcagcacgctgctgtgtagagagccttagctggattcggatggtgcgtgatactggcagtgactcttcttcctccctagattccctgccctcattctggtctctttatagcaacactgtaactcctgtcttctgcctggaaggcctgggatggcttgagcgctacactgggaggtagctaaaggcctcctgcgttctattttcagctcccctgccttgtgcgtgacctttttttgagcccccattttcccaacataggaatggtccctgctttctctcttcaacccagggatacagttttttggaagagagatatttggtccatgcagaacacatggatatcgctctcaaattctgcccatgttaagggaaccttataagtgagaccagatggaaatggaggtgaaaatgaacctgtctgtgtgaagtctggccaaagaacaaatagaactgtagtgggcttccagatgattcatttgtagattttttttaccctgtaagatttccttaggcttaacctttagctataactgccttacttaagtttcttccaggctctgttgagctcactgtcagatagcccctcctgccctctttcacacatcttgtccagggttagcgtgcccttgacaggcttactgtctccctccagggactcgtgggctcccggcgcatgagggcaccacagttcatgccttcacatcatagatgaagaaaccaagacccagaaaagataagggtcttagctaagaaaacataatctgatgcgactggttcccttagtggcctgactgtatgcatgagaatgccagggaggaggggagaagcacctacgggacacacagggaagggggctgggagccaggaaggctgggagctgggctgtgtggggagccagcagggtggtggctgggctggctgcctcctcctgctctgcccagcagggaggggcagtcgaggtgatgtggaggagttattattaggaatactgcagtgcggctgtgaatgaggagatgggacccagaggctgacacaggaaggaagatggagggaaggggaagaaagggcttcacccaaggcttcagaagctgcccactcagattttaattttcttgctgtcttcttggccccttcctaaccacctttcttgtgttgaagtttctctcttggtgcagttcccctcccttctcgggttgacagaagtgatgagctcacaggaacaggatttgagatgtgctgctacgccagctagactgcagggccctggaatgccgggcgggtcctaagcagcacgttgccctggcttccatctctgtgatggaatagaatatgcactgcctgccatggctgatgagacatgacaaagctggctctgggaagcatgccctacctaggaccctgccctgtggcccagggtgtcgtccggcccacttgcagtcttaatctctgaattctgggccctggaacaggctgtgtctagttctcatttgccgtactcaccgggcccctttacatactctactttctctttccctctgggtttgagtgctagtaaccccaggctcgtgtgtccactgctgtcatgctgctgtgggacttccggcctctgagccagtctggtcacctctctgtgactcccttagaggaggctctgggtgggtagtttctggagctagtggggaaggactttgagtgtctcctaccaggctcttgacccactctgttgatacactatgtgtcctgcagatgcttttacagggttaaatgataccacaagaggcagggcagcgggctcgacgagctctgttctggtgcgggcaggaggcgggagcccggatctgtgcgactgaaggtgggagactgggccgggtggacctggtggtctggtgtgggcaggaggtgggcaatgaggccagccggacagctggctgagctggggcctgagcagggatgggcatcacggaggaccggagcctcagcacttgcccaaacagagctcctggtgcacagcccggaggttccgggaaggcagctggcgagctcgacgcccatcaggaagcacagagccgcgtgacagctgcagttggtcaccagctggctggccaggcattcctgtgccctgctcctccccatccagggaaccagaactggggtctgaggcctgagccagagaggtggggacagggagccatgggggcagggaaggactctgtacctaagctctctccgcccttcccatgtctgtcaggtgggaagaggagtacacggtgcggatccagctgcaagaccgtgtaaatgagctccaggaggtgagggtggcgccccacttgctgctggtgcttccctgggtacccctgtctgcccatgaccctgctgccgtctccctgt

SEQ ID NO: 97845 - DNA, 26512 bp, Homo sapiens
  misc_feature (1)...(26512): n = A,T,C or G
tcagggaaacatggaatcaaggcagaatcaaggagatctggagtggcccgagggccctgactgcagcctagggctcatctaagactagcctgaagttggtcagataggatggcttcttctctatcaagaggccaggtgctgatgaaaataacactggccaggggcagaatccaaatcctaattctgttgctcactttctgagtgtccttgcacaagtcactcctccatgggcctcagtttcttcatctggaagcaaagaaataggatgaacggttgccttctcttttccagcacctgtcaaggtgccctcgggttttttcatagtacacagatgcttccagcctttctctgtctgatcccagccctcccccaaccaaagctcttgacagagaaccccctgccctacagctaatcctctttcagtctcttagccttcttcaggggttgagcccagtctaccgagtctaggatccctgcatgcatgtgctcaagcacacatgcacacacacacgtacacacacccacacatgcatacacatgcacacatatccccccacacacccacatacacacacacacccacacacccacacatacacttacacgcatgcacacactgctttccaaatcagcttggagagacaggctgactcctttccctcttcctcaggcatcctctctggccacgataacagggtgagctgcctgggagtcacagctgacgggatggctgtggccacaggttcctgggacagcttcctcaaaatctggaactgaggaggctggagaaagggaagtggaaggcagtgaacacactcagcagccccctgcccgaccccatctcattcaggtgttctcttctatattccgggtgccattcccactaagctttctcctttgagggcagtggggagcatgggactgtgcctttgggaggcagcatcagggacacaggggcaaagaactgccccatctcctcccatggccttccctccccacagtcctcacagcctctcccttaatgagcaaggacaacctgcccctccccagccctttgcaggcccagcagacttgagtctgaggccccaggccctaggattcctcccccagagccactacctttgtccaggcctgggtggtatagggcgtttggccctgtgactatggctctggcaccactagggtcctggccctcttcttattcatgctttctcctttttctacctttttttctctcctaagacacctgcaataaagtgtagcaccctggtacatctgtgatgtttgccttctactctcttctgttccaaaaagacccaggtcccatttaagggcagtaatgtgttacaggtgctgtgataaaggctgggtactggatagcttgtgggcttatgggaggaggcctgagatgggtcagggggagaaggtattcagcaggtggctgggggactgtgtgcagcagttcgctatggcctgcctgtggtgcccatgtgtttgtacgggagggttagcttgagaaggaatcagattataaaaggtcttgaatgtcaagccagagagtccagactttttcctaagggcaatgagaagccattgaggagttctgagcagagtagtaacatgatcagttatgcttctcagaaagattgctccagatctttcagaaagaagcagtgtaggttgatgaaagggagggactggcactggggaaacaaggtaggaggcaggtggcaagaaatgcaagagcgacaggacagaggggttagggagagggattaggaagagattaaagatgtggaatcagctggaacagtggctcatgcctgtaatcgcagagccttggaaggctgaggcagaaggatctcttgaggtctggagtttgagacaagcctgagcaacatagtaagaccctgtatctacaaaaaaaattaaaaattacctgggcaggctgggcatggtggctcatgcctgtaatcccagcacttcaggaggctgaggcaggcagatcacttgagcctaggagtttgaaaccagcctgggcaatatggcaagacctcatctctataaaaaaaatacaaaaattagccaggcgtggtggctcatgcctataatcccagctactggagaggctgagacaggagaatcgcttgagctcaggaagttgaggctgcagtgagctgtgatcgtgccactgcactccagcctgggtgacaagagcaagaccctgcctctaaaaaacaagcaaacaaacaaaatgtggaatcaccaggatttagtgaccaaatgctaggatataggacattgggagggaaggattcgagataatggccaaggtttgggtttggtggctgggtagataatgctgtcattcacaaggatagggaagagggaatgaggaatagcttttgggggaagatcataaattcagttttagacaaactgactttgaagtacttataaagcagctggataaaggtcagggttagagagagagacctgaaagttaccagaatatagggaagtgatagctaaagccctagaagtaaacacccagggagagcagggccaaggacagagccatagggacaccatggttaaagggagatgtgcaaagaaggctcagagcatcagtgggctcaggccagggaacgcaagctctctaggccgccattctacacacagaaaactcggtgcaaggtttacatatacctttttaaagtaacatttaaaattacttcctttaatataaaagaaacacacaagacacaaagaaagcccaataaagctgtgagtcccagtttggtagctgaggaggagtctaagaaaacaagccattcctcagtatccctgggaaagaaggggtgagaggacacagatatcaccaggccctgggtgactgcattgctggggccatgcagggcctagctctccaccaagggaaagtgctgattttccttgtcatggtcctggccttgctcccatgctcgtcctccagttttcagaagtcgtccagttccaagaatggctccttcctttagttcactaacattttcacttaggggtgaaggccgcttaccctgaaaacggcagtgtatgagttggggggagttgctgttcagaagagggaagatctgggtaaaagggtctcccaccctctacgttggatatcctagtaacagcttgcactttctcttcctttacctgtcgtagtgtcagggtgccaggggagttgtcatcctgcaggatggtgaggggggatctccctagtaccttgctgctgtttggtttccatctattgcgcatagaacctggggtgggtaaggcgttaaagcaaggacccaaaactaggacttacagtttattcctcccacactcacccatggaccttatcccaaaacattatcctagtttatcttccctgcatcttgccttagattctgtacctgaagatctgggagtctcagggtcccttgagggcttgtcggagctctggctggccacaggggtttctgtgggctgtcttgcttcctccttggaaaacacctgtttggaggggaactcagtctggttccaaggtggcatctgttcctcaacagataactgggtacccagaggcaagtccaattcagaagataaaggtgcctctgggggcagaacaggctctgggggaagatttgatttagagtcttcagtttcaaatacttcactcagctgtttcaccagtgggcttggggggtctagaggaagaaagtgaagtgaacagtgaccttctgatacacaacattcagcaaggagcaaaacatacagaaacccaggactcatgcccaggagggtgagcaagtgggaagagagaaatcaaggaaatcaaggtgaaagggagcaattttttttttttttgagatggggcttgctctgtcccccaggctggagtgcagtggcgtgatcacagttcactgcagccttgaccttgtgggctcaagcaatcctcccacttcagcctcctgagtagctgggatcacaggcccatgccaccgtgcttttgtgtgtgtgtgtgtgtgtgttatgtgtgtgtattttttctagagatggggttttgccatgttgcctaggctggtcttgaactcctgggctcaagcgatctgaccaccccggccttccaacgtgctgggattacaggcatgagccaccgcacccaggctgggaacaaaatattgagataagagtgagatgggtccgaagcaggaggatagaggcccctttaaggaaccctgagagaatggcttcatggaccctacccaagaataatagatgacagcttcatcagcattccctgggcccaacgcttacctccactgctggtcttcataggtgtccgtgcaataccaagagtaggagagcggggatctgagtcctgggcatgtttaagaccctccagttgctcccctgctggtaggcctggctgtggagagctctccacctgtcaagaccataggctagaacaagtctgggccctgactcttctctcctctcctccccatattccaggaaggaattgccaaggccctcagatatccagcctaccccacacagattgagattgcagaaaataaggctaggataagggtggggtcatgacggctctctcaaaatcaggttaggaagagacccaagaattcagacattctctgcctttcccacgctggcccagagtacctggatgggagtgcgcaggatgccagcactaggtgaacgggggtccgccactcgagccagatgcttgttgtgcggcggaggccgcgctggtgtgactgggacgctcttggctgagcccatctcaaccaggagttgcagggtgggggcaagggccagcccgggacgaggagggaatgcctgtgagaagtgactcaggtctcagcccttatctcttccacgtcggaccttcaaccctaaaccaccctgtcttcccagtttccagtgaagaaacttcctggcgagggaccagaggcctctgcggagttaatgactgctgcagctgacaaaatggctcgttctgggcctgctgagccctctaacttatttattaaattattcaaatcacttaccgggccccaattccacctctggatgcacaacagctcgtggctcaactcccgaagttaccagtttcaaacttcccgccacgccccctgccctgaccctattggctgagccgacgtagttcccataggccctccacgtaagacccgcctcgagccaaaggaagctgttggtctgggagaacgtctatcatggtgactgtaggtgtcaatggactgatgctaggcttgcccaggggtgacgcctccttgataagggtacttctgttcagtatcggcctgcgagccgtccgtggcaggctgaggagtgccagtcttcgctttcgagacgtctagtctcaagaacgaattattaaacaaaatagaatcatgagtgattacactattatgcgcacatccagctggagttgtgatggttttcctgaggcgagcgatagtagctttattggttgacagctgtatcagtcactcgacacaaccccctcaagctccgcctcactggataccccctttacaaataccaagacaactgtccctcgactttccgaccggacaggtccccaggaaactttctggaattgagaggcctaaaacaaccgtcagttcctgctcttcaatagaaggcacgcgaatggactctaagggtcccggagccggagcagctgcggagccgcagcagctgcaaccccgaagcccacctagctgctctacgtgcgctcccgccctggaggagtgggattggttctttcaaccatcaattgccttaggagcgcttctcattggcgtcagtcaagcgcggggcaggggcggagcaccggcaggcaggctccgtccaactgccattctcgcgcgtcgtctccgcggcgcatgcccctaacgagtggcgctcattggacgggaggggcaggggaggggactgggaacggtgggagccgccgtgtgtggagaagctgctgccggtgtcatggcggagctgagtgaggaggcgctgctgtcagtattaccgacgatccgggtccctaaggctggagaccgggtccacaaagacgagtgcgccttctccttcgacacgccggtaagcccattccccacgcccgcaacgagcacgacttccttccatcgccctggtcattccgctggggcctgcaaggcttgggctaccgcctccctgcgatgcaccatgggacttgtagtctcccacgctccactctgccgttgcctttcattaactrcggctgtcgtgtgactaccgtccccggaagccgccgcgctcacctctccggctccccgcttcgtgragcactgtgggcattgtagtcactcactgccttcgttgccgttctaagctaggggcgcagcccgaccgtcggactacatcccccaagtggacccttgagaaaacctggcagtcggccttgtvtgccgcgcacggctctccgggttttgtagtctcgtgtaggagtgatggggacgactccccactgttctcggccggggttggagttggggggtggggaccgcagttcctaggcggttaatagtctgggagtggactctcaagaagtccgattctgagaaaggcagagagcctccaccccgtggttaaaacagacagggggcggggaggggaggaaagaggagaggaaagctctagtcgtttctcctttgaagtgagcaatggccgcagcccccacccttccccccgccccccagcctatcacagacagctgagataaccccttttaaagtattcctagagaggtggtttctttctcggaggatgctaaggcctctttcccatcccgctcccactcttggctagttacacaaagccacctcccacaccatgcttcacgttttgcaggctccacctggtacctcccttcctgcagttctgccttccctatgtcaccctcaagcsgaggccctttggggcctgaactgagaaggcagcagcttggttgggatccgcccccctcaccacccctcccctcaagctgctgtgccctgcccagtgtattctgccagaaccagctcatggcctgaaaactgcaagtcagagtggaaagccttcattactgcatcaccagtactgagtagaacagcatgatgtgaggcccagttcaggatcatcactgtgatttgtggtttgcttggtttgctaggctttgatctgggcctcagacaatgtgctgcttctctgaagtctggctttggcagaggtaaaagagcactgcgcggagcagagctccggggttcccaatccttggtgaaatcagcatctttaatttccaacagaggagtttaatcacttcagagctcccacattcttcccaggagggaaaggtttttcttaaattaccagcaggtggtagaagtcagtgggtccctctttacacttttattcactcctgtctctctccttagtaactgctttgaataatccaaaaagggtttttgtaatcttctgaaactttccctttttcaccccaagtcaagagattttcagtgtgccctagttctttgctaaccaacttccagcatatttggttaccttcaaattgggctcatggtagaaagagcttagttgacctccccrgtgagaaatgctctatttgttcatgaacttgcagtacacactgttcctaggaagtggtacagagcaatctatgggaccaagaactaccttagmcagtgcactatttttcatatcacagcagagaaatgttcaaggccactgagacttttattcctggaagaggatrtctgttgttgctcaaagccttggatctgagggaagacccttattgtctccaatttcctcctccaccttctccatcactctttacaaaggcactggaaaacttggtcagctttgggggaagcccatcctcccttctcagctgtgtttctgggtggacacccgtctgtccctgttttcacgggttatgtgtgttctagctatctcagcaagtgttgcgagattgttgtcagaacgggatggctttgagattggtgatttgttgggacttcagcagggatcttattggtcggaggggaggcagaggagagagggtggtggctatggaatgctggacttcatgaccctgccagactgggtgcatgtttagctgtgagtccctaacaagtcattgttcccctggaagccacacttcagcaggagaggagggagaagactcacagtgtggaccagggttcgactacctggtagaatgtggtaaaagaaaggtctttttcgctggatgtttagtctcaccgctgtaatcccagcactttgggaggccaaggtggaaggattgtttgaggccacacaagttaaagaccagcctaagcaacatagcgagaccccacctctaaaaaaaaaaaaaaaaaaaatctaggcatggtggcatgtgcctgtagtcccagctcctttggagactgaggcagaaggatcacttgagccggggaggttgaggctgcagtgagctatgatcgtgccactgcactccagcctgggtgacagagtgcagtgtctctaaaataaaattttttttttttttaaaggaaaggtaattttgcttgctggcacactcgggtcagatatactgttcaagtgctggaatctctgctcctctggtctggaaggttttctgaatcatggagatgagatagggtttgtcttaggtgtcccctggtttgggttcagtgtctcacatgaaagtctttcctctcccacgaagggaccctttttccctttgaatgtaatctccagcactggaagtccacagtatttgatccccatttactttctggatctgttagccccaggacagaggtgaaggaagtcctctgtgattgattaaagagctccaaagcccaagaaggagcaggtggaaagataaatggtgactggtgttgctgttgaatggcgacgatgagctggtgttcctcagccccctgatgtccttgttggttgttatcaaagtcatgggaggaaatggggagaatcttagctatgtcccaggtcctaaaaggctaaataacttgccaagggccacacagtgttagagaacagaacatttcttctggaacccagcagtttctgactccaggttttggtttcctcacctgaccaggcttcataacatcctcrtgttttcacccttacctcttgtcccacaggagtctgaggggggcctctacatctgtatgaacacgtttctgggctttgggaaacagtatgtggagagacatttcaataagaccggccagcgagtctacttgcacctccggcggacccggcgcccggtaggagcagggctggggcaaggcctgggtacattgtctgttccattctgacctcctattggactcagtttctttttttcacctacttttgtgtcattaaagcttggcacagatgttttttagctttattccgttctgagatgaagcactacctccttccgtccctcctcccgacttgttccttcgctcgtgctcattgctgatccagcccttcctgcttctttacagaaagaggaggaccctgctacaggcactggagacccaccccggaagaagcccacgcggctggctattggtgagcaccgctgcagtcctattcttctccctgagctggtctttctggctctcagcagcaccaggaaagccccaaagagtgggcctgattgatggccctagaactctggatggggcaagtgaggtgctggctcggaggagggacattgacctgttgtcattgctctactctccctcttcttccctatccttccaggtgttgaaggcggntttgaccttagcgaggagaagtttgaattagacgaggatgtgaagattgtcattttgccagattacctggagattgcccgggatggactggggggactgcctgacattgtcagagatcgggtatgactgccccctatgctacccaagattctagagcaagatgggccagggtagtggtgtcttaggcaagcactgacaaagctgaaggccaaggggaagaggggcatgtggggcagggggttgggtattgcctctgaccctctgcttcccccaggtgaccagtgcagtggaggccctactgtcggccgactcagcctcccgcaagcaggaggtgcaggcatgggatggggaagtacggcaggtgtctaagcatgccttcagcctcaagcagttggacaaccctgctcgaatccctccctggtgaggcctggcccctctgcctcgggcaccacccccagagcaaggacaaggagcccacttttctgggggatctggtgggagagagggtagggagcaggacaggaagggaagcttggaaatgaacamgacatggggatggccagaggagaagagagagagaccttggattggcggggggcctgcagagccctctctctctgccactccctcaaatccccgacccacatttctgctgattctcttctctgtgggttagtggctggaagtgctccaagtgtgacatgagagagaacctgtggctcaacctgactgatggctccatcctctgtgggcgacgctacttcgatggcagtgggggcaacaaccacgctgtggagcactaccgagagacaggctacccgttagctgtcaagctgggcaccatcacccctgatggagctggtacagcctcccctcctccagccactctcatgcttaaatatatttcatttgttagtaatttcgtgtgacatgtataatacatgaatgcattatcttgataagaaaggaaagtagtcaggtgcggtggctcatgtttgcaatcccaacactttgggaggccaaggcaggagaattgcttgagcctaggagttcgagaccagcctgggcaacatagtgagacctcatctctccaaaaaagaaaaaaaaagaaaaattggctgggtgtggtagctcctgcctgtagtctcacctactcaggaggctgaggcaggaggattgtttgagcacccgggaggttgaggctgcagtgagctatgattgcaccactggactccagcctgggctacagagaccctgtctcaaaaaaggaaaatactgcagatgagactaaatttttgattactccccactcaaatcctcatccctttcctaccaagcctgtcttaccttatcctatacaggtagaatcagaatcacaagtaattccaaccctcacccggtttcatctgtcttccctgaccgtcagccccagaagggccatgaccgcactcatattactcatattcaagggaaccaagagggtggaccttactggctctccttctgtcccctcaagtcccttctgtgcaagggatgggatggtggcctggctagtcctgagccacttcccctgattctcttcctgcctcctgctctagacgtgtactcatatgatgaggatgacatggtcctggaccccagcctggctgagcacctgtcccacttcggcatcgacatgctgaagatgcagaaggtgagacccccttcaacttcagattcttctacttcctgcccctgtgagggcccttcctctttgcctgaggctgaggtagggttttggagaaatcttctagttaaccccatccccaagatacacaggcttcttttaaatatctaaaatcatttattcagtgaatagtactgagtacctactatgtgctagaggctgtgtgaataagacagatgtggtttttgcttacaagagttctactctagaagaaaaggcagacattagtcacattcccagataaataagtgaatagttgcaaactggtgggcactgtgaaagagaggcggagggtactacagtaattgacagcagggtggcctggcctagtttagggatcagggacatttccctgaggaagcgatgcttaactgacaatgtgaaggaggttaggggtaacttaaggatgggaaaaacatttcaggtagaaggaaattttattcctcattcaagcagaggccctgatgactaacgggcctctgggacaattatgtgtggccttccagaacttgaactggacgatactcaacatacctcccatgtttgagcctgtaattccacaaattctaggccacagttgagtatcatcctagactcagtgagagatcgaggtaaaaactacagggttgagtttctcactcagtctgaagtgccccttctcacacagacagacaagacgatgactgagttggagatagacatgaaccagcggattggtgaatgggagctgatccaggagtcaggtgtgccactcaagcccctgtttgggcctggctacacaggcatccggaacctgggtaacagctgctacctcaactctgtggtccaggtgctcttcagcatccctgacttccagaggaagtgagtagtgccctctccttccccaggccccctcctggtcagcaccctctgggcatactcctccttcagcttccctcagcacctctgtgtttgattctagtcttagagtagttcctatcggctgggtgtgttggcccacacccgtaatcccagtacttcgggaggccaagatgggagaattgcttgagcccaggaggttgagaccagcctgggcaacatagcgagaccctgtcttctcttaaaaaaaaaaaagaataattcctgtcacactctggctgacatgctgtgaggggagcaagttagggagctgcaccaccagcaccccaacacacaaaccccactgatagtgcagagtgccaagtcccagggctctgtggccttctgacagactcaagggttagcaggtggtctttattttagggcagtgacatcagatgagcacctaacatggacatgtagcacttggggaggaggggggcttggcacactaagaataaaggcaggttctcagcagaaatgagtttactttcgaatttggggaacaattagaatgtgaatgctcagaacatgtcaacaggttctgtccaatagaacgtgaactgcacttatcctaatcccaggctaccttccccctccccggctcctctgccgccgagcgtgcttgcacattggacatagctgagaaggggagaacaggcaggttgctggagagaagcgactccaaggttcacccacagcaactccccactcttgaggggagcccgttcacagagttagtaaatgtttgcttccttcccttttcctcggcgctcaggccagagcccctccaactgtccttcccttgacttttaggtatgtggataagctggagaagatcttccagaatgccccgacggaccctacccaggatttcagcacccaggtgtatgtaaccaggtcctatgtaggaaagctgttgasagtcatggccgtataccttcctcctccctgaccgcctrgggggcacagcactttaacccctggcctttttttgttttgttttgttttgttttttgagacggagtcttgttctgttgccaggctggagtgcagtggcgcgatctcggctcactacaacctctgcctsctgggttcaagtgattctcctgcctcagtctcctgagtagctrggrctacaggcacatgccaccacgcccagctaaattttttttgtatttttagtagagacggggtttcatcatgttggccaggatggtctcgatctcctgacctcgtggtctgcccacctyggcctcccaaagtgctgggattacaggcgtgagccaccgtgcacggccaccactggcctattaggagcattcgggtgactgtcttctggacgtgttgtctgtcttgagctgggttcctgtagaatctaaggtttttcacgttgttgagagttagctagggagagccacgagcagggggttgagctggggacacacagggtcgttagttgactgaagtgaaatgttttcttggatattaatgcagggccaagctgggccatggccttctctccggggagtattccaagccagtaccggagtcgggcgatggggagcgggtgccagaacagaaggtgcgtctaggaccctgtccctttcaggccctgggattgtggggaagctgaggtctgggagatgtctaargaaggcccctggatggccactgagccccagctgagtccctgccctgactcttcccaggaagttcaagatggcattgcccctcggatgttcaaggccctcatcggcaagggccaccctgaattctccaccaaccggcagcaggatgcccaggagttcttccttcaccttatcaacatggtggaggtaagggctggcaagatggcacacccccatcttcctgcaatttactmgctctccttcctgcccatttctccctctrtcagccccaacccagtcccatccctgaaccccaacagtctgtgtccctgtgaacagtgcttgcacctgaggaggacagtgaaggtgatgatccctacccttgatgggcttgaagcccaattcagattatgcccaaagacaatgataagagaatacttgctgcttataaagaaaaatacaagcgtgttctaacacagtccctcagtgcagggatggggccagaaatggggaggggttggtgaattagggaaggtttctgctctgctcttgtgtccctgagttccgagtggtagtctgccttctctccctgactctcccatgaacctttcaggccccattctgttccctggctgcccagacctccctaccctgcctctttcccatagaggaattgccggagctctgaaaatcctaatgaagtgttccgcttcttggtggaggaaaagatcaagtgcctggccacagagaaggtgaagtacacccagcgagttgactacatcatgcagctgyctgtgcccatggatgcagcccttaacaaaggtaggctgctccatcagcaaggccgtggcacggtgggaggctaaggtctaggaggaatgcttgggcacctcatgggagcacagcccagggaatgccctgcttcaccagccaaggttccagtctgggccaccaggagtaggtagattaacctcgtccagtggacactcagcttgttagcagagctgcatggaaacaggcgagatatattggacatgtgtcaggggtgctttggaagggtagaggaactgaaatacggacacagagccagtagggagaggctaaggaggcaaagaagcagcaccctccgaaggatccaccaacccattctgtcaccagaggagcttctggagtacgaggagaagaagcggcaagccgaagaggagaagatggcactgccagaactggttcgggcccaggtgcccttcagctcttgcctggaggcctacggggcccctgagcaggtcgatgacttctggagcacggccctgcaggccaagtcagtagctgtcaagtaagtcctctggtcggggcctgaggctgtgggtctatggcagagctatcccagaggatacttctgtctcttccctgttctttcatccctttgtggttggaacctcagggttgaatcagttgggctggtaatctggccctgatggaaccaaggggccctggtaggggggacacgggtactgactctatctgtcaccttgtcctgccccaaccactccctcttctgtggcacagggtctctttgtagtgtagcctctcttcattgcccctcagtcatggctgagcacaggcacttaggatcagctgtgggcagaatttggatttccagcaaatagccacactttgagcctagccattggcacctggcatgggtgtgagacctgaaaaagggctttggtctcggggagtcagctacccagccctttgctgctcctgccagtgaaacagctcttcctctctgtgtgggttttttttttttttctatgtgtgggtcttgctatgtttttttccctacgtgtgggtcttgctatgttgcccaggttggtctcttaactcctgggctcaagcagtcgtcctgccttggcctcccaaagtgctggaattacagatatgagccaccatgcctgggcttttttctttttcttttttttgttgacagccttccttctggcctctactgctcctcgttggccgaggacaggcatcagacacctgcccaggggaagagaagaatatggaggatcttctgggttattgggacttctacccatgaggggctgaaccccaggtgggagtttcaggagaggaaaaccctggggattgtctgggtaccagcacagtctctcttccctaggaccacacgatttgcctcattccctgactacctggtcatccagatcaagaagttcaccttcggcttagactgggtgcccaagaaactgggtatggctgctggaatgagggaggttacacagaaaatgctagaaaaagaaggggctttaacacatataaactagtgtttctcmaagtttcctctsaaagaggaaaaaaaatcaccttcaatgtttcaaaatttatctagtttgaaagcactaactaaaaatattaaaagacttctttgattgttataggtatgatttacaaccaaaagtgatttttgtagttttttaaaataattggtaaaatgttttcattttgataatcttgaaacaattaattctcgtgagtcttacaggtccctgactgtcatttgagaactcgtgatgtaccttcattttctagataaggaagttgagactcacaggaatataaaatcattctgtctcacaagttctaggccccctgccctgtccatagattatttatggtagatctaggaccagcatcctggcctcccaactcccaggcttagtattatttgtcttatactgggacccctaagatgggtgccgtgcttttagyagctcctctttacagagcagttctgacatagggggcaggggattgaggttcccgaatcactttccaggtaggcctccgggagctgctgaggtgacccttttcccacagatgtgtccatcgagatgccagaggagctcgacatctcccagttgaggggcacagggctgcagccyggagaggaggagctgccagacattgccccacccctggtcactccggatgagcccaaaggtagccttggtttctatggcaacgaagacgaagactccttctgctcccctcacttctcctctccgacatgttagtgactcttcttcctgcctgtctctctcccgtgctgatgggggcctctctgccttgcatcccctgcccctgtcctttgtgtttctcctgtcctccctttcaaatttcctctgccctctttgattgacatggggcctccccagcgcactcctagccaccttctgggtgtggatggcagcagtgccagctagtggcctctctgcccttgttacctccctggtttgggtagggtgggggtatcatgctccagaaacagggcccattctgtgagaatgggcagggacccacattacaattgtgtggtcattttggttttgggataaggtgccaatccatgggagaaaaatgcatggaatgggtgattggaagagggctgggtcctgggggagggaggaggagcaaacagtggcccaatcagtckgtccgtgtacccacaattcccattacagcgcccatgctggatgaatcagtcatcatccagctggtggagatgggattccctatggacgcctgccgcaaagctgtctactacacgggcaacagyggggctgaggccgccatgaactgggtcatgtcacacatggatgatccaggtaggctggggtggggagcagggtggggcagggcctccatcctcccccaaacacatcaaccccttcacatccacagattttgcaaaccccctcatcctgcctggctctagtgggccgggctccacaagcgcagcagccgacccccctcctgaggactgtgtgaccaccattgtctccatgggcttctcccgggaccaggccttgaaagcgctgcgggccacggtatgggctgccccagctaaggacatggggccagtggggaagaagggggtgggaatgaggggccatccttcttgagcaagaccaaagacaacaggtgtggtctggccgaggttgggcaccactcttttgtggctgcgatgaaggagctgaagcctgcgttcactgctgggttttttgccccagaacttgttaaaaatgtaatgcttctgtttggccgggcgcggtggctcacgcctgtaatcccagcactttgggagggtgmggtgggcggatcacgmggtcagcagatcargaccatcctggctaacacggtgaaaccccgtctctacgaaaaatacaaaaaattaaccaagcgtggtggygggcgtctgtagtcccagctactwgggaggctgaggcaggagaawggcgtgaacccgggaggcggagcttgcagtgagccgagatcrcgccactgcactccagcctgggcgacagagcaagactccgtctcaagaaaaaaagtaatgcttccttcctctccaagaacaatagtttagaacgggctgtggactggatcttcagtcacattgacgacctggatgctgaagctgccatggacatctcagagggccgctcagctgccgactccatctctgagtctgtgccagtgggacctaaagtccgggatggtcctggaagtgagtatccccaggaagcaggacaggcctggtggaatctggtcagtctactacaccagatccctcattcaggcagctctgccctcctcaggagtcaggggcttctttccacctcaacgtggcatctgagggtggggttctctgacatggagacaggctctggcccagtacctgcctcacattccctgaaactcctgtcctgagtctgagctgttgtctggatctttgggccatcactcaagcmttcctcttctgtttccttctctgaccccctctctcctttcctagagtatcagctctttgccttcattagtcacatgggcacctctaccatgtgtggtcactacgtctgccacatcaagaaagaaggcaggtgagtgctggccacatgcgttttgaatggagaatggtggtgggaatgaggagggccatttggaagtccttgggatagctatgggagaaggtgaagggactgcctgatggggacataaagtgccagagagtgacagaaggtcttgcagcagtgattggcccaagggttggatctggccaccagctttttttttaaatagagatgggatctcactatgttgcccaggctggtcttgaactcctgagctcaagtgatccttctgcctcggcctcccaaagtgctaggattacaggcatgagctaccgtgcctggccaggccccctgcctttgtaaataaattttcactggaacctggacacacttgtttatgtgttgtttgtgcctgttttcacgctgcggcaggaaagttgagtcgttgtgtcagagaccagagagagagcctgcagaacctcaaatactatctggcccttgccagaaaaagtttaccaaccccctgcctccctggaatgggtggagggtggttgtaaaggtactggaggatctgaagacataatagggtcygtgacccttgtgaggttgtgaagctcccttaaggcacatggtggctgggctgtggatttggggtatgggcagagagtgtggagagcacttccaggggccatgtctgagagactacatgatgccactttgaatgcccagtttgttcatccttttctgttttccccacttccccagatgggtgatctacaatgaccagaaagtgtgtgcctccgagaagccgcccaaggacctgggctacatctacttctaccagagagtggccagctaagagcctgcctcaccccttaccaatgagggcaggggaagaccacctggcatgagggagaggggctgagggatggacttcagcccctctgctctgtaccctttttccttttgtccccggcagcagggaagaagctggaggccgtgggagaatggctgggcagagcagaggggcagcgatagactctggggatggagcaggacggggacgggaggggccggccacctgtctgtaaggagactttgttgcttcccctgcccccggaatycacagtgctctgcttctctgtgtcgccccgcccagccccctggtgtggagggaggggtctcgtttgtgcgcgtgggtgtagctttgtgcatcctctcccagtggagcgatcacctgtgcctcccctccccctttgtttgcccctgtgtggttggtcaaggagggatgtgagggaaatagggaccccccgacttgccctcctgcctcagtctttcccccaccctgtctcttccttgtccttctctggaaaatgccaaaatacacgatgtgaataaaagtacaacggctaaattgtgtcctgtttgataccttgggggagaggcttaccttcctggggttagcaggagggcgcttaagaaaactcctaactctggccgcctccctgccaaagtcaagtctccacttttcactggttctagagctctaggaaaattggggttgggtggggaggtggagtagagtgactaaatgccgacacaaagccaaggaaagatggagtgaagaacccttccctctctttattcacacaggagtggaggatttcccaaatgtccctaactggctagctggcttcaggctgggactcagtccctgcagttcctgccaggccttgccagccggggcgagggttgggatgatcctggcggcctatgcctgtgtgggctgcccctcccgctgtgaaccctgcatttgtcccgcaagttttcactcaggtagactccctgggtacaagggtgcctgctcagcagtcgggcatgagctgctccgatgggcgaaggaggttgtctatcccacagttggagaggggccctctctgccccagtgggcgatctgggctacggccaagttgccaccagctagttccgcttgaaaaccacttctggccccgtgggggactcaagtcgccaagcgagggttcccctgagcgccggagctcacaggtctcgccttgtcccgaaagccccgcaatcgaggcggaggcgaccgagcccccgactctcctagaacgttgccacaagaagggggaacgtcggaacagtgcatcatcgggcggcggccggggcggcggcaggagggcgggcggggggcagggctccgggggactgggcgggccatggcggaggacggcgaggaggcggagttccacttcgcggcgctctatataagtgggcagtggccgcgactgcgcgcagacactgaccttcagcgcctcggctccagcgccatggcgccctccaggaagttcttcgttgggggaaactggaagatgaacgggcggaagcagagtctgggggagctcatcggcactctgaacgcggccaaggtgccggccgacaccggtaagccctcgccgaggaggggtctggccgggccggggccggggccggggcaggagtggcagcgccctctcccgaggccccgaggccccgaggccggtatccgcgcggacctgatgcagggctgtgggacgagggccgctggggtccgggcaggggcctcgcagccgcagccccgtcggtgcgtcgagggggcagggcggagcacatgatgccccttggactatggggcaggtaaggacgttttgggtctcctggaggaaggtggccccggggcgcgcactggggctgtgcccgccaggcgacggggttaggagcggagcccgaggctctgcgggagaccgggggaggctgggccgcgtgggcttcccgctccctgcgccctggcctcccgcgccgtgcgccgccgcacgtagccccagactcctccccttcctcgccggcgtccgcgtccccgcgccgagctgctcgggctccctgagcccccagatctgaccccttcccttcggcaacctgaacgactcccgccttccacggaagggaccgagcccgtgccaaacaggctgagcgatttgggagtgaggagccatcctaccgctttccccaacctggaaacagcaaagcgcaaggcctctgagtcagttaggtctctgccacccacgggcaaaggatgctctcctccatcctccttcctccctccaccgaaatcggagagccgcgggcctgatccaaagaggcatccccttctcgttcattccccagaggcctcaatacaaaccccaggagttggcccctctccttttgctacaaatccttgccttgcaaaggggaggtgaggatgggctattttagaagggaagcagggttgctccctggagaatgctgagtctgtgaggtgcctatgccgagaatagctcgaggaaattggagccccagctgttaaaagagcagagggcagggtgagggccgtggcctctcaggggtatctggaaggctcttcgagttgagtgcagacccagcctgggctggaaaatggacaaaggtcatcttgctggggtgaaaagggggagagcagaaccaagaagaagagggtgagggctggggggctccagggcactggttaggaattgtggggaatgaaggctttctttagtctcatccccctgtggtaccatcttgtcctcagaggtggtttgtgctccccctactgcctatatcgacttcgcccggcagaagctagatcccaagattgctgtggctgcgcagaactgctacaaagtgactaatggggcttttactggggagatcaggtgagatcgaggtggagaggggtgtgtgggacccttccctcactttcctcgttgaggggaaagccacagggtgggctccctgctgaaccttggcttcatctcttcctttagccctggcatgatcaaagactgcggagccacgtgggtggtcctggggcactcagagagaaggcatgtctttggggagtcagatgaggttagtagccaagagagaagataagggatgtctttttccaagaaggatgtctcaccaagtctgtttctcaacagctgattgggcagaaagtggcccatgctctggcagagggactcggagtaatcgcctgcattggggagaagctagatgaaagggaagctggcatcactgagaaggttgttttcgagcagacaaaggtcatcgcaggtatctctggagaaagggacctttgagcctatccagggccacagagactcagagggtagggtcaggccctggagcctgtcttggtccccatgctgatccagaaaaggaaaaaggggagggggagtgacaatctttgcttggggcctatgacttctccagccccaaggtagatgccacctggaaatcccccaatgtccactagggggcagtaggccaccgttcttcgtactccggagaacctggctggagagctctttcttgttcacccttccctccatctgtatctctgccctgcagataacgtgaaggactggagcaaggtcgtcctggcctatgagcctgtgtgggccattggtactggcaagactgcaacaccccaacaggtaaccgggcccaggagccctgccctcatcccagcctgcctcaataggtttggacagacacagcccacatggggcaaccccttatttcaaagacacagagaccttgaacccagagacagtgacttgtccaagggcatccagtccagggcctggcttggatcagagccctggtactctgactcagtcagaaaccacactaagtgtccactggtgccagtgatttttcctcttagagaggcagaaaaggtcttacttaggccagcttcttgttctaggcccaggaagtacacgagaagctccgaggatggctgaagtccaacgtctctgatgcggtggctcagagcacccgtatcatttatggaggtgagtggctttggttcccggctgaggtggagtgggctgaggactagactgagccctcggacatggaggtggggatggggcagactcatcccattcttgaccaagcccttgttctgctcccttcccaggctctgtgactggggcaacctgcaaggagctggccagccagcctgatgtggatggcttccttgtgggtggtgcttccctcaagcccgaattcgtggacatcatcaatgccaaacaatgagccccatccatcttccctacccttcctgccaagccagggactaagcagcccagaagcccagtaactgccctttccctgcatatgcttctgatggtgtcatctgctccttcctgtggcctcatccaaactgtatcttcctttactgtttatatcttcaccctgtaatggttgggaccaggccaatcccttctccacttactataatggttggaactaaacgtcaccaaggtggcttctccttggctgagagatggaaggcgtggtgggatttgctcctgggttccctaggccctagtgagggcagaagagaaaccatcctctcccttcttacaccgtgaggccaagatcccctcagaaggcaggagtgctgccctctcccatggtgcccgtgcctctgtgctgtgtatgtgaaccacccatgtgagggaataaacctggcactaggtcttgtggtttgtctgccttcactggacttgcccagataatcttcctttttgaggcagctatataaatgatcatttgtgcaagaaaaaaaaaaaaacaagaacaggtttctataacaacatctcttactatttttacttgaaaaaatgttttgcgtagcagactgtcatagccttgaacgccggctccctttcttcctccctccaagtggctctggggctgttgatttccgcagagcttgggttggggtaggggctcagcctcaccagctttcagcagctggtctaggccagcagtgcctccccacctccccaaggggaggggtggtggcaagacctcagcacagtctgtggtatcacagggctcactggtagagcaggtagcgcttcatggcagggggcaagggcagggcagacacctggccgagccgggtatcccccaggttgtggcgcacacacaggcggctcaggtgcagaagggagtgtggctccgctgggagagagaaggaggggaatgtaagtatgggtgcagccaccagccagatgtcctcaaactacggggtcctactcagatgcctttctgctttcctgcttcgagtgtgcccacctggctgaaaggggaatttgagatacccggaagttctgcctcccagataagatttcacacatccctagtcagagctgggggtgaagagctggctaaggccctctaaacaacaggccaaggtggctctgacagtggtggagctggcccaggctttgactccagaggcttgggagctggggctgaggtgaggagggatggccctccactctacagcccacacaactgcagagagcagctccaagccctggacccagtcagttcctggggaggctcctcccctgctgccccaccctaaggccctgcctcctccactgctctcctccctggtgcccagggccccagtgtctccatcctgaggtgtggctgaggaaggaagtaggtatgtggcacagagacaggttagagcccagggaatccggtatacagcctgggtacctggctctgcccatccttcttttggacctgtacatcaaacccagtacctaacgctttgcacctcttgctcaggggttgatatctcctgaattctctcatccctgcagttcctccctccattctgaaggttcaccatttactggccaagagaacttgagaaagttgctttctcaagcctgtttcacctctattgctgttgggttaaattaaataacagctgtgaagacccctagcctttcccagcactgaacagaggttgaggcaggctggatgaaggtccatcccctctgctcttgtcagaagagtttccatcccaaaccactgccaccagggacagaaagttctccccacgtctgccccaggcctcacctctcctttcgcccaggtagcggatgcggacctggcactggccccagacagcgcttactgccggatagagggtcctgcccttcagtccgcggaatgctggccccaggtaggtgcccccaatagcgtagcccagagttccctcctccatgtccagaaccaccagcagtctctctggcacctccagctgctcaccctgagttcccgctggatactggggggctccgggccccttgctctgatggtacagcttcccccgcccgatgtcccagccccacgactcgctgttgctgcccagcagcgccgcgtagtggtcagtctgcagcggggcgagggccgtggccacgcccaccacggcatgcgtgcccctctgctctaggggccagctgatctccc

SEQ ID NO: 97846 - DNA, 17965 bp, Homo sapiens
actcctttgccccagagcagagaatggaaaagccagggaggtggaagatcgatgcttccagctgtgcctctgctgccagccaagtcttcatttggggccaaaggggaaacttttttttggagaaggcgtcttgctttgtcacccacgctggaatgcagtggcgggatctcagctcaccgcaacctccacctcctgggttcaagtgattttcctgcctcagcctcccaagtagctgggaatacaggcacgccaccatgcccagctaatttttgtattttcagtagaaacgggatttcaccacgttggccaggctggtctcgaactcctgaccgcaagtgatccacccgcctccgcctcccaaagtgctgggattacaggcgtgagccaccgtgcccggcccaaaggggaaactcttgtgggaggagcagaggggctcacatctcccctctgattcccccatgcacattgccttatctctccccatctagccaggaatctattgtgtttttcttctgccaatttactatgattgtgtatgtgccgctaccaccaccccccccatgggggggtggagaggggtgcaaggccctgcctgctccactttttctaccttggaactgtattagataaaatcacttctgtttgttcagtttttcaccactagcattcctgactgctctctttcacagttcttctccatcatcagggttctctcctttagcacatgggaatctgggagctaaagcctgccttcaaagcatggaaccaaactgcaaactctgtaacctcctatctgtccctgaagtcccggggaacaaacagttttacaccactggatactttaggaaccccaaaacaaccaggtttgcaagaacagtattcataggataaacaaatagcaaatgtacagccttggcttccccaaactccacagtctcagtgcagaaagatcatcttccagcagtcagctcagaccagggtcaaaggatgtgacatcaacagtttctggtttcagaacaggttctactactgtcaaatgaccccccatacttcctcaaaggctgtggtaagttttgcacaggtgagggcagcagaaagggggtagttactgatggacaccatcttctctgtatactccacactgacctaagaaaagaacagttttgtcagccaactctgtcactcagtagctgtttcagcccttctttagggcaggaaaactatggctgagctagtatttcagctgtgctgttgaatatcaaatccctacaaaggatgaagaaggtcctaactgtgacttccaattatggcagcagccctcaaaggatgtgccctggggcagggtgtggaactgtcatgtgtcttctagctcattgtaagcattgttaaaatgcctactgctctgggaattctatactaagttcagctctaccaagaatttcagggttgagcccagaccttaccttgccatgggcaaaggcccctaccacaaaaacaataggatcactgctgggcaccagctcacgcacatcactgacaaccgggatggaaaaagaagtgccaactttcatacatccaactggaaagtgatctgatactggattcttaattacctaaagtaaaaaagagagaaaagtcagccccagaaacattcccagaaccagccttcaactaacaggtttcaatacctcaccttcaaaagcttctgggggccatcagctgctcgaacactgagcttgtgtaaaagttgaactagaagggggaaaaaagagttcagagctagatggagaccacagtccttctgtccagtcatcgaacaaggaaaaccccatggataagatgagttccctgtgtgctttatatctagactggactcctgaaatgttaggaacaaacagttgccaagcatatggctagctgtacagtgatgggttcagactccctctttcactcagccaggaagctactgcaagaacaggagtggagtttccacaaacatagaaaaataataacagtccttgtcctggtattaatcatgttgttctcccattttctcgcttaaaaatccacatttagttctcccttttcctcttcctcccttcttccctactgacaagttcattctaactttgttctaaggcttcttacccatgaggccacaaaagcggtcaaaggttctgggaattcgggtctggggattcacttcaatcagaacattcttctgtgtatggatataaacctgtagcaagccagctcggttcaggggactatccatcagcatcagcaaactctgagcaaagcagaaaccgagacatggttaaggctgaagagaggcagcactcagctgccaacccttccatacagaggctcaaagggttgtgagcactgtccctggagttacctggtgggtgatatctggccgcgcttccccagggtcccgtccattcttcaacaatatagacttgtgcttgtcacagttgagtagctcatatgtcttccctacctgaagaacagggaacatgacgagagaacagcataagcttctgttacctagccccgtggttcttcaagtgtggtccccaaactaccagcagcagctgcacctggaaacttgttaggcaaattctcaggcccaccctagacctactaaaccaggaacactgggggtggagcccagcaagcccttcgggggattactgtgcagccttatttgcactccccagtgaatggtctgagagggaaacaggaggaagggcacaacctgtgacttcacattatctactaatacactggatttaattaaaaaacctgtggctgttaggcaaggccaatgagacatcctggaactaggcaggagttagtagttagcaaggctgaatgctgtgtttattacaggagcagtaagtaggtactgtgcaaaatatcgagtcaccaccctcagtttgcgtacaccaaacatgcactaagtgaagagctgcaaatctgaacaagaaatgtgaaggccgggcgtggtggctcacgcctgtaatcccagcactttgggaggccgaggcgggcagatcacaaggtcaggagattgagaccatcgtggctaacacggtgaaaccccatctctactaaaaatataaaaaattagccgggcatggtggcaggcgcctgtagtcccagctacttgggaggcagaggcaggagaatggcatgaacccaggaggcggagcttgcagcgccactgcactccagcccgggcaacagagcgagactccatctcaaaaaaaagaaatgtgaaaactaatgatgcaggaggcagtttaatcaaagaaaactctcagaagtaaaaggaagaggggttattcccagttttaagacgggcatgggggcagatgcagtggctcacggctgtaatcccagcactctgggaggccaaggcaggcaaatcacttaaggtcaggagttcaagaccagcctgggcaacatggcgaaaccccatctctactaaaaatacaaaaattagctgggcatggtggcacatgcctgtagtcctagctacttgggaggctaaggtgggaggatggcttgagcccaggagacagagattgcagtgagccaagactgtaccactgcactccagcaagaccctgtctcaaaaaaaagaaaaaagaaagactggcatgagcaaaggtacagatggaatcaagacaaagtagccaggtgtggtggcttatgcctgtgatcccaacactttaggaggccgaggtggaaggatcacttgagcccaggaatttgagaccggcctgggcaacacggtgggaccctgtctcacaaaaaaaaaaaaaaaaattagccaggcgcagtgccatttgctggcagtcccagttactcaggaggatgaggtgggaggactgcttgagccagggaagtagaggctgcagtgaaccatcacaccactgcactctgttgcccaggcaacagagcaagaccctatctcaaaaaagaaacaaaaaagaaaaagtggaaacgaagaaaggaaattttgaggaaaattgggagctgagacactaaagggcagtgattatatatgaagctgctttgtaaaccacagaatcctaatgtatcaagcacaaagccaaaaataattctggagtaagcagggcaggatgggaatgactgacagacactatcctaacaactctctgtacactggaaaagacatcagaagtttgatgttaaagaagtggactacatctgtagcagctaaaagaaataattccaagttgcaatttggagtcccaaggagcattagggtggtcagtaaaaagtctaaaaacaaactgttatatacaaatacaagttttggaaggttaagtttttatgtatcactggaatgtatatgtctagcaacattcttgagatatatggctccaaaaagtctgcgaaaaaagggatgtagattttgaaattgaatagttgaagtaatgtcacagagagcacaaagaacaaatgaccaagaactaagtccatgagacacccttagttatagaagaaaaaaaccttcttgaatgaataatacagtttcaacccattagtaggatataatcatgttttctattcttttaatagattacaggcgcaggcctgtaatcccagctactctggaggctgaggcaggagaatcgattgaacccgggaggcggaggctgcagtgagccaagatcgtgccactgcactccagcctggtagagactgagactccatctcaaaaaaaaaaaaaaaaaaaagtgtatttagaacgaagattaaaatcctggcctgacttctaaaccaatgcgatttcttctgggcctattcaattagttctaacgggtaagagaaaggaggaggaagaacactgcccaaggctttaagatagagaactgctggttctattacatgtggggaaagagatgaatgatagataaaaatgcagatgtaaaagttttaaataataaccaggtctggacagtgtatcataggtggatattagagagaggtgactatggatactaatgaattgaaacacgaagcccttacaaaaagtgtgggcagactaggctacataactacgtttctcatctgcccagtaacttgtcttgggatgtggaatgacgcaaggaacgaaactttcctctgcttagactactataccacagaatcctggtaaaccaattggaagcaaggaggtgagggctagaatatcattcaaaaagagcaaaagaaaatgagtactaccggccgggcacagtggctcacgcctctaatcccaacactttgggaggccgaggcgggcggatcacttgaggtcaggagttcgagaccagcgtggccaacatggtgaaaccccatctgaactaaaaatacaaaaaaattagccgggcgtggtggcacctgcctgtagtcccagctactccagaggctgagtcaggagaactgtttgaaggcgggaggcagaagttgcagtgagccgaggtcgcgcaactgcactccagcctgggcgacagagcgagactccgtctcaaaaaaaaaaaaaaaaagaaagaaaaatgagtactaccatcccaggatgtcaaatcaacgcaaagccaaccaagccaccttccttcaaaagcatctttcacccctctctgctttctacatccactctgggccccttaccctcattccacggagtcccaacctatcgatttactacttctccacttcctgtcccaaactaccttgactgtctccagactggccccttccagcaccacaataagcctacggcctccgatcttgtttcctgcccctagtcggggccgcttgggtggcagagcatcccagtcctgtgcctgctccccaccgcttcgttcacgaggcttgaatccatcactgggcgcggccatcttgcaacaataccggaagttgcgctaacgctcttaaataagaacagcgcggcttctaatcacaaatttccttccggctgccattttgaaagtgggccaggaaatggagatgacttgctgtcttgcgctgccctccctgggagggcagccttccagaaaggggcgggacttccgtatgcgcgattcctgtgcgcgaagttcgggtccgtagtgggctaagggggagggtttcaaagggagcgcacttccgctgccctttctttcgccagycttacgggcccgaaccctcgtgtgaagggtgcagtacctaagccggagcggggtagaggcgggccggcacccccttctgacctccagtgccgccggcctcaagatcagacatggcccagaacttgaaggacttggcgggacggctgcccgccgggccccggggcatgggcacggccctgaagctgttgctgggggccggcgccgtggcctacggtgtgcgcgaatctgtgttcaccggtgagcaacctccgccygctcgccggacgcttccagtccctcccccaaaccccttgccctgtccccgcgcccctccacgggcctagcatttcctctgagcagcggcctggcctgatcaccacccatctccccacagtggaaggcgggcacagagccatcttcttcaatcggatcggtggagtgcagcaggacactatcctggccgagggccttcacttcaggtaatggcgggcagagcctgctgaccctgacctttcacccttgacgccgacccagcagtggctatagtcggacgtgcaacaggattcaacgctgctcttttcccaccctcctcatccctgcccctaggatagtgggtgctgcgcgaacctccagcagcatacaaactgttgttttccagagggacaagagaatctctccttgtctgtggtcgtggagaggagcaggccaaaaaacgcgtggtgaggggaaaccgggcaaggctagtgaaactgcggccttttctttttttttttttggagagggagtcttgctctgtcgcccaggctggagtgcagtggcgcgatctcggctcactgcaacctccgcctcctgatttcaagcgattctcctgcctcagcctcacgagtagctgggattacaggcgcccgccaccacgcccggctaatttttgtattttagtagagacggggtttcactatgtagatcaagctggtctcgaactcctgacctcaaatgatccgcccgcctcggcctcccaaagtgctgggattacaggcgtgagccaccgcgcccggccgaaactgtggcctcttaatacctatccctgtcctctccaggatcccttggttccagtaccccattatctatgacattcgggccagacctcgaaaaatctcctcccctacaggctccaaaggtaggtctgagcacttggtaatcacatggcaggtgggatgatcaaggtagctggcaagaaaccccaggggaatatggtagtgtcaggcctttaggcctctttccacatctgcaagagctgtaacaaaaatacctgcctcctggggtcaaagcagcaaattctgaacacactgtgtttgcgtgctttttactgtctcctccctgacgtgtattcaataagagtattgtttgtccctcgtcttgttcactgcctagatcaaagctttgttttaaagccttttttttctaactgcttgacttactatatctacagttacatccactagtacactctgttctggagaagtttgtccctaagcttgactagttcacctgttctctccttctagaccatacataaaagccgtgcctttgagttccccagacctyttcctcctccccacccacgcacacatatacaccctgggtcaggtagctcacctgtaacctgtaatgtacttctttgtgctatacctagtgcaggtcgcttattcatttactagactgggccctgggaataaaagattcattaaacacaattcttgtcccccaagtccttacaggagacatgattacggtacagcacgaaagcgcccacgttagaggttgcacagagtacagagggggaaagagtagtcagctctgctggtgacggggtttgcagttcaagkcttcacagtgggtgagggtgcatttcagctgtgctgcgtcttgtcttccttgtcagcctgattaactctcctccccccagggtagtgccaggctgtacaccattgcacagggcatacagggaggaacatgaaggagaaaatgcttgggaaagggtgtttggccttgaccagccactgctgacctcaatctcagacctacagatggtgaatatctccctgcgagtgttgtctcgacccaatgctcaggagcttcctagcatgtaccagcgcctagggctggactacgaggaacgagtgttgccgtccattgtcaacgaggtgctcaagagtgtggtggccaagttcaatgcctcacagctgatcacccagcgggcccaggtctgactcccaccaccatctgcgtggtgtcagcctttccttcctaggcccagagtattgggaattaggaaaggcagcttattagaaaagcattgtcaccctagtgccatttccacctaaaagctgtgctaattgccactgtgaaataaggagagccagcattagaactcgatagcactcggtgttaggaagcacagaggaaaatggccaagtcttggcttttcctgcacctcttcgagcagagaggcttatgttacaggtttgcctgacaggaagctaaggcagtgcatgttgtattgagagtgaagggttaggggtcgcaaccttcctttcagctccccagtcccctcaaaccacccctcccttcccctcttcacccctgccctcaggtatccctgttgatccgccgggagctgacagagagggccaaggacttcagcctcatcctggatgatgtggccatcacagagctgagctttagccgagagtacacagctgctgtagaagccaaacaagtgggtgagtcgcaagagccgtggggtgagggcttctgagatgcaggaggaggaaagactccatgggtggggctcctgacccaggacagggtctccctgactctctcccaccacagcccagcaggaggcccagcgggcccaattcttggtagaaaaagcaaagcaggaacagcggcagaaaattgtgcaggccgagggtgaggccgaggctgccaagatgatatccttctgctggagagatctcagcccagcccctagggcacctgagttccccattctccttcatgggcaggctgatgagactaaggcgaatgcgactccgtgctctctggcccttggctccttgttgggggtggggactacagatgagatctgaaatcttagtggtagtacctgagccatgactccccactgtaaggccagatcaatagcattggtggccttgccttcatttctggtgctgcccctagttcctggcagcagcctgcagggaggcccacaggtggggtccamggtagggctgggcacaagccacctgagcgcaaccttggatctgacagcccagaggaggactggagcaagggagtgtggtaaggacagggccagggattgagacctgcccttgcgtgtaccttaaccctcctcaccttggagaagcactgagcaagaaccctggctacatcaaacttcgcaagattcgagcagcccagaatatctccaagacggtgagtgtgtcagcccagcgtctctgatggggctgccttgagaaagtgctttcagttaaggcacattgaggtgagggaattcgaaccttgcttgttcsggtttctactcagattggcttctctggccggcgcggtggctcacgcatgtaatccccgcactttgggaggccaaggtgggtggatcacctgaggtcaggagttcgagaccagcctggccaacatggtgaaaccccatctctactaaaaatacaaaagataatgagcccgctgtggtggcgtttagctatattcccagctacgcaggaggctgaggcaggagaatcacttgaacccaggaggcggaagttgcagtgagctgagatcatgccactgcactccagcctgagcaacagagcaagactccgtctcaaaaataaataaataaaaaattggcttctccgatactcctcctrtcaagaatgattcctctgggttccctgaccttttgttctaatcatagctgctgctcagcgctctggatccctaagtgcgagcagaaaccatgtgttactcattgctgcacccctgccctaatctgcatgtgttccatgttaagtagctgctgaattgcaggggtcggaattgaggtctttgcttaatgcaagcatctgtcttatttcctgccctgtagatcgccacatcacagaatcgtatctatctcacrgctgacaaccttgtgctgaacctacaggatgaaagtttcaccaggtgagagatgtggccacactgtggggtatcaccaagaacrtgggacctgagtctggttgtttgggctctggagcctgctacagctattcatatggctcagagacattgaaccaaaattagaaaagggggtggttgacagtttctatcttgcatctcataggattgattttatgagatcaaataggattattcacataaaaagcactttaattataaagttttcatctaaccaaaaagtgatgaaagatgatactcagttttcttactcaagagccctcaaactcctctggtgaatggagggatgttaggaaaggagatgagaaatagcagtggccatgagaacatgcctcctcctttcatgagcctgagattcctggctgtcaaccctgtttatcttttctcttgggagcaaaggagggttcaaagctgagtggggcctgaagctgtcaattaacatgtgcatttctcttctctgtttcttgttcatctggcgatctggcaccacaggggaaggtaagctgttgttgcttctgtggggtcctgcaggccaccttctccagtacccgcctcctaccctaccccctttcccacctccccgaagacaaaccctcaatcagggtaggagggtcgtagagggaatggcctagagtgtcctgcctctcacatttatgtcccctaataatgtcattatctatcttttttttcctacagtgacagcctcatcaagggtaagaaatgagcctagtcaccaagaactccacccccagaggaagtggatctgcttctccagtttttgaggagccagccaggggtccagcacagccctaccccgccccagtatcatgcgatggtcccccacaccggttccctgaacccctcttggattaaggaaractgaagactagccccttttytggggaattactttcctcctccctgtgttaactggggctgttggggacagtgcgtgatttytcagtgatttcctacagtgttgttccctccctcaaggctgggaggagataaacaccaacccaggaattctcaataaatttttattacttaacctgaagtcaaggcttcacgtgttcatgaactgggtaactggcagcaagcatgcgcacgttcacatgtgcgctcctgggtctgtctttgtgtgtgccagcagggggcgcaaaagaatctggctggggcggctaaggggaagcaaggcctgggctccgaaacaggacccaagctgggaaggctggccctgagttctcsaggcccagctgtgctcttcacacaccctccatttctcccacatcacccatttttttaaggctggacagccatggctttgctgagccagattaaaaatctgatgaccccaacaggagctgcttccttggcagcagggttccttgtggctgtggggagcctgcctgtgcctgttgaggcacttctgtgcccagaagcycagtggatcgcgtggcctgctgtaggccccccagactccatttctcagtcaccaggcgtgaggagctgctagctaacaggcctcccctggggaggtgggcttttcatgcccgcagttccggggccaacagaacaggtgcctgtctgttcagtccacagataagctgacacttatcttcccaagacaggccttcccgaatctcaggcaccagagaaacagagccaccgtttatacctgaatctcccactactgcccatttcccatccctgcggggagacaaggaagatgtggaactcagacaaaacataggtgcaaagtatgtccaggaactgccaaatgcagatagggcagcaggtggatctgaacagagggactgggttaatctgcttcgatttttaagatatttttctctgcttggggttgagtatcatgaaagacaaagcagacgtcgcagccccaatcctgagttgctgggaggctaagatgagataaacaactagacaaaagacaggtcaagtgacttggatcagtcttcctcatgttccccttcacactttatttatttcatgctcccaaggcgggaagacaatggaggtgcctagggaaccagtgtttccacatcttgctgcagctgtaaaggcagccattttgtctccttcccattgttcccctttgcctagtgattcgtcccccatccagaggggtgaaggtcagaggttgttggtcagtagtcctccatggtcttcagggctccctgaaggttactgccgagagaacccacccgggagccatctttaccagacagtgttaggagcttcacaattagaccatccaacactgtactggaagatggacccagggccggccgacagagaactacggtgcgcgctcaccagttgctacaggggaccctggccacaggccaggtgaggtctcttgagagggggcgagccaaccccaagctcaaggtcgactgtgggttctggatccaccaggtgacaaatcgcactgggtgggaggaggggctggggcccattgtgtcccttagtggcagccagccaacaagaaccaccccttgtgcaacgctctcagctcaagacgaggggcttccggggtgcgtgggaagtggggagggggctgcagccagctaagggctggggacctgaggcgatggatgttgctgacacagggacaggggcctccatcattacccggcagtattagagactcccaaccgcacccaaacactgctgggtaagacgagggcccccgcccagcccgcccaccttgggtcaggcagcttcaggcccaggatccctgcggaaaagctgcagatccctggctcccatccccccaccacccgagtccctggggacacttcctggtgagccctgctgcccgccaccagccacaccctgggtcgctgatcacgaggcccaggttgcagtccaagcaggccctccgaagcccctcgaccgtcggcccgccgcctctgagccaccttcccctacccccggcagcctttcccgacccgcgacacacaccgatttacccaccctcatcccccctctgcagtcccaagctcagcccaggacctctcccctggtggcctttacctgtcaccgggcccacctgcccccagagagtgggtgctggggagacgaaggggctttaaggccccagattccacggcctagagcccgccctggcctccgctcttcctccttccttctccgcctgccgggcagccagcgcaggctccttacctgggccccgcctgccaccctgcgcacaggtgtgtcctcctgccataggctgcccccccactgccttaaccccttccctcccagcgccagccacgggcacctcctctaaggcttggccactcctctaggcctcccaccctctcccaggggcctcttttctccaacctgcctagtctcacccctgtctccagaggtacaaaaagcgggggctgtccttgggtcccctccccacagcagatgctgcccccaggactagcccattcctctgtggcctcagaccctgcccacagcggagctggcaggccagagagatccctgaggtcagcgaggggtcagctgggcaggagttgggctgtgccgccccgcagtgcccagcctgtgctgggatcccctgagggaaaggggagggagaaggccccgccaggcctgtgaagggcaggcgggtcccagcaaggtgtcgctagtgtgaagttacccaccgctacccagagaccccagctggcccggagcatcagccttgcccctcgattgaggcctgcagagggaacgatcgcgctccactctccggaccgagctgctcccggacccacctcacagcacagccctcagtggagtccaagtcccaccccaagggcaggtagcccaagggcggttagaggaggtgggacttgcctttgtgcagctgcggcttgtatagaaagggcgttgctgggagaggggacctgggcccgacaggtgattgccccacccgtgccctggagggccacagccccagggagctattgggttgctcaatccctcgctgttctctctcccaggctttgtttgcttccttcttaatacccgcctgcaattatttgatgcttgtgatcggtttgtgaatctgtctccctgaccagcctcctaagttccaggaggtcgggggactgtgaatgcctgtgacgccgggggctctgtaaggatttgctgagtaatgcacgcccagcctctgggctttgggacctgtgctgtctcagcctttccaggagtgggcgccagcacttcctgagggatgactcccaccggctttactccccaggacaccagtgtttcaaataaagaagaaaccccactcctgacatgggggaaggaagaggggacaaaaaacaaagcactcttcacgtcagccagctcttcaaactctgcccaagaggataagggcagcagcggcctggatgaggggaggagctgggcgtgcccgggtgctctgaggagcctgtccctgttcccgccagaggggacgcagccgggctggcctcaggtctgcgcttccggctgttaactactcttcttagttcagatctggaactcagcatcaggggagtgtgatcagggcccccctgagggtggccccagctgcaactccagggtaaggagtgtgggctctggggtcagacagcctgggttcgaatcccagcctcactgttccatagccctgtgaccttgggcaagtgaccaagttacttagtttttctgtccctcagtttccgccacggtaaaatgagaatgacagaagtgcctagactgaactaacgtgtgtagtcttttagtgcctgggcacatggcaagcgtgtgatgagtcactgtgcccgtcttatcgtcagccgtcatctcggtgcttttcacaaccaccctgttatgatcgccctccattttaaagaaggagactggggagcttcacccacggtcaccctcccacgtgcgaggcggagtcccgacccacgtccgtctgacggaaggcggagctttcacgcgaggcacgcacggaggcacacacagttacccatcctgccctgccctctggccgcccactcactgggcaagcaaagggctcagaggcgacacacagtgatcccagggctttatttacaagaggagaagggttggccctgcctggggcctggctgggctatatacagggtcagggagaggtgggggggatgcagccatttaaattacaaaagaatggggcactcctaggttcaggttgtgagtctgtccatcgcgaaatgcttccacagggtcagggctgaggctgccaagagaagggagtgagggagtgagagggtagctggaacctggaggtggaacaagagggtctggggcagctgggaagcacagaatgaggctgcggccaccccatccacccagggaaggcagtggagccaaggacacagggcagggcagggaggacacccaggcagaagagctgtaccatggccacctgaggacagcaccgctcacttcctcttgagggaacccttgctcttctccttgtctgctgaccgctgcttcttcactttctcctccctcttgttcttagtgtgcaggttctcatacacatcctccttgtgtctgcagccgggtgcaggggggcaagtacaggcagttggtgcaggtcaggagacagcacagggggacccggcactggcagtcccctctggccaccccgtctcacaggtgacgcagccacggtccctgcactagactccaagctcctagaggacagaggctacatctcatacacgagtgcgctgctggtacctagcagaggcccacacgtgtgggcactcaggaaatgcttatgaacagaaggggtgagaaccaagcctgaacttgaagccaggtccccccagctgcaacacttgtcctctccagaaagtgaggattgggctgggcaggacaaaggggtggatgccgggcggtggcagtcagggccactcacttggacgaggtgcgggaggccttggcatgggcattcttcatggctgggggataggtgatgttcccgtactccgactcctggcccttctgcgactgtgggcagagggacagtgggaaggtggtggtcccagcagggccaggtggcacccatcctgcactgcagcccccccccccgccaggccctgctctgcacgcacctgcaggacctccagcttcttcttagtggtttcaatgaactgggcgatggccacgtagatgaacttgtactgcgcctccgtctgcaccatgcccgagcgctgcgcccgcaccatctggatggtcttctggatgtcaatgtcacagtccaggcctgggtggggggcagtcaaacctcaggtccaggcataggcggacaccgaggggctgctcaccccccacccccaaacccccaggtgcccctcacccttggtggagatgttctccatgagcatgtcgatgacaatgatggtgcctgtgcggccgatgccggcgctggggaaagacgggggtgccatcagaggccagtcaagccctccccgggaaggggggtacccagcgctcagctccagccccaggcaccacaggagcagcctgagcctccagtgatgggagggaatgtgcccagggtcaccgggcaagtgatgatggaggtttgcccagctctgcatggacacgctccacctcgggctctgcggtgctgacgctggctccccagctgccaccatccttccctcctccactcctcgcgccgactcctcactcctagtgagtggctgcccccaccccggaagacctgggacccccaaatcccaccactgtcctgccggctcccaggtaccctgagccctccccgcctctccctgaaggagttatggagcgtctctcagcatggcttcacttcccttttccttcaaaccctgacgtcagggaaaggatagccctgagacagcagggtgcgggggcacagggtcaggggactcaggggagcagtgcagtaggaagtttctctcctttcccagccctgggcaaacagacctcagggagaccccaggcccaccctcagctgagcccagcaagctgatgccctgagtcgcgctgtctaatttcaaacccagattgtcaaaaataaccccccacacccacttccttcctgtaacgtctaaataaaggccatggggctttcaagaagtgtgtgaatgtgtgtgtggcgggtgagcaggagggtagctctcggggatgggcctgtccctgagagagcacaggacagagccgcgtccccggacagcccatcgggggcacctctagattcagccgacttgccctgtcccaggacaaacagctgctgggggaagaggaggaagccagaggccgtcgcaggcctggggtccacggagggagtgggaagggaccggggcaaggcaggttcccattcccctattctctgcctgatgtgagttactaaactagtaacagcgcccagtttttgagggctgacggaattccagccacaacgatagggtctcattgagttctcacgacaa

SEQ ID NO: 97847 - DNA, 21809 bp, Homo sapiens
cacacacctctaatcccaactactcgggaggctgaggcaggagaatcatttgaacccaggaggcggaggttgcagtgagctgagattgtgccattgcactccagcctgggtgacaagagagaaactctgtctcaaaaaaaaaaaaaaaaaatactgtaaaataacaatctttagaagagttagaataatgttatttttgtttgtttttttcgagacagggtcttgctctgtcatccaggctggagtgcagtgacgtaatcttggctcactgcaacccctgtctctcaggttcaagagattcttgtacattagccacccaagtagctgggattacaggtgtgtgccaccatgccagctaatttatttgtatttatttatttatttatttatttattgagacagagtcttactctgtcacccaggctggagtgcagtggcgtgatctcagcttactgcaatctctgcctcctgggttcaagcgattatcctgcctcagcctcccagtagctggaattacaggcatgtgccaccaccacacccggctattttttttttttgggggggggggtagatatggggttttgccatgttggccaggctggtctcgaactcctgacctcgtgatctgcccgcctcagcctccccaagtgctgggattactgtgtgagtcactgcgcctggccaatttttgtattttagtagagaaggggcttcaccattttggccaggctggtctcaaactcctaaactcagatgatcagcccgcctcagccttacaaagtgctgggattacaggcgtgagccactgtacccagccctcaaaagctattttttgacatattaagattggcaaagtacgtaccatttgacccagaaattctaccttctaagaatgtacgccgggcacggtggctcctgcctgtctgtaatcccagcactttgggaagctgaggcgggcagatggcttcagtccaggagttcaagactagcctgggcaatatagagaaatacccgtgtctacaaaaattgcaaaaaattagctaggcatggtgacatgcgcctgtagtcccagctacctgggaggctgagttaggagaatcacctgagcttaggatgttggggctgcagtgagccatgatgattgcaccactgcactccagcctgggaaagaaaaaaaaaagtttcccacatagtcatattactcaatgcgtagtccatgaatcaagagcatcagcatcacttgagaggtctacatttcaatgagatcctcaagcaatttctatacacgttaacatttgaggaatactgctacagagtactcatgcagaagagcaaagatatatctatggggatttaaacagcgttatttgtaatatggacaatttttaaaaaaaagttaatatccatcaatagggaacagttaaaagtctagccaggcttggtggcacacagctgtagtcccagctacttgagatgctgaggcaggtcgatggcttgagcccaggagtttgaggctgtagtgcacaatgattgtgggcaggaaacaggacctcgactttggaccagattcaagactggctgaaacagggaagaggcacagaaagcacttctccgtaagacacgcccaccagcacgacagtttaccattgccatggcgacacccagaagttactgcctttttccataacaacctggaagttaccaccccttttctggaaatttctgaataacccactctttaatttgcatgtaattaaaagtcaatataaatgtgactgcagaagtttccctgagttgctgctctccacacactgcctagagggtggccttgctcggtaggagcagtcatggggctgtaaaactgcatcctcaataaagctgtatcttctaccacatgctcaggaaagaaccatgagccttattgggctaatcgccaatttgggtgttcacctgccctgcatcagttgtgcctgtgaaaaactactgcactccagctgttaccggttgagggtaattgtccaggttcttggtgttttgcacaaagaattcgacaaaacacacaaacaaagcaaggcaatgaaagcagagattttttttgtttgtttttttaattaccgtgcccgcgagacggagtcttgctgtgtcgcccaggctggagtgcagtggcacgatctcggctcctgggttcaagcaattctcctgcctcagcctcctgagtagctgggattacaggcttgcaccaccacgccccgctaatttttgtattcttagtagagatggggtttcaccatgttggccaggctgatctccaactcttgacctcttgatccaccaaaagcagagatttattttaaaggaaagtacaatccacagagtgggagcaagctccagcaagtggctcaagagcattggtgacagaattttctggggtttaaatacaatctagaggtttcccattggttcaccctatgcaaatgaagtagtggccgactgccagtctaattgtgggaggggaccaatcaaaatgaagagagtaggcctgctatcagtctgactggttgtgagaggggaccaatcagacgtactttcatttttcaaatgccatacagagaaaggagggtttgaaaagggagtactctctgatattcagtcagcatgattcggccttagattccctgcctccggaccctattctcctgcctctcagcctggacaatgtagtgagactctgtctctagaaaaacacaagaaagttccgggcgcggtggctcacgcctgtaatcccagcactttgggaggccgaggagggcagatcacgaggtcaggagatcgagacgatcctggctaacacagtgaaaccccgtctctactaaaaatacaaaaaattagccaggtgtggtggtgggcgcctgtagtcccagctactctggaggctgaggcaggagaatggcgtgaacccgggaggtagagcttgcagtgagccgagatcacgccactgcactccagcctgggagagagagccagactccatctcaaaaaaaaaaaaaacaacaccaaaaaaaaaaaaaaaaaaaggaaaaacgcaagaaagaaaggaaagtggtagtatatccacataatggaagactagacaactatgagaaaaagaggtagatttatgcttagtgacatgaaagaagcccaagacatattagaattgaataattagaagaaaaaaaccctaaactaatctaaaaatctttttttctttttttttgagaccgagtctcactctgttgcccaggctggagtgcagtggtgcgatgtcagcacactgcaatctccgcctcccaggttcaagcgattctcctgcctccgcctccggagtagctgggataacaaacgcccgccaccacgcccggcgaatttttgtattttcagtagagacagggtttcgccatgttggccaggctggtgttaaactcctgacctcaggtgatccgcccaccttggcctcccagagtgctgagatgataggtgtgagccaaagcgcctggcttttttttttttttagacagagtctcgatctgttgcccaggctggagtgcagtagcgtgatctcggctcactgcaacctctgcctcccgggttcaagtgattctcgtgtctcagcctcccaagtagctgaaactacaggcacaagccacaacgcctggctaattttttttctttttttgagacggagtttcactcttgttgcccaggctggagtgcagtggcgcgatctcagctcactgcaacctaggcctcctgtattaaagcgattctgctgtctcagcctcccgagtagctgggattacaggtgcgagccaccaccccagctaattttttgtatgtagagacggggtttcaccatattggccagactggtctcaaactcctgacctcaggtgatccacccgcctaggcctcccaaaatgctgggattacaggcgtgagccaccacgcccagcctaaatattacttttataattgaaagagactctatctagaccagccgatgggggaaaaatatcaaggatgttgtggagtatctagctctcattacacagtgtaacttcagtccttgccaactaaacacgaaataaaaccttcaatagctccccacagctttcaggataaagtccagatccttcagtgtgatccaagtctgtttactgcttctaccatattccaacccccgactgcacctactgttccagccagcagaaccacctgctttctttgcacaggcattgagctctttcttctccaagcattaccacaggtgattcctgcctctgaaatctctgccccgaatatatgatatcatgtatatgcatatactatacaatgatccctagcacttagtaaaagctctataaatgttgggtatgattattataacatgtctcattatattgaattacttgtgtacttaatcttgtcactgaactgtacacctcttgaagataaaagataaggacttctgtgctttactgtcccggagcacagggacagattaagtgcttaacaaaagcatggcagggcgcagtggctcatgcctataatcccagcactttggaaggccgaggcgggcggattgcttgagcccaggagtttgagactagcctgggcaacatagcaaaaccttgtctctacaaaaaatacaaaaaaattaacttggcatggtggcgcacacctgtagtcccaggtacccaggaggctgagacggaaggactgcttgagcccaggaggtggacgttgcagtgagctatgattgctccaccgcactccatcctgggcgacagagggaaactctatttcaaaacaaaaataaaaacaaaataacaaaagtgtatgttcaaggacaccttcctaacccttacatcacaacttttcttcccatctaatgtgtcttcctctttcttcttggccaaggaaactcatatccatttcttttgactacatcaaaccacatggatttttcccttctccacactccaacaatacaataactttcatttgtatagcacatctcactcttcagagtgttcatatttattatttctttttcctcacagcaaccccagtaccaaggacacaggccaggggtggggaggagcaggaaaatgtttactaagggtcaactaagtgcaaggcgatttacccacattatctcttttaatcccttaacaatccttacaggtggacgttttaataatccccatttcacgactgtggaaattagacctcagtaagatttcataacctgctgaaggacacacaggtattaagtagtagagatgggttttgaagctggtgtctctgactttaaagtccctactggttccatgacaccaagtaaacagatttgcctattaaccacattcctccaagctgccctgggcaggaggtaatataatacttcctgatttcttgcccaccacatcttccaccagaccactttgccgttatataaagtctgtgggcacaatttaacaatgaatcacatgccatcttacctggttacctcattgtttcatttacattagattccacaacaagattggtaacatccccctttccccaggcaggaattgtgtcatcttaacctccctgagcctcagtatcctcttctttcaaatgtctatcttacaggactgttgcagagattaaatatcagttgtaaagatgtttgacataatgtctcgcacaaactctccagaaatatttattgcatctcaacatctttttcatctccttcaacatgtcagacaggcctgagtgcctgggtttggctatgccagttcctgttgattactgatataacaacgttggatcaggagtattttagtgggcagatgttgaattttctgccttccacccactaaaaggtttgcatcaaaccagtccaggataactcatactggatccctgtcagttgatatagttaagctaattctacagataacaaagagtcttgggtacgtttagctagcaaatgcagatctgccaagactccaacccagttcttaaggtatctgggtctggactccttccgctccaccaagccaccttccaaaggtctacctgaaaataactaatgagcagaaactatagggggaaggggaaaagaccccttatcttggtgtttcttgcttttcctcgcagccccgccctttttgcttcgaaggacgagtttttcctgaattcacaatacttttgcattgaagatgtccggtccctttaaggtcttgggtgacgtaatgactagccccgccccctctcttctcgcttctcagccctgcccacttctttttgtcctcagccaattagcggcccaacgccccttccgcgcctcatccgggttcccgggacgggaaagtggcgtggtaaccaggcaactactgatcaatcccctccccggctgatttgcgcatcaggtagtcgcsgctctactctcaacggtggcgagctgcagtwgccaagtgccccgtccccgttgccataacagcagtacacaacccctccttcccctcgcccgcttgctaaacagtccttccctctcgggaccaagggcctctccagaactgcttctgattgagcagaaacagggtctgagcccctttgctaaggcgaattgagtgggagrgttggagactgcgctttaggctggtgtaccagagggcccaaggaaattggcccagtggggagggaaaagtagaagaaatgaatggagcagggattacggatggcgcaatgggagctgagaggagaggaggaggaattggtagggaagattggagagcatggcttaagggggaggtgggaagaatgggggagagggaagcccaggaaatagggacacccggctgctggaggagagctggagtcactgtgaaggacaggaaaggcctgggggtgtgggtgacatcctgaagggagggggtcctcagtggaaagtgtgaagtgggagttgagartcaaaatgagatgttcacagggataaggaaagaagcctagagttggtgggtcagaagtcatgggggtgatgggagtggcacgtgtcaatgacgatgaaggagctgaaggctggcagaagctgatgagaccttctttttcaggaggaggactgagcttatctgactccagagctttcaggagggaagaaagatgtcagatgaagatgatctagaagactctgagccagaccaggatgattctgagaaagaagaggacgagaaggagacagaggagggggaggactacagaaaagagggggaagagttccctgaggaagtgagagcctggacaaggaggggtcctagggctgaaggvgggggttgggcaggggagagacaccttactccacttctacctgcagtggctgcccacccccctcacggaggacatgatgaaggaagggctttctctgctctgtaagacaggcmatgggctggctcatgcttatgtcaagctggaggttaaagagaggtgcgttttggggggaccagatgaggactgtgagactgtagggcycctatctcctttcccactgtcattcctgggtgttctggttgagagtttgactcttctcatgcctagtggaaagggaaggacagaatttacttttcaggagctctgagacttctcctatcaaagctgacctggggaattggagattgagagtatatggggggattcctgctggattcccttatttgtctttcagagtatgggttctctgtccttcacagacacaggtctctctgcccactgttaagaacccacctaccttctcttacccttcttctcccctaccatctgttgcccattcttctcmccattayaagccatctccatattgccttctgctttagcaactctgccagtcctcactgggtgcttaaccctaaacctggtttcttctccctcttccatctcctagggacctgacagacatctacttgctgcgctcctacatccatctgcgctatgtggatatttctgagaaccacctgacagacctgtctccactcaactacctcacccacctgctctggctcaaggctgatggcaatckgctgcgaagtgcccagatgaatgaactgccctacctgcagattgctagttttgcttataaccagattactgacactgaaggcatctctcatcctcgtcttgaaaccctgaatctcaaaggtgggtctttaggatgggctacacaagattctttccttcctagcctgaggccaacagaagtgggcagtatggtccttggctagggcacrtggcagtctgcattcattcattcattcagatacgcaatatgattcattatgacagttctacatgctaaccatataggatccaataagacaaggaacgtccctattctcatatagcttatattctaattgggagagacaaacaagtaacaacaaacacagtaagtacattcatgtagcatgttaaaaggagacaagtgccttggaaaaaatagatcagagtaagaggaatgggggacacaggtggcaatgtyaaatagattggttaggacaaccatcactgagaagatgacatttgagcaaagaattgaagaaggagagggaattagacatgtcagctgcttcattcactcttcaaaggcttaggtggatatgtccatcaggaccttggactacctaccacaccacttgcctcagggctccagagrtattaagtctggagctggccttcctcagtatctaccctgctttgcgaatggtaggatgatttagaggctccccaaattcaggctctaatgctgagcatttggagtggcyctttgagctcttgaaaccctcctccscagggaacagcatccacatggtgacaggtctggaccccgagaagttgatcagcctgcacacagtggagcttcgggggaaccagctggaaagcaccctgggaatcaatcttcctaagctgaagaacctctacctggtagctcactgggtcagagggtggtgcagggaagagggcactgtcctgggggtcaggatgcctgctttctagtaggctcagctactaacttcatcattatgataataactggtattattatcaagaccatagttggttccagatgctgtggagatacacagccacctagcagggctgataatatataatgtgtggataatacagagataatttaccttgatacaggtagtagcaaaatggaccataattgaggtacaaacatcagtctgtggaaatgttttaggaaaaccctcctctcagactgggtttttcttcagctcttacactaccaccacaacaatcatcaacatacgacttccgggaccaaaggtgtgggggtttctccccatacaccaagtagtagacaccagctgggtgatctctaattcgattcactgtctacctggggatggcatcaaatcccacagattgagggctcggttcccaagagtgacccctacaccgcccacatacaccagttgcaagtccaagcctccagaacttctgacacaccagcttcaacatgaagctggttcccatgacctcttctctggatttaattaattttctagagtggtttttattagtttattgcaagggcaaaggatacagatgaagagatgcttagggcgaagtatggggatatgggtgcagtgctccatgcccttcccagatgcatcaccctccaaaagctttcacgtgttcagctacccagaagctctctggacccagtcctcttggcttttcatggaagcttcatgatcttagtattccttccccyaggaaactggggaggctgtcgctggggagggtcttaagaaccacaatcaggccgggcgcggtggctcatgtctgtaatcccagcactttgggaggctgaggcgggcggatcacctgaggtccggagttcgaaaccagcctggccaacatggcgaaactctgtctctactaaaaatacaaaaattagcccagtgtgctgacatgcgcctgtaatcccagctactagggaggctgaggcagcagaatggcttgaacccagaaggcagagtttgcagtgagctgagatcacgccactgcaatccagcctgggagacagagcaagactccatctcaaaaaaaaaaaaaaaaaraaaaaaccaaagaaaaacacggtgaaaccccgtctctactaaaaatacaaaaaaaaaaaattagctgcgtgtggtggcaggcacctgtagtcccagctactcgggaggctgaggcaggagaatggcgtgaacccaggaggcggrgcttgcagtgagccgagattgcgccactgcactccagcctgggcaacagagctagactctgtytcaaaaaaaaaaaaagaaagaatcacagtcagaaagagggagtggggggaaagattagmgctttctcttggagcaggtgaaaagacggctggagaagttcctgagacctgcccctgaggcccagcacacccaactttataacaaaagactgcaagaagggctattatgggggttataagctagggactgtggatgaaaaccgatatatatattatatattatataattatatattatatataaatatatattatatattatataattatatattatatatwatatataattayatataatatataatatataattatatawtatatawtatatattatataataatatatataatatataatttatatatatatatataatatataattatatataatatatataattagatataatatataattatatattatatataattatatataatatattatatataattatatataatatataaatatatataataatatatattatatataatatatataatatataaatatatataatagtatattatatataatatattttatataatatataaatattatatataatagtatattatatataatatataaatattatatataatagtatataatatataatatataatatatattttatatattatataatatattatatattatatatataataactccacaggaagccactgaaatatttagtcttttagactcttaagcttcgttattctgggatggtgctgatgccaatcctcagtggtggcctgggkgctcctgggccrggtaggggtgggttgaagcatctcctccatcccaagtggctttgatggggcgaatggtagagggttactgctgacctttctctgggatggcagcttctcctgaacttctttactttctatactgatctctactcacccccactcctttcttccactcctccytctctacctcttggatttcctcttttgctttatctcattctgacttctctttcttccctatccctgctccctctcaatcaatccactgtgccctgggggtctaggcccaaaacatgctgaagaaggtggaaggcttggaggatctgagcaatctcaccaccttgcatcttcgagacaaccagattgacaccctgagtggcttctccagagaaatgaaatcattgcagtacctcaacctgaggtatgcaccctctccaagccccaccttgcccctacccctgaccaggtgcagcttttgagtctgtgttcttccctggcccaatcccccagtcctagcccacagctggattctcaaggaaagcccggctttccttcctttcttctgcactgagttgcaacactaaatcccttatagcttgtgacccctgaatttttattcattcaatccacaattattgagaatgtgctatgtgccaggccttgtgctgtgttttggggacatttaaagcaatmagaggctgggcatggtggttcatgcctgtactcccagcactttaggaggaaggatcacttgaggccaggagttcaggaccagcctgggcaacctagtgagaccatgtttctacagaagtgaaaataatggcccggcatggtggctcacacctgtagttctagcactttgggaagccgaagtgggcagatcgttggagcctaggagttcaagaccagtctgggcaacatggcaaaatcccatctctaccaaaaatacaaaaattagccaggcatggtgacaggcacctgtaatcccagctactcaggagacttaggcgggaggatcgctggagcctcgaggtggagtttgcagtgagctgagataaagccgctgcactccagcctgggtgacagagccagaccctgcctcaaaaacaaaacaaaaataaaatattaaataaaaattaaaatattaaattaaaaataaaaattaactgagcctggtggtgcacacctgtggtttcagctactcaggaggctgaggttggaggatcacttgagcccaggagttcaaggttgcagtgagccatgattgtgccactgcactccagcctgggtgacagagtgagctgtctctaaaagaaagaaaggaatcagaggtgattcctgttcctaaggggctcacagtctggctccaactcttttttcctcaccctatcctatataagtttccactgcccttctccatttcctcggtcccaattcaccttcccatttcctgcctctcttctcctgagccccacctgtaagggatgacctttttactgattaaaaaaacacaagatgtgctcagatttgaggagagaaggacatttgtaagaaaatcttttggtagaaaggcactgaagatcagcaactcttgtcggatggaggactttatgtgtgtttatttcagcaaacatgtaaggaaactgcctctttccttagtcaacaagaccagattcttgagctggtaatggaaagagcatctccaagtagggagaggtggttgcatctggaagccccaactctcatcctgaccccctgggcattctcttattcatgaactctgccacacggatctggtggggtgtgtatctgtgccatcttcctgttaatgatctagacaggcatgatggacccttcctgagtggctattaaatggggatgttttgagagtaagtcgggtgtgtgtgtggaggggktgagggtgtctcaatgattggcaggtgcctctggggccagagatgctaagcatccaacaatgtatggcagagtccagtacaaagttcctgtagccctcctggtgagaaacactgcatgaggctcagcacgaccatgagatcaggctgaaacacttaaatagatttcataaaagcttaaagccagaacatgaaaataaataaaattccaggcatggtggctcacgcctgtaatcccagcactttgggggggccaaggcaagaggactgcttgaggccaggcgttcaagacaaacctgggcaacatagtgagacccagtctctacaaaaaatttaaacattagccaggtgtggtggcacatgcctggaggtacttaggaagctaaggtgagaggatcacttgagmccaggaattcaaggctgcagtgagctatgatcatgccactgcacccccaaccggggtgacatagtgagaccctgtctcaataaaaataaaataaaaacagagtatcatataatgaggcacattaggagatgaagtttattcttcaggttgggaggctccaacccatccatagccttaggttctctttgtggagagcacgaaccgagcatccaccaccctaaactccagcttagatcccagttccttgtccactgacctaggtcctacagggtggagtgcagtggctcgatctcggctcactgtaatctcaaactcctggggtcaagcaatccctcctcctcagctaagtagcaaggactacaggtgtatgccatcacgcccagctaatttttttatttttagcttttgtacagatggggtctcgctatgttgcccaggctgggtcctaccttctaccctccatttaggtgtgatcacagaaaatgtctctccctgtgaggaaaatttgccctctcctccccagctrcaagacagggtygtggcctagctttgctgcaccaaaagaacacatgaatgtattacagagtagaatatggcacttagggattccttgaagggcagaagcaggaccagagcggggtcacacagcacctctgcagtaaatctggcaaggcttggcaggccagtcctcacagtgtttctagggacactggaaccccgagagtcccccagaggccccattcctagcaactggcaaccaaagcccattattcctgcatgaacccctcctgaccacactggcaggggcaacatggtggccaacctgggggagctggccaagcttcgagacctgcccaagctgcgagcrttggtgctgcttgataacccatgcacggacgaaaccagctaccgccaggaggccctggtgcagatgccataccttgaacgcctggacaaggaattctatgaggaggaggaacgggctgaggctgatgwgattcgacagaggctgaaggaagaaaaggagcaggagcctgagccccagcgtgacctggaacccgaacagtcattgatctagcagcagttctagcctctaaagatagtaaggaagcctgcagggaggcagtgggaggaggccaagggctgggcaggtaggggaagaggcaagaggggaagctgctgcagaaggaggtgggagaggaaagcatcagacaagcaggacccttaaagagaggagggttaggagtcagggagaggaaaagggacccaaggggcctgggaccagctgagaaagacttaggaggccagaagagtaagtgaaaagaattggggtggcaggcagaggagttggtggggggtggggcagccatacctgacacagagtgaagtcggctaggaaaggacaggtgtgggtgcatggtaggggctgcaggggaaagttggtggtgtatgcagctggacctaggagagaagcaggagaggaagatccagcacaaaaaatctgaagctaaaaacaggacacagagatgggggaagaaaagagggcagagtgaggcaaaaagagactgaagagatgagggtggccgccaggcactttagataggggagaggctttatttacctctgtttgtttttttttttttttttttttttttttttgcgaggtagtcttgcttagtctccaggctggagtgcagtggcacaatctcagctcactgcaacttccacctcctgggttcaagcaattctcctgcctcagcctcccgagtagctgggactacaggcgcatgcaaccgcgcctggctaatttttgtatttttagtagaaacggggtttcaccacgttagccaggatggtctggatctcctgacctcgtgatctgcccgcctccgccttccaaagtgctgggattacaggggtgagccacagcgcctggtccctatttacttctgtcttctacctccaggagatcaaagacgctggccttcagacctgatcagactcccaggggcagccaccacatgtatgacagagracagaggatgcctgtttttgccccaaagctggaaattcatcacaacctgaggcccaggatctgctctgtgccggtcctctgggcagtgtggggtgcagaatggggtgcctaggcctgagcgttgcctggagcctaggccgggggccgccctcgggcaggcgtgggtgagagccaagmccgcgtgggccgcggggtgctggtaggagtggttggagagacttgcgaaggcggctggggtgttcggatttccaataaagaaacagagtgatgctcctgtgtctgaccgggtttgtgagacattgaggctgtcttgggcttcactggcagtgtgggccttcgtacccgggctacaggggtgcggctctgcctgttactgtcgagtgggtcgggccgtgggtatgagcgcttgtgtgcgctggggccaggtcgtgggtgcccccacccttcccccatcctcctcccttccccactccaccctcgtcggtcccccacccgcgctcgtacgtgcgcctccgccggcagctcctgactcatcgggggctccgggtcacatgcgcccgcgcggccctataggcgcctcctccgcccgccgcccgggagccgcagccgccgccgccactgccactcccgctctctcagcgccgccgtcgccaccgccaccgccaccgccactaccaccgtctgagtctgcagtcccgaggtgaagcccccgccaggcccagagcccctgtggccccctcccttcgccgcggcgcccctgcctcctttacccggtgccgctgcgcacctctccgcatctctggcccggtgcagctgcgcacctgctccgccgcccgcgcccagggcgccttccctccctggccttccccgcccgctgccttcgctttctggccctctgcgcgcctatctctaactgcgcctctccacccttgcctgcctctctcccggtgctcgccctcatctacggttctatttgtttctaagttgggagcctctccgggcggtgcatttttatcctagagcgtcccttttggtttgcatttggggaaatgtcttctctcaccgttcctcacctcccccagacttcccttggactcccctctctcctgctcttccccacggcgcccctctccgttcgcgcttcctcccctctgctgcacgggggagagatggaagaagtggggatctgtcgaggcgcagaggggaggacaggcccagctcgcctccactccccaccggctcttatcctcttcacttcccgctgcaacccccagggactgcagggcctttctcaggaccctcttccccgacacctgtattgcatgcgcctttcgcgggaagaggagggatacacgtttgggagagagtgggaccttggggaaggggcagtgttcaggcagctggggtgttaagttggggaggtatgggggctctggaagagaggcccaggcagcccatcctcttcttggctcccaggagaaatgcaagcctggcagccattccgctctgaggagatctgggggaaccccaccggctggccaagctgcaaagaggcgcgggaaccactgtcgtgcccctcccctcctcactgcagtgttctcccatctcatcatttgatcttaccccgccccccactgcagtgacctccccttcctcactgcattgaccttctcctcttcccaggggggagggggaatcccttctacagccctagactgcagccagcgcctccctacccaccccccacccactgcagtaacctctttcccatccctcccagcctcccgccccgcccattgatctcaggctccacccctctaagcctcttatctttctccttccttcccttccacccgaggagatcccagccatcatgtccatagagaagatctgggcccgggagatcctggactcccgcgggaaccccacagtggaggtggatctctatactgccaaaggtaatgggtgtggcatgggccttcctacagccctagcttttccacggccaggctgggttcggccaggggttcggaggccttttttgatacccaggggtatggggtgctgggccaggctcacaagcctgggttgtggcggttggatcctccttgtccggggagccagggtaggtgggtctgtgttcgagtttagcgtgtgaggcatgtcctgcctccgtgtgtctgcctgtgcacttgcatgtgtgcagacgtgtgctgcaagcaattttctttctgcgggctcccacttgtgcatgtggggcctcagatgggtggatgaggaggccacttcttgtgcatctgcctcagtgtgtgtgtggggtgggggtggggggatgttagggagcagtgtggggagagagctagatgtggtaggcaggcagtttagagccagaaggctgaaggactccctggcccctgtgtcctcttcactccctctcattccatgttcctcctttaggtcttttccgggctgcagtgcccagtggagcctctacgggcatctatgaggccctggagctgagggatggagacaaacagcgttacttaggcaaaggtgaggtcccttctcttttccagactctcccccacctcagccttatgcccctacctcacaccagtccccagtcctcctctagcatggcttcccctcctcccattgatcccttccggcccctcctggcccgacccagtccagcctcttcctttccccaggtgtcctgaaggcagtggaccacatcaactccaccatcgcgccagccctcatcagctcagtgaggcctgctctttgctggggatagcagggccagagttctggaaggaatcccggagcagggcaggaggaagggaagaaagaaggcccactcttaggaatcatggttacaagggggaagggtggggaacagcttccttaatgcaccctgctcccatgggagttcaggtcccctaatccaggtaggcccctgtcacagggacctggttggaccctggccaaatgtgagcttgggtgtgaatgaggggaccctctgccttagggctcagcctccagcctggccctgggtgatggaggctctgccctcagggtctctctgtggtggagcaagagaaactggacaacctgatgctggagttggatgggactgagaacaaatgtgagccggggccgggagaaagtggggaagcgtcagggtggggaggcgtggagcagatagagagctgaagggccagtgctgtagtggcttcctcaggaatgactgtcaggggcattctcctctcaaagccagagcaaggggagatgagtttagctgcagagggaaggaccgacagtaggcagaaggaagaccttctttgcagcatacagaggagggggatggcctgagagagtctgtggtctcagggatatttagaaagaggtgtggctctctgccgtttccaatctcctcctccccacccattcctctccctgctgttttcaagagagcatggatgaggtgttgctggggcaggggtggggagggaggagggggtctcctttactggctccttttggagactacagatggaggcaggagctagaaaggagaaggggacattgtgctcagcaccttcctctataatctcctagccaagtttggggccaatgccatcctgggtgtgtctctggccgtgtgtaaggcaggggcagctgagcgggaactgcccctgtatcgccacattgctcagctggccgggaactcagacctcatcctgcctgtgccggtgagcaataagccaggcctgcggctctcccaggggcgggtgggggagggagcatgcaactcatgaggaatgatgggaggaaagtgaattgagggaggtaaagaggaaggatggggacgtgagacttagtccggaaagctgggggaagtttgggatcttgggttaacactcctggggcgggcagggaggggctctttgacccttctgtctttctgtggctccccaggccttcaacgtgatcaatggtggctctcatgctggcaacaagctggccatgcaggagttcatgatcctcccagtgggagctgagagctttcgggatgccatgcgactaggtgcagaggtctaccatacactcaagggagtcatcaaggacaaatacggcaaggatgccaccaatgtgggggatgaaggtggctttgcccccaatatcctggagaacagtgaaggtgaggccaggagccccactcccagctctaagtcttaccctattgtgggacatcagaaagggtgacacagttcaccaagtcctgagtaggcgtggagggtcctaggactctgcaaactccaaaaggtaccagttcttagagtggattgcagagagcctgccaaattcacatgcagacctagggggacagtatttttttttttttttgagacggagtcttgctctgtcacccaggctggagtgcagtggctcgatctcagctcactgcaagctccgcctcccgggttcacgccattctcctgcctcagcctcccgagtagctgggactacaggcgcccgccaccacgcccggctaattttttgtattttttagtagagacagggtttcactgtggtctcgaactcctgaccttgtgatcggcccgcctcggcctcccaaagtgctgggattacaagcgtgagccaccacgcctggccaggggacagtcttttacctgcctagccagatgtgttagcatctgttaagttgccactggaaggccgggcgcggtggctcacacctgtaatcccagcactttgggaggctgaggcgggtggatcacctgaggtcaggagtttgagaccagcctggccaacaaggtgaaaccccgtctctactaaaaatacaaaaattagccgggcatggtggcgtgtgcctgtaatcacagatactagcggggctgaggcaggaggatcgcttgtacccgggaggcggaggttgtggtgagccgagatcatgccactgcactccagcctgggcaacagagcgagactccgtctcaaaaaaaaaaaaaaaaaaaaaagttgtcactggagcccttgggaatactgggagatggtctggatgacctgttggattcatcccatccattcgaaatctgtcctgtccccgtcccaacctcctaggcctctagaatccctaatttttctgtgccttgggggaaactgtatagggaatggaaagaatataggtagtggttaagagttaaggttctggggccaaataacctggatttatttgaaccttgacttgtggagttactgctggtgaactttcttacttctctctggaaataataacagaatctagctcatggtagtgtgaggcttaaatgaaatatatataaaatgcttagatgacatgataccaatgaaagtatagtaagtattattaagagaattccattcctctgtgttcctagaagatggcctctcctcccagacctggggataaccccaacagcatccccgccacacttccctcaggaacagccctccacctctgccctgaatgtcttttctttccctcctcctccttgcccatccctcctgcttgtactataatctcactgtattctgtccccagccttggagctggtgaaggaagccatcgacaaggctggctacacggaaaagatcgttattggcatggatgttgctgcctcagagttttatcgtgatggcaaatatgacttggacttcaagtctcccactgatccttcccgatacatcactggggaccagctgggggcactctaccaggactttgtcagggactatcctggtgagaggaagtggtgtgagggggaggtctgggggcaggcagggacgtgtcccagcaactctggaccttatggggtgctgactcaggcaccaggtgggggtgtcctaagaagaacctgagaaccagggagagggtgcaggagccacctgcaaagactgggctttgtatgtagtgtaaaaatgcaggtacccgtgaccaatctgttctgtctcagatcctgattaaagtcatgggttctgaaaactactggggtcatggggaaggctctggaaggaaccagggatgatatgagtgtgactggatctagcagagaactagaacatttcagtatctttgattgatgaaattgtggatgctgaatggagctgggactgatgtgtgagtagaaagaaggctgagggggactgaattagcttctgcaagtctgcccagggcctttatctcaggatggaggcagttggtcgccatcttcctgacaca

SEQ ID NO: 97848 - DNA, 82622 bp, Homo sapiens
  misc_feature (1)...(82622): n = A,T,C or G
catcatgcccggctagttttgtttttgtttttgtttttttgtatttttgtagagaaggggtttcaccatgttggccaggctggtcttgaactcctgacctcaggtgatccacccaactcggccccccaaagtgccaattacaggcatgagccactacacccagccctgttttgttcttttaatttttgtagagagagggtctcactatgctccccaggctactcttgaactcatggcctcaagctattctccaactggacttcacaaagtgctgggataacaagcatcaccctccatgcccagctacaaatttatctcttacaataatggtgaaagatatgtcttccggatccttccagtgtgggtgaatagttcttaaatgacaattcctctaaattttcaatcttcctaagcctttgagtatcttcctctacattaaaccaaggcaggtttggaatttctgatttactcattatgacccacctttggtccatgtctcagccaaatagctagacaaattgttagagctcttcctaactctctgagctgcaacattaaatgtagaacctctatttagtaagcccatataaatttggccagatctagttttatgttccttccaccattatcccatgccttcaatatccattcccatacgtgttcccaaaatttctgtctgtataaattagacatcttaagccgttcttttggagtgttgcacacttcctcatgggtcacactttgtccctcaccttaggggcctgctgggatttcagtctagttacaggtctagaagcaaagagggcaggtggggaagggtcctgaggagcatctgctttgtcctgcatggcaacttcctcagggaggccattacagtttcgtaggcaatgcagggttagtcctctcaggtgggatgcctccactggggatggggaggcctctttcactagcaaagaagatcaatcagaatttaggggctcaatgtccccagcttcatcaggtgatgaggttcataaatctaaaaaagagagctttatttctcataaagggttgcagcctgcagggtggccattctgacgggaggggaagcacagcctccagccacaaaccagaaacagatacttcaagggagggccaaagggaagagaaatttatgctgagtggggtggccaaatgtacgtatttagtacattataggagtgatgagttttatgaaaggagaaacatactcatgtgcaattgagcttcatgcttctccacgggccccatgttcaaaaaatggtggcattaagatgatctaaggtagagtttttggccctctggcatcaaaaggtgaagcagagaacatgaaaaccctcactgcattctctgtagactggtcagaaccacttcatattcaagagtctcttatcaggcataaaaggaggagcaatatcagacagttggttgatatcactggtagagtcttttgaaagggctagtttctgtttagcccttaggttagaaagcctaaaccggttagggagggaggggtgagcataaggaggcgtgcctgacctcatcccatcatgaccaagaactcagttttcaaggttactctggggtctgctttgccaggagagggtccattaggtcagttagtgggggcttcgaattttacttttagtttacaagggtatagcctagtactccttggctaaaaacttgcacagcatgttattataatgaatattgtgagcaataataatacaattgtaataactatttgtgtgtatctaaacacatctaaacatagaaaaggtacagtacaaatatggtataaaagattaaaaaggctgggcacggtggctcatgcctataatcccagcactttgggagaccaaggcaggtggatcacctgaggtcgggagttcaagacaagcctgaacaacatggagaaaccgtctctactaaaaatacaaaattagccaggcgtggtggcacaggcctgtaatcccagctacttgggaggctgaggcaggagaatcacttgaacccgggaggtggaggttgcagtgagctgagatcgtgccattgcactccagcctgggcaacaagagcaaaactccatctcaataaaaatttaaaaaaatttaaaaatttaaaaatggtacagccgtataggccatttacctgaatggagcttgcaggactcgcagttgttctgggttagtcagtgagtgtgaagagtgtgagagtgaatgtgaaggcctaggacactgccatacactaccatatgtaattgccctgtgggcttcttcctgcccgctgcacagacaaaatcaattcactgagaccatggcattgcattagagaaagatcttaattgatgcaaggctgaccatgccacatggtacatgaagctattactcaaatcaatctccctgaaaatttggaggctaggatttttcaaagacagtttggtgggcaggggcctacggtataagtgctgctgctttgttggggatgcaatcatagaggtatggcaaatgatcctcatgccctgactccacctctgggtggggtccataggactggctgagtcacgagtccagctggggtttgcagaaatgccaaaatctgaaaagacatcctaaaaggtcaatcttaagttctacaatatgatgttatctagaggcgtaattggggaagttacaaatctggtgacctcctgaacaacggttggtaatcacttaattatgcctacattttagcggaattcagggccctttcataagcctaaccttgcagcctttcattagttttataaaggtggcttagtttgggaaagggctattatccctgctttaagtttaactataaactaaatttctctcaaagtcagtttggtttatgcccaggaatgaccaaagatagcttggaggttaaaagcatgagggaggctgggcacagtggctcacacctgttaatcccagcacttggggaggctgaggcgggcagatcacttgaggtcaggagttcaagaccagcctgaccaacatggctaaaccccatctctactaaaaatacaaaaattagctgggcatggtggtgcatgcctgtaatcccagcttcttgggaggctgaggcacaagaattgcttgaacctgggaggcagaggttgcagtgagctaagaccacgtgcttgcactccagcttgggtgacagagaaagactctcaaaaaaagcaagatgaagtcaactatatcagatttctcttactgtcataattttgtaaaggcagtttaattggactgtataaacactatatgcttaggcttcactgaagttataaatatatatatataattttcttttttttttttcgagacggagtcttgctctgtcacacaggctagagtacaatggcgcgatctcagctcactgcaacctctgcctcctgggtttaggcaattctcctgcctcagccttccaagtagctgggattacaggcacccaccaccatgctcggctaatttttgtatttttagtagagtcagggtttcaccacgttggccaggctggtttcgaactcctgacctcaggtgatccgcccgcctcagcctctcaaaatactgggattacaggggtaagccaccatgcccagctttttttttttttttttctgagacggagttttgttcttgttgcccaggctggagtgcaatggcatggtctcggctcgccgcaacctccatgtcaggcctctgagcccaagccaagccatcgcatcccctgtgacttgcacatatacaaccagatggcctgaagtaactgaagatccacaaaagaagtaaaaatagccttaactgatgacattccaccattgtgatttgttcctgccctaccctaactgatcaatgtactttgtaatctcccccacccttaagaaggtactttgtaatccccccacccttaagaaggttctttgtaattctccccacccttgagaatgtactttgtgagatccacccctgcccacaaaacattgctcttaacttcaccgcctatcccaaaacctataagaactaatgataatccaccaccctttgctgactctcttttcggactcagcccgcctgcacccagggaaataaacagccttgttgctcacacagagcctgtctggtggtctcttcacacggacgcacatgaaactccatctcccgggttcaagtgattctcgtgcctcagcctcccaagtagctgggattacaggagccggccatcacgcctggctaatttttttgtatttttagtagagacagggttccaccatgttggccaggctggtctctaactcatgacctcaggtgatccacccgtctcagcctcccaaattgctgggattacaggcctatatatataatttttgtttttttttgcaagacagagtctcgctctgtctttcaggttggagcgcagtgtcatgatcacgactcactacagcctcaacctcccaggctcaagtgatcctcccaccttagcttcctgagtagctgggactacaggcatgttccaccatgctcatctaaattttattttattttttttgtagagacagggtctatgttgcccaggctggtctccaactcctgggctcaagcaatcttcccacctcaacctccctaagtactaggattacaggcatgaaccactgtgcccggccaatataaggcatgcaaaactatactaattttcctttctggatatatgctgtatgtaaagtattaaaataggcatgggattgataaataccaaagtcagcaaagtggtgacctctgagaaaggaaggagggaaatgccctcaggaagggatataccggcttttcaaatgtataggtgatgtttgtttcttaacctggagaagttatattatcctctacttttccgtgtgaatgaaatattttgttttttaaaatcttgcccaaaatgggagtaggggtagggaatttgacagacctaggtttaaattctgtctgccgcttacttgtaaaggaacttacccagtttcttaatttctccaagcctctgtgtctgtaagaggacatcatcataataaatattctattgcgcagccaaagcaagtgaaataatacggatgaaagtgctttataaagtgcaagtgctacagaagtataagctgtaattttacaagaatgcgccacaaattattgtaactaagagttattgcaagaaactcttagcattcctttgttacatactctcacagaaccttgaccctttccttcagagcacttaccttctcttgcaataacacgttaattgatgctattatttgtgcatcctcccactccgtggctctgggctcctgattctattcccaagcccagcacagtccctggcatatggtaagtgctcgacagatttttttttttttttttttggcgtaatcttaacaggattacctgtaggaagtgagaatgaaaagcagggaggggaaacaggactcttctgttttacatttctatactgttataacttttatcataaacatgtattactcagtgcaaaattatttgaatttttaattaaaataataagtgttaaataggcatatcttaatttcatcgcctctagggggaaggtcatgttttactacaggaaactgcatggaaaagggatccatgaaataaaaggagcagacaatgtctgttcctggggcactgggctttccgctgaacctccgggagtgaaggcgacgagtctaacaacctaagaatttaagaacgggccgggaggcgccgttagggggcgcgcgaaaggcggcgcgggcgttcccgcctccccgttacatgccccagtaaccccagcgccggcgaccgggagtaacctcgcgcgcgggcggcccccccgcgtccagactctcgcctgctcccgcctcagccaatgggaaggcagcgaaccggccggccggacggtcgccccggagggctcctcctgggagcatttcgaacggagttgaactgtcgccgggccacgggctcagacctttccaatggcagctctgggtcccgacgccaagccccgcccagccctgagcctccccgtgtgcattctcggcaggagtcacctttgccttacaaaccttcagacccgccctcttcctaccttgccgcgctaggccccgccctctgcgcaggtcggccaataacggggtgagctggcgcygcggggcgggcctccagccaatgcgcacgccgtgggcgggccccgagccggaattgggggtgaagcgatagcgttttgcccgcattcggggcgcgcggagctggggggtccctgtggggctcccggagttaagatggcgtcctcagcggagggggacgaggggactgtggtggcgctggcgggggttctscagtcgggtttccaggagctgagccttaacaagttggcgacgtccctgggcgcgtcagaacaggcgctgcggctgatcatctccatcttcctgggtaaggaccctcctgcctccctccgcccctcgcggagtccccggggagtaggggaggaatggggacaggacctccctctcttcccggagccacccgggagggctgtgccgggtgcgggtgtgaatcctgaagcacaccaacagctactgagggaagacagaagtcctgtctcgagtctggggcgctgtgccctctgaacctcttcatctttctcttcaacccctgccatgccctctggcctctcagtcgggcccccgccctcttgtgccaggctctacccttgctcccacgacctgtctttatttgtcgctctgttgagttccactgtctggccatgtgtcctgctctgtcattaataaccaccccgcacacgcgcgcatctcatcggtaggcatagggcccctaactttagccctttcggccttttcagccccatattccatatttcatattctgagcgcctgttttgcttattgccagcttatattatactttcgtctcttttctgtcccagtcctactattttctttttataccatgttgctttttttattttccaagccacctacctgtcatttaccctggaatatcattttaatgctggacttgggaaacaggactaacaacctccttaaaatcgatccatactattccaagcgtttattacacgtgtggttcaaaggatgtggtgtatctgaatttatgccacaacaagctgtattacaactggtttataggcttttttaccgcatcctcactccatggtttaatacatggaggtagcatagtacaatggaaaaaagtatgggttttgaaggcaaacaaatcagatccagccttgttgctgctcacaaactgaaggaccctacgcaggccgcaaaaccctctgggcctaatttccttatctatgaaatgaggacaacagtgcctaccacataggattgccataaagtcctgtagaagggccaagattgggaagtacctgtacatatatatacataaaatttaagcagttggaacgttttatgaaggttatagaactttaggagcgggtgrgtgggaaggattaagcaaaagctgtaagtggtgataaggaaacaggactggggctagagcagagggttagaggtctgaaccatgagaagtttgagataaagttgggcaggtgtggaaagccttaaatgccagagagaagtttggcgtttatccagtattcagtagaaacactgatatataatatcaccagagggtgttaacccaatctagataatgggataggcattaattcatatttaaacaaccttgcctaatagcattgttactttcctattacatatcaaaccaagatcttcctttcttccaaataaagatcacctttttcttcctctgtggaatcgtaagattttaaagatggaatggaactggggttgtgcagtttgctcagtgtcacccagacatcatccaaatttatcagcaccctagtctaggcttatttgcactacaccagctttgaacttcctactctttcatccttgtttctgacccagttatttttgacattgtaattagcaattagtgtttacatttgacaggacgcagcggcttatgcttataatcgtaacactttgggaggccaaggtgggaggaacgcttgaggccagcctgggcaacattttatttgtctctacaaaaaattaggccaggcgcaggggcacatgcctgtaatcctggcattttgggaggccaaggtgggcagatcgcttgaggtcaggagtttgagaccagcctggccaacatggtgaaaccccatctctcctaaaagtataaaaattagctgggcatggtggtgggcacctgtaatcccagctacttgggaggctgaggcaggagaatcacttgaaccctggaggtgaaggttgtagtgagccaagttagctctactgcactccagcctgggtgacagagcaagactctgtctccaaaaaaaaaaaaaaaattaataaaaaaatgagctgggcgtggtggctcatgccatgcctgtggtcccagctactcccgagattgaggtgggaggatcacttgggcctggaagtttgaggctacagtgagccgtggcaccactgcactccagcctgaaggatagagcaagaccctgtctcaaaaaaaaaaaaaaattgtattacattcattagttaggaaactgttggtttctcaacaataaattcagaatgtaacacaagtagcaaccagttataaggggcaatctgttaaatggagttagggctggaattaggacttggaattcaacttttgtttgttgacataaagaattcaacttttgtttgttgacataatcacatattgcctgtgcactcctgctgggctattgctgtgtactgtcacggggcatacagatgactaggaaattgttttctccatatcccactcctcttctctcatcttctctcattaccaccaatcatcaaagtaataaacacttgrtgtaatgcatctaccacactcccgagcccccttgctcattctaccatttcccacaccctgccttcctatctcacataccctgttgccttcagtaattcatagtatttctcatttttagatcaacttggggcttcaacttgcctcctatcaggtatagctcatcatgtggacgggtaggattgtattcctagtaggcacagtttaaatacatacatataaatataaattgattaagcttgatgtgtgcgtggtaggagtgcattttggttgtaaatatgtttcccttacaaaggttattaccatttctgtgtattgtaacctagaaaccagtagcctttcagcagtggagttcctggttcttgaacccagctctctcagggaactgggatactggaggaaatccttgctggaggtaccaagaaagcctgtagtccaaaatgatttctggttcactttccactgattagattaattcaggttaaaaacacctccctaaatgcaaataccccaagggaagagttaggtatatcattcacattttcaagtgtacgttttaatcagatagtctaattactattttcttaacatcttactttttttacttcagttctgtgtgctgatcttggggtggaatgcagagcattaaagcactggcttttaaacctttttgactaagatccatcgtaagaaatatgttttacattgtgacccagaacacacagacttgtatgtgtatacacgtatttgaaacaagtttcaggaaagaatacttgcccttaataataactcactaagttgatttcatgacttgttaatgagttacaacagtttgaaaaatcttgagttagaggctgcaattttttttttttttttttttttgagacggagtctcgctctgtcacccacactggagtgcagtggctcgatgtcggctcattgcaacctccgcctcccaggttcaagcagttctcctcctcagcctcctgagtagctaggactatggtgcacgccatcatacccggctaatttttgtgtttttagtagagacggggtttcaccatgttggctaggatggtctcaatctactgacgtcgtgatccacctgcctcggcctcccaaagtgctggaattacaggcgtgaaattacaggcatgagccaccgcgcccagccgaggctgcaatttttaatattcaatacttcaaagaaaaagtaagcttatgtggactgctgcactggagtattttgagcagtcagaagactgtaaaaggagtgtgtttatgtttgtgtggtgtatgcttgcaaggagtttgatggaaggatgctgaagaggaattttgccatgagccctggtgctggcaaatactaccagaaaacatctccccttcaacagcttggatctcatcactccttaatgtaactaataccatgaattgctcatataaattcagtaacatgcacctactacaggtaaagcagtattcttaaccctgcaagggcaggagcagtgggtgtagtatgagtcaggagccctgcactcaaaggtattatggtctgttagggtataggaaatgggcctgagataagtatactaataaccccaataaattttaagcaccataagagaggtacagagctttgtgagatttaaagatgggacatttcatttaaagatgagtaaggtttcagcatgctgagatggtaagacttaaggaatagcatgagcagaggcactgaggtgtgaatgtggcaacacagccaaggaacagtcagtagtctagtgtgactaaaacaggactttaaagaagtgatggaaaatcaggctggaactgtaggttaaagagcctttaaagccaaggtaaagagttagtactcacgtaggtgatagggaacattggagatttttgagtggggaataatatggctggagctgtatttaaaaagataatacagcctggggtgatttgaagtcagcatagacaagtagtagggaaactaaggagaaagaagtgatctagagaggaagttataatgacttggaggcagggtggctgtgctgagaggagaaagtgggcatctcctgtgagatggtctaggaataccggaaccttttgaaaggtagattctgtagacacagtcatctacacagctgctcatgcctgaaacccaagaatcagctttgttgcctttcttcactcactccccacatcccagtcacccaatcctatcaatacaacctctggattgtgtctcagatccatctactattctccatcaccacagccactaaccatctgtcaccagcaccacccaagtagcctcctgactagtctctaattctgttcttgccccctcagtccactctccaaaagcagccagagtgatccgatcctgtgcctctcctgctcagaacccttcaggggcttccatacctggctggtaagcccctgcctgctgccccagcctcgtcccaagcaagctgacaaccttttagccacatggcctttgttcagttcctcaggaaaggcatgaaggcttccctacctcagagcctttgcacacgcttacctgctgcctggagtgcccttcagtcacctgacaaactccttttcatcttcctctgagttctttcctgactctcatgttcaattatgtcccctgttacactttctcatactgactggaatttccttccaagtatatattacactttgtaattatatatttgtagatgaggacagaaaccatggaagttttgtttaccacagtgtacccagagtttaacacattacttggcttgtagaaaaggctcgataaatacttgaataggtgaatgtatgaatgaatgacttggcaacttattagctggaggataaagtcgtaattttaaaaagactccatcctcctgcctgagtagctggaaagataagggtatctttgaccaatgccagagatcaagtggaggatcagatactcttaagtgccaggaaatgatctggtttggggttcactttaggttccaagggcacttccaggtatcttgggagttgtgaagcctggtcttgagctcaggaaagaagctgggctaaagacagagttttaggagacagtattggtatcataactgactcagggagggaatgaaatgccatggaaaaggttatacagagaagaggatcttattcacgttgattgggtatgttaatgttgctaccccttgataatagtaatagctggcatttattaaggattttctgtgtaccagacattgtcctaaatggtcaacaggcagttccccacctaaacctgccagttacccgtgaggtaattatagtgctgttaagatctcctggtacagataggaaagtcagccctacaaagattgagtaagtcacactgagttctgcctgactccagagttcctgctctttaccgctgagattgggaggagcatgtggggctggaaaagataaatgcccttggtgtccttttctcttttcactctcagtggttaaaccaagatgcaatcagtatatgagccacctctcagtgtccaaagctagagctggccaaatggagcagatggccaccctgcttactgtgagtgttccctagtcttggccatgatggtggcttggctgttagactgatcaaaaattgcagctgggggtaacaattcatccctcagaggttcagaattagcatcactaaagttagcgacctttaaaatcaaaggaggtcctgcagtttagttccctttggaccaaagtcaggtctggcccttcagaaaaaaatccattattcagtgcagaaagctttcttcaggtagcactggaatcacaatataaagagaccaaaggtaagctagatgaaaattaagcagcattaatgaaacaaagagacttctgaccataatacaaagcagggtccaaaaattctactgctataaaatagggagactgtcctaaatgactttcaaggacccttccaattttaaaagtctaggtatattacttctacatgtttagactttattctagttcatagccacaaatttcatcataatctaaaccttcccgtttgggaatttctttttctttctttctttttttttttttttttttttgagacatggtgttactctgtcattcaggctggagtgcagtggtgcaatctcagctcactgcaacgtctgcttcccagatcaagcaattctctagcctcagcctcctgagtagctggaactacaggcgtgagccaccatgcctggctaattttttctgtattttttgtagaaacagggttttaccgtgttgcccagggtggtctcaaactcctgagctcaagcaatccaccagcctcagcctcccaaagtgctgagattacaggcataagccattgcccctggccaagaatttcttttaaatacaattttccaggtcaggcacggtggcttacgcctgtaaccccagcactttgggaggccaaagcaagaggatcacttgagtccgggagttcaagaccagcctgggcaacatagtgatacctcatctctacaaaaagtgaacaaaattaactgggctgggtggcatatgtctgtagtccctgctgcttgggaggctgaggtggaaggatcactggagcccggggtcctccgctcaactcaggaygttgaggctgcattgagccaagatcatacctctacactccagcatgggcaamagagcaagattctgtctcaaaaataaataaataaattttgtttttaattagccaggcatgatggcatgcacctgtagtcccagctattcaggagaccaaggtgggaggatcatttgagcccaggaatttgagactgcagtgaactatgatgatgccactgcattccaacctagatgacagaaggagacctcatctctaaaaataaatatatatattttttccaaccactttttatctataccccaatgtcttacattccataaaacatcatgttttgaattccagtataactttatcgttaaacatgtttctttgcagaagcatgtataagttagggtccacaagattatttgcataagctaatttacaaaaaaaattatataatcactgacatgaaagcatgtctgggcagccatgggagctcatatgaggcgtccagttcagtcgccttttaaaaatgatatttgcattagctgggcatggtagcatgtgtctgtagtcccagctactcaggggactgaagtgagaggatgcaccagagccccagaagtcaaggctgcagtgagccatgatcacatcactgcaccagcctgggcaacaggagtgaggccttgtctcagtcagtcaatcaatcaatcaataatggtatttggtcttctgaaagaaagtgacattttagctgggccttaaaggggatggtaagattctagtaaagtagagatgaaagcggaggagctttccagctacaaagagtaatctggagatcaggaagagtaagaccctgtctgtccctgaatctaaggaaaaagaaaaaaaaattttgagaaaaatctgaggaacagcaagtagtcctctttaaccagaacaatagaagatcgtaaaagagcagtagagaaaaacatgataggccttttatgtaggtggaggtcaatgacagagtaaggtagtaacatgtgcattgtctttagagatcttctggcctaggttcaaatgctggatcaaataaatatgtactagctgtttcaccataagctcattaccagagttcaaccacccatttctttatattcccacaggccaattttactaaagaattgcaatgaagagttaagcaatttatctgataaatatttttagatttatatttcattcataactagcagcagtattttgaaacagaatacaaaatttatatgaatttttaaagtaatacagtcatcaaagaaattttctatttctagaagactgcttaggcatactcttttgtgatgtgttcattctcctttggcctggaaaagtttgagaactgttgctcattgggatgttgtaaggactaaataagataaactatgtaaacacttaaccatgcttgacccaagatcatcttaaataattgttcttcccttccctgtcaataaatatttattttctccctttccaaggagacacaaagtatggtcttgtgaccaacagcatctgtatcttatgggagcctgttagaaatgcagattctttggtctactccaaaactactgattgagaaactctgaggatagtgcccagtaatctgttctagcaagccaggttatacttattactctagagtttgaggattactaatttagcatatttcttccggtgcctattttgtagtacttgatgtcctgatagtacctttttggaatgtcattggccaggcgcggtggctcacgcctgtaatcccagcactttgggaggccgaggcaggcagatcacctgaggtcaggagttggagactagcctggccaacatggtgaaacccatttctattaaaaagataaaaattagctgggcatggtggcacatgcctgtagtcccagctacttgggaagctgagacaggataatcgctggaacccaggaggcagaggttgtagtgagccgagattgcaccatggcactccagcctgggtgacagaaaaaaaaagaaaggtcattgtatcctgtactctttggaataaacaaaactcttagattccttatggtttagtttttcccatttgtaggcctgacagataggaaagttgggcctacaaaaattgagtaacttgcttaaagtcacattcagttctgcctgactccagagttcctgctctggatgttatctgaggaataaagagatgttgttgttattatgttcacattgttattatgttcacattgttattatgttcattatcatgatcatcacatacaccatctgtttcacacttttgataagaaggttagatacagaggagttgtgttttttgttttttttttgagatggagtctcactttgttgcccaggctggagtgcagaggtacaatctcagctcactgcaacctccacctccgaggttccagcaattctcctgcctcagcctccggagtagctgggattacaggcgtgagccaccacacccagaggaggaatttttttaataaggttattggactaatggctccatcttttttgtgttgcatcaaccaccttaagcaatatagcattctcctgattgatctccttacgtttcttaatataagtaataaattgtgacttgtagctttaacaaaaattaggttccctagttgcagctgccagggaaagctagtctaatatcaaagcaaaccatccttcttctcaagcacagagtttttaagataggagtgtgtgtgtattgacattttcctagcagtggctgaagtcaaggaccaggagatttagggcccacttggagttcttatggtgaaacagtagtagcttcctagagacctttaaagcttatctgtaatttgtatagttcagaagatactgtatacatcattatttctccctgctttcaaaacaggaagggggtgtggagagtaacacactaaaaaaaggataagtaattaatttctgggtaagaatttccttttggcttaaaatggactgatggtgtaagttcctccctttgcaagcagaagctttgaagatagtgagctagatgaagctctggacatcttgaatgaagtattctgtataagaaccaagtgtataataactgttagtaatagaggctgctcatagaaatgtcattgcattataattgtagggacagtttgtcagagagtaggtagaagattatcagacccaggttttgttcttggctcacatgaagtcatcaagtaggctatttaaatgcttcactttaaccataggctaagattaaattaaaaataaaaagcttttgtcatggccgggcacagtggctcatgcctgtaatcccagcactttgggaggctgaggtgggtggatcacctgaggtcaggaatttgagactggtctgaccaacatggtgaaaccctgtctctactaaaaatacaaaaattagccgggcacggtggtgcacgcctgtaatcccagctactcgggaggctgaggcaggagaatcgcttgaacctgggagggggaggttgcagtgagccgagatcgtaccattgcactccagcctgggggacagagtgagactccgtctcaaaaaaaaaaaaaaaaaaagcttttgtcaattaaagatgcttgtcagtactgagtattcatgttgctatggcacttttataagaaaactgtacacggtcatatctgcttccgaaaataatacatagtgagatagtaattttacaggcaattaagaatttgctggccaggcgcggtggcttacacctgtaatcccagcactttggaaagccaaggtgggtggatcacctgaggtcaggagtttgagaccagcctggccaacatggcgaaaccctgtctctactaaaaaaaaaaatccaaaaaattagccgggcatggtggcaggcgcttgtaatcccagcaacttgggaggctgaggcaggagaatcacttgaacccgggaggcagaggttgcagtgagccgagatcgcgccattgcactccacctgggcaacaagagcaaaaactccgtctcaaaaaaaaaagaatttgctataatagaagatccatgtgtacattctgtatgcaaatcttaggaagatattagatcccagaaggttaaagttccgatctctatatatttgtatatgctttaaggagaagtggcatccatgtagatgtggtaaatggcttataactctcgaggtttccaatttctgctgtggtagcaattctaaactcagatggacttggacactactctggattactgtccctaaatatcaactactgtttataagccagcagaggccaactgaaatagtacacataaagttcctacagcatatccctcagtcagaagtggaaaagattgattaaagttggagtataaacatatggggccctgaccaaaaatattgaaccgtactactagaaatccccattctttagctaaaggataatctgacttcacttttaattcttcattgactattggtgctctgaaagaataggaaataatagcaaaacatgggaactcctagatagcatacatttatttttaaaatgtataccatcggccaggcaccatggctcacgcctgtaatcccagcactttgggaggccaaggtgggcggatcatttgaggtcaggagttggagaccaccctgggcaacatggtgaaaccccatctctactaaaaatacaaaaactaactgggtgtggtagcacacacctgtaatcccagctactcaggaggctgaggcagtagaactgcttgaacctggaagacagaggttgcagggagccaagatcacgccactgtactatagcctgggagaaaacaaacaaaaaacatatggtcaacttcccaagtaaactgaccaatgtcagtttaggttcagtcttactgtaggagtgcctgccgtaggccagcgcctctcaacctttccactaagtacattaagatcctaacagtaatcattgggaccccaggtcatcgtctcaacagaagctccagatttcttcaagtcttggccctcttgttttatatcaaaattttatgtatattatttttatattttcaaaaattctccccagatcatcaagtaatattgagatgctgacatagaaaaaagtagatttccagctggtatgatcagtgataaattggacttcatcaaaattaaaagcttttgtgcaccaaaggatactatcaagaaagtaaaaagctatcccacagaataggagaaaatatttgtaaatcataagtctagtattcagatgtctaaagaactcttagaattcaacaataaaaagataacccagtttacaaaatggatatgaatagacagttctctaaaagagacatatacatggccaataagctcgtgaaaagctgtttaatatctttagtcattagggaaatgcaaatcaaaaccacaatgatatatcatttcacacctactaggatggcaataatcaaaaacacacaaacagatgttggtgaagatacggagaaattggaaccctcaagcattgctggtgggaatgtaaaatggtgcagccacttgtggaaaatagtttgtcagttcctcaaaaagttcacagttaccatatgacccagcaattccattcctagggttacacccaagggaactgaaagcatagattcacacaaaaacttgtacacaaatgttcatagctttattataatagccaaaagtggaaacaacccagttgtccaccaattgggacaaattgaatgaatacacaaaatgttatatccacacaatggaatgttattcagccataagaaaacaatgaaatcctgatcacatgctgcgacacagatgaaccttgaaaaattgtgacatgaaacaagccagacacaaatggccacatattgtatgattccatttatatgaaatacccagaataagctaattcgtaaagacagaaaatagattggtggttgctaggggataagaggaagggtgaattgggaatggccactatgcggtacagggtttctaatgttctggcattagatagcagagatgaaaatgttctggcattagatagtggagatggttgcataacactgaatatactaaaatccactgaattgtacacttaaaaaaatgaagaaagaaggactatgcatgatcaaagaaaaaaatgctttgtgctcaagtagggatagaataaacagtaagactggaaagactgtgaagggccttgaatggcaagctaaggaagttagctttcatcttatagatcgtaggaagccaccagagtattttgagcaggggtggcatgtttaaggtagtgttataggaagtttaatttgtgaaatgagaaagagatactatcagccaggagaggtagaaggttctataaagtcaaattgaacacccgaagtttcagatttcatgaatgaccctgggtatgtgtgtatacacatatgtatgggatttgtagtcatctggggaaggctgaggtgctaatatgaatactgaaaactagagagggtaatatagcagagtagttaaaaatgaaaacactctgaacccacatgctgtctgggttcaaattccagctgggctaccttccagcactgtgaccttaggtaagtcactaaccctgtctgtgcttcagcttcctcttccgtaagataaggatacctactcatcaaggttgttttgaggattaagtgggttaatacatacaaagtgtttacaatgtcaagcttaaagaaaggtccccaaaaatgtcagctgctagtctgaaactccagagcaggtttgagagtaacccgctgttgttctctgccccggataaactatgaagtaacagtcctaaagtgttaaaagacaaaacaaatttttctttgtgaaaaatgaccctttaaaaaaactccatctactaataatgaagcttagtagtagtaaaatgatgatttttagccataaaacgggttttctatatcttcacaaatatagtgtagagtttcacaatattctttgatatgaaccagtctctcatactttctgtatagcactgattcgctaagtaagatgccaaggcatgacctcccttcaggaattgggaatctgcatttttaataagcatcctaggtaattcttttttttttttttttttttttgagacggagtctcgctctgtcgcccaggccggactgcggactgcagtggtgcaatctcggctcactgcaagctccgcttcccgggttcacgccattctcctgcctcagcctcccaagtagctgggactacaggcgcccgccaccgcgcccggctaattttttgtatttttaatagagacggggtttcaccttgttagccaggatggtctcgatctcctgacctcatgatccacccgcctcggcctcccaaagtgctgggattacaggcgtgagccaccgcgcccggccgcatcctaggtaattcttatgcatgatacaggttgagaccagtgccatgtacagaagtgggaaaaatggcttatgaaactcagttgtatttagcacactgtgttagacataaaatttgaaaacccaacctggacaacacagtgagacccagtctctactaaaataaaataaataagtgaacattgaaaaccaatggatagtagaatgtattcagttcagtgagacatgaaacaatatttttgcttaattgaatcaaacatatgttaaaaaaaaaaaaaaaactcaccctactcccaaagcactcaataaattcttcagagaaaaggaagagctttttgtactacattgcctctaaaatcttctgtaggataagacattttaagatcacttaaaatcttgttttaagtttttaagtctcattttaataaccaaataaaatggtttttatttgagccagtttcaagttcttaaagtgacacataggacttaacaaaatccattagttgtcatttgtgctttgcccatttttactgatttcttcatactctgaaggaaaaaaaatgctacaaatgtatgttggtatataagagagtgcattccataaatattagaaattttttttttctttttttgagatggagtttcactctttcgcccaggctggagtgcagtggtgccatctcagctcactgcaacctctgccttccagtttcaagtgattctcctgcctcagcctcctgagcagctgggattacaggcgcccgccaccacgcccagctaacttttgtatttttagtagagatggggtttcaccatgttggccaggctggtcttgaactcctgaccttgtgatccacccacctcagcctcccaaagtgctgggattacaggcgttagccactgcgcccggccagaaaaatattttatagaattcaaacttgtattttcttttgaagggatataaaaagggtgagagaacccaacaaccacacttattcaaatttataaggataattaggagtattctcatggttatctttagaatcttagcagggtaaaaaagagtttattgtttcatttgctgaaactcctgagaagaagtctcaccacatttgtatttacagagattagatttggcaactctaaagacaagagaaattactcatgataagtgtttggaggggttggagagaaaacagctaattaggcacttggcagtgtggcagggcaacctttgggcaacccagtccagattaggttagaagaggagcacggaccttttgtccactgcaaaccagtgccacaaatgaagtgggaagagacaggttaccacatactggttggacttgagagagaaccagaaagtgtacaatcccataagcataaaaaatggggataaaacttcaagtgtatataagggtaagaacaggaggaagcagtaacagagagggcaggagagaaagatcagaaggaatcggacgcctgagaagaggaactgggggctgagtcctgtcctggcctggccgctccccattcctccctctgcctctgagggcttcagttttcccaagtgagaaacagctgtgctagattgcttctacagtcctttccactcctggaccgaaacagttgcccctgcatctaaaatacgtagctctagcatataaaatgcaggttacctcaactcccccccgactcccacatctcactcccttcctttccctgcctgccctaattctggctgcgttctgttcttgcctcatatggactctttttctcctccccttcttttccaatgtcatgcagtctcttaacactgggtttcaaccactatacagaaaaatgttagtgaaaaaggaagaggggttccatgctgcttgattctccctaaccaggcacactaaactaggggtgacagtgtatcacaaagtccagactcacagtcttgctgccccttctcctcttcaaagtttgtttccgaagtaccaccccttgcacctcacatcccagccaactctgcctacctgtcagccccagccctcctcaggcctgcctcagcctcacagccaggatcctaccaacaccaacaccgcgccaaataacccctcccaaaagcctcaccggaactaatctggggactctgcctattattaggaacaccttggatgaagcccctacccgcagaattctggcagtagcagcagaattttcaggcatgtgcctaattttgttggggtggtggttgattattttttttaaatctaggatttctgggatctgaagcttatacaatcttggatatcttctttaagaaaaagaatacaaaaatatcttctataagttttacaaaaatatatgaccatgtgagcacgttgctagctcccgcccccaccccaccccccagagccttggaaggggagtgaaactgaagcttttttagcttcatggcaaatatgcttcttcctgagagtactgggtacattcacagacctttattttttactttctatagatttaatttagttaagtcagttcgaagcgggcaaaggccaaaatttctcacccctaggtggctcaaatttctgagcctgagattttatatcttaaaatccattaaaagaatactcaattttcggccgggcgcagtggctcacacctataatcccagcactttgggaggctgaggcgggcagatcacgaggtcaggagatcgagactatcctggctaacacggtgaaaccccgtctccactaaaaatacaaaaaattagccaggcgtggtggcgggcacctgtagtcccagctacccaggaggctgaggcaggagaatggcgtgaacccgggaggcggagcttgcagtgagccgagatcgcgccactgcactctagcctgggcgacagccgtctcaaaaaaagaatactcaatttttaagaagttaggtgtaggtatgcttatataaaatatttagacatgcataagtattttaagtggcctgaaggaagtacatgtatgctacttttgcaaatattttcgctttttttttttttttttttgnnnnnnnnnnnnnnnnnnnntctcactctgtctcccaggctggagtgcagtggcgtgatctgggctcactgcaagctgtgcctcccgggttcacgccattctcctgcctcagcctcccgagtagctgggactacaggcatccgccaccacgccccggctttttttttgtatttttagtagagacggggcgtcactgtgttagccaggatggtctcgatctcctgacctcgtgatctgcctgtctcggcctcccaaagagctgggtgggcatgagccaccgcgcccggccaaaatttttcacctttaagatgccctgcaagatggctggtattttcccgatttcaaagatgaagaaattgaggtttaacgaatgtaagtaggccaggcgcggtggctcacgcctataatcccagcactttgggagtctgaggcgggcggatcaccagaggtcaggagttcaagaccagcctgaccaacatggtgaaaccccatctctactaaaaatacaaaaattagccaggcatggtggcacacgcctgtagtcccagctacttgggaggctgaggcaggagaattgcttgaacctgagaggcagaggtttcagtgagccaagactgcactactgcactccagcctgaggaacagagcgagactctgtctcaaaaaaaaaaaaaaaaaaaaagaatgtaagtaatttgcccaagctgcagagctaaattttaaactagataattctgattccaaagcccagataatctggctagaagttgcaccaggggattcactgatttacaaagaattagaatgtgataaaattccctgagtacaggcaagtgtgatttttatctttgctagtaaagccatttagatgtcttaaagtgcctcaatctgttgcacctgttctactaaaacaaagaaatgagtcaacggcctcttttagctttaacattctctctgtctatacatttttatagaataatttttagttattgcagcaggtttcaccagtcagccaacgggtgtgtataacattaatcactagcactacacctcagaagtcttgcttattaagagcactcagcttaagtgaagaaattaaagaattttggtaggcctttgggacagttcaagtttaggttgtttggctgggttgagagagtaaaaaactaacatttcttaacctaaccctttttctttctttctcacaggtaacaactatccaatagcttacctttaaaatgtcccctctattgttcctccctcagacatttttgatcacttgtcccagtttccatgagtcctgtatcacagctgtcacaatgcttgagctatttaggtggaggtaactttcagaaatgaactgctgaagggtgcagagtgctcaagaattagattaacaaagaaagtacacctaaatttagcattaaaatgaacttttaaaatatttttcaataggaggataagcaaacataaaaatgggtgtgcttatgtctataaacaggtgctggagcatagattgttatctggacatcaaagaataatagagctgtagctttaaaagagcacacagctggttattagtgattcactcccaggtcactgccaagtgccaaggcatgtggcaagaatagtagaatggaaatcaggtgatgtggattctaatttgagctctgctctgttaaccttgggcatgccagttatcccctttggaccttagtctcttatctacctaatgaagggtttggagcaggtaattcttcagttctaagtaagaatctgtattcatgaataactgttcagcatatgactcagcccaaggtgtacaggattgctggagtgtggaaggtatgttggctcctgcctgtactagcaacaaggcttaatctagtgaacagaaaggatcaaaggtggctatatccccacctaaatgtccatgatctacaagtgctcttctagctggcagagtgggtcagtaatgagattttgtatctcattatatgaagttctaagcactgaacctaatcagttacccatcacttaagtagacagtgtcaggcagagcttaactctccttcctattttcctttgtcttccttttctctgtaagttctctaacataaggaacttccattttggtgaaagaatagaaaagttgagggacaggccaggtgtgttgtaagtaagactgatccagctgattggtttgccatttagattgcatggcagacatctgccataagcacttaaaacacaccttcaataggcattagaaagcacacacacggccaaacatagtagctcacacctgtaatgccaatactttgtgaggctgaggcaggaggattgcttgagcccagcagttcaagaccagcctgggcaatatagcaagatgccatctctacaaaaaattttaaaattatctgaatgtggtagtacattcctgtggtctcagctactcaggggtctgaggtcggaagatcacttgagcccaggagatcaaggctgcagtgagccatgactgtgccattgcactccagcctttgcgacagagcaagaccctgcctcaaaacacacacactgactagggatggtggcttatgcccagcactttaggaggctgaggcaggcagatcacttgaggtcaggagtttaagaccagcctggccaacatggtgaaaccctactctactaaaaatacaaaaatcagccatgcggccaggtgcagtggctctcgcctgtaatcccagcactttgggaagctaaggcaggaggatcacctgaggtcaggagttcgagaccagcctgaccaacatggtgaaatcctgtctctactaaaaatacaaaattagccccgtgtggtggcgcctgcctgtaatcccagctacttgggaggctgaggcaggagaatcacttgaacccaggaggcagaggttacggtgagccgagatcacgccattgcactccagcctgggcaacaagagcgaaactccatctcaaaaaaaaaaaaagaaaagaaaatcagccatgcatggtgacacacagttgtaatcccatctacctgggaggctgaggcaggagaatcgcttgaacctgggaggcagaggttgcagtaagccaagattgcaccactgcactccagcctgggcaacagagtgagactgtgtcttgaaacacacacacacacacacacacacacacacacacacacacacacacacataatttgctgttgttttgggggcatggcggcacatacctatagtcctagctacttgggaggctcaggcaggaggatcacttgaacccaggaagttgaaactgcagtgagctgtgattgtgccgctgcactccagcctgggcaacagagtgaagtactgtctcaagaaaataaaaaaataaagaaataaaaacataaggtttagatggcaactttaaaatgtgaaaggaggatatacagtttttcaaaattcttctaggagctatgccagcaaaaaggtttgaagacctgaagaccattatatcagtggcataaacatctttaatttgtccttttccttctcctacacctagtcaattgattttttttttcccatttatcaatttcagactctgcctggtttttcactttcccatccattttgttacaatatttttcctcccttgaaattagcccagtctcttggagtgaatgccccatgctccttcctaccgctgtgtctttactacattatcctcccttggaatgccgtcatctcttctctgttcaagaactacttctcccgaccactgtggtcgagattgatttctctttaacctctacaacattggctattccatacagttagcccttagcatagaacatcattgtttgattttgctccttaagaatagaaagcacctcttaaaattctaccatattcccccaatgcctaatgcaatgctaaccacatagtgagtgcttaataaatattgtattgactgcctagagtacagagcacttgttcactcattgttcggccattcagctaatactttttgagaaattttgtgtaccaggaactgtactatgcactggggtacggtagggactaaagtagatgataatccctgctttgaaagactgaaaagtaagatatatggtatgtcaaaaggtaataagtactgagaagaaaaatagaaaaagcaggaaagaagaacaagaagtgtgtgatgggggagggttacagggtggggaggggtagtgttgtatacacttctagataagatagggaagtcctcactgatacttatggtgacattttacaaaggacctgaggtgtaggaaggatttgagcttatctgtgcaaagagccttccaggcaaggaacttaccatgtgaaggcaccaaggctggacctgcttaacattccaggaagggaaagctttggggctggagcagaagggtagaggccagattgagagatgagtcagaggacagtggggcccgggcagagggacagaacctgcgggtgctggcaatcagccttttgatctgagtgagaatagaggccttgagagggctttgagcagaggagtgacctgctgacttaagttgaatagaaccctctagatgcttcattaaggctagactgaagggaggcaaaggcagggtgagatcagtcaggaggcaagtatataatgataatacattgaatataataatgatatattaataataataatccagagatagtggcaactcagaccaggggaagcagtagaggcggagagaagtggtcagattttggatttattttgaaggtagaacagacaggattgctgactctgttgagtagtcagctgggagctattgatggtttctgagcaggagctgaaggaagattaccccggtataggactgctgggaagacgtggtgcaggcagagatcaggtaggaggccattgcaaggatttaagggtgagatccataagggttttaactgcaaatcagcagaggaaaaagggagtggtgatggtcatggtgacagtgatggtgagagagactggaaaggaggaatcaacaggatttcatgactagataacagagaaccaatatgaagaaggaaaacactttttttttttttttgaracggaktctggctctgttgcccaggctggagtacagtgagacgatctcagctcactgcaacctccgcctcctgggttcaagcgattctcctgcctcagcctcctgagtagctgggattacaggcatgcaccaccacgcccggctaatttttgtatttttagtagagatggggtttcaccatgttggtcaggctggtcttgaactcttgacctggtgatccgcctgccttggcctcccaaagtgctgggattacagacgtggagccaccatgccctggcaggaaaacacacttttgaatgttgtgtgacctggagaatggtaacactgttaatttaaaaaaaaaaaaaaagcccagagaaggctgatttagggagaaatttatgccttagttatacagagtttgagatggtaatgaaatatcaaattaaaactgtccagcaaggaagtaggaaatgtggaactgaaaaagaagttagaactaaagatgtggatctgtctttggcataaagattatattaagttacttgagagtagatgagtttccaaagaagcagtgtagcaagaatagtggagggccaagactggatcctgggggtcagcaacatctaggagccagaaaaaatgccttcggtgaaagaaacggaaagatgggtctattcaaattgtagtcagccaacccatgccagaagtaagcacagaaagtaagagtgaacattggccaagcacagtggctgatgcctgtaatcccaacactttgggaggccaaggcgggcagattgcttgagctcaggagttcgagaccagcctgagcaacatggtgaaactccaactctacaagaaattagccggtcctgtgcacacctgtagtcccagctgctagggaggctcaggtgggaggatcacttgaacctagaaagttgaggctgcagtgagctgtgagcatgccactgcactccagcgtgggcaacagcccggtggctcacgcctgtaatcccagcactttgggacgccaaggcaggtcgatcacttgaggtcaggagttcgagactagcctggccaacatggagaaaccccatctctactgaaaatacaaaaattagctgggcatggtggtgcacacctgtaatcccagctactcgggaggctgagacaggagaatcacttgaacctgggaagcggaggttgccgtgagccaagatcatgccactgcacttcagcctggacaacacagagagactctgtcccaaagggaaaaaaaagaaaaagatccaggagatccattcctaggtatatacccaagagaattgaaaacataaaaacatatgttcacacaaaaacttgtacatgggctcatacctgtaattgcagcactctgggaggccaaagcaggaggatcatttgaggccaggagttcaagaccggcctaggcaacatagtgagaccctgtctctacaaaatgcatgaatgtttgtagcagcattcttcataatgttcctaaagtggaaacaacccagttgtttgtcagctgatgaatgggtagattatatgcagagtatccaggctgggcgtagtggctcatgcctgcaatcctagcactttgggaagctgaggtggacagatcatttgagctcaggaattcaagaccagcctgagcaacatagtgagaccttgtctataaaaaatttttaaatgttaaaaaaaagaatgcagagtatccatacaacgggatattattcagccataaacaggaatgaagtactgatacatgctacaacatggatgaaccttgaaaacatgctaagtgaaataagccagacacaaaggtctacacattgcctgacgccatttatatgaaacacctagaataggccaatctatagagacataaagtagatgaatggttgccaggctctgggagttaagagagaatgggaaatgactgccaacatgtatggggtttctacttgaggtgatgaagatattctgaaattagatagatagtggggatggctgcacaaccttttttttttttctttttgagatggagtctcgctctgttgccaggctggagtgcagtggcgcaatctcagctcactgcaatctctgcctcctgggttcaagcaattctcctccctcagcctcctgagtagctgggactacaggcaggcaccaccacgcccagctaattttttgttagtagagacagggtttcaccatgttggccaggatggtcttgatctcctgacctcgtgatctgccctcctccggctcccaaagtgctgggattacaggcataagccaccatgcccggcgacaaccttttgaatatactaaaaaacattacattttacactttgaagggtgaattttatggtaaattatatctcagtagaaaaaaatccaggaaactgtgtatagtcagccctccatatttgtgggttccacattcatggattctaagctaaataataatacaataataaaaatataaataaaaaacaatatgctatatagcagctatttgcattgcatttacattatattaggtattatgagtaatccagagatgatttaaagtgtatgtgaagakgtgcataggttacatgcaatactacaccatattatataagggacttgagcatctgtggtgtctgctgcgagtactagaaccaatccttcatggacaccaagagataactgtattcaaaaccaatgaaaccagtgaaagagaagtttcaaaaagattgaaaacacagcagggcagtcaaggaaaccagggagaaaggaaagactagtggatttgggtattagaagatgaaagattaaaacaaatcattccatatcagcatgcagtccatagactactcctaaaagttcctgagacttctttaaggaatctctttggggtaaaaattattttcatgatactactaagatgtatttgtcttttccctatgttgacacttgcactgatgttgcaaaatggtggtaaaactgctggcgccttagcacaaatcaggacggtgacaccaaactgtaccagtggtcactgcattctttactgccatgcactcacaatcaaaacagagccagtttcacttaagaatcgttgatgaagtggtaaattttttttgttttttttttttgaggcagggtcttacccaggctagagtgcggtgggggcatcacagctcactgccgcctcaacttcctgggctcaggtgatgctacctcagcctcctgagtagctgaggctacaggtgtgcaccaccacacctggctaatttttgtttttgttttgttttgttttgtttttagagatggggtttcactctgtcgcccaggctaaatattgttaattgtatcaaatgtcagtccttgaataaatcttttttttttaactggtatgcaccaccacacccagctaatttttgtatttttagtagagacggggtttcgccatgttggccaggctggtctggaactcctgacctaaagtgatctacccgtcttggcctcccagagtgctgggaggtgtgggccaccatgcctgatcctgagtacatctttttaaacttgtttgaagaaatgggaaatatgcataaaccgcctctgctgcacactggtagagtacggtggttgtcacaaggaaaagcatttgggcgattattcaagttgcatattgatttagcagcttcttttttcaccgaccaccatttttacttgaaagaatgatagacaaactatggttttagacttaggcatctggcagacagtctcttgaaactgtatgaagtgagcctgtcacttcaaggtaaacaaatgacaatatttgtagccagtgataaaatttacactttcaagtaaaaattagaattttggaaaacttgtatccactcccatgagcttgaccacttttcaatatatacagacttttctgctgaaatcaatggtgaaatttaaggaatatgattttttgatatgtattctaatgaaatatgtcagtatttagaagatctgcctaacaacagggaaccagtattttgcagtgatctatgtgtgatgttacaaagtcatgcatggtaaaatatccattcaaagtgcaagagaagccaatgggttttattataacaaaagttcctaactgttaagaaactactacttgtcaagttttgatgtagcgctaaagaatatccaaaattatctgaaaatgcagatactttctctgtctgtgtaaagccagattttctttgtatattttaaccaaactaacatattacaacagattaaatgcagaagcagatttgagaatccagtcatcttctattaagtcagacagaggccataaatttatgaaaatgtaaaacagtggcattcttctcattagatggctttatttctttgattgttttgggaaatatagtggtttacatttaaagtatgttatttatattaatataatgtgtagtagttttactgttaatatttttactgaattaatcatatcttttactttttttttagttttattttcttccttttttttttttttttgatttggagtctcgctctgttgcctagtctggagcacagtggcgtgatctcagctcactacaacccccacctcctgggttcaagcgattctcctgcctcagcctcccaagtagctgggatcacaggcgcctgccaccatgtctggctggtttttgtatttttagtagggtttcaccatgttggccaggatggtctcaaactcctgacctcaagtgatccacccacctcggcctcccaaagcattgggattacaggagtgagccaccacacccagtttttagtcttattttctaacacagtagacattgatatatagttcccacattaacaaaagttgtttggggtgctcaatttatttatttatttatttatttatttatttatttattttattttaattttctttttgaggcggagtctcactgtgtcgcccaggctggagtgcagtggcacaatctcggctcactgcaagctctgcctcccaggttcacaccattctcctgcctcagcctcccgagtagctggggctacaggtgcccgccaccacacccggctaattttttgtatttttagtagagacagggtttcaccatgttaaccaggatggtctcgatctcctgacctcgtgatccgcccgcctcagcctcccgaagtgctgggattacaggcatgagccaccgtgccccgcttatattttttttatttttatttatttatttatttatttttgagacagggtctcaaaaaaaacaactttgttgcccaggctggagtgcagtggcatcatcgtagctcattgtagcttctgtctccccagactcaggtgatcctcctgcctcagcctctcaagtagctgggactacaggcacgcaccacccaccccacccaactattttttttattttttgtagagacagagtcttgctatgttgcccaggctggtctcaaactcctgggttccagtgattctcccgtctcagcctcccaaagcactgggattacaggtgtgagccaccactcccagccaaatttaccagacttaatggaaacagtccatttctgtttcttcagatgaaacctcacaactttaggattaataagtaatctcacaactattgtacaggaaataagaaaacgttcccgctaacaatgcacgttgtgatagatctggtccctgacacaaacagcacttggaactgagtgaagtccagagactgaataatacagttctatccactccctgtgcttgactacaacccctgaagagggcttgtacaaattaaatgtatcccagcagctgcttgaaagaccacagcattggccgggcacggtgactcacgcttgtaatcccagcactttgggaggccgaggcgggcggatcacgaggtcaggagatcgagaccacggtgaaaccctgtctctactaaaaatacaaaaaattagctgggcgtgatggcgggcgcctgtagtcccagctactcggagaggctgaggcaggagaatggcgtgaacccgggaggcggagcttgcagtgagccgagattgcaccactgcactccagcctgggcgacagagactctgtctcaaaaaaaaaaaaaaaaaacacgcattttgaatgtccctagcattagggattataaaggtcccattctagtagaagatcctcaggtttggagtgtactaaaggtcatcatccttcgcctgctaataaatttctgaagtccctgctttaaacaaacaatcaaaaagaaggaacagttacagtgctgccaaacaagttctttttttttttttgagatggagtttcgctcttgttgccaggctggagtgcaatggcgtgatctcggctcaccacaacctccacctcccaggttcaagcaattctgcctcagcctcccgagtagctgggattacaggcatgcactaccacgcccagctaattttgtattttttttagtagagacagggtttctccatgttgaggctagtctcaaactcctgacctcaggtgatccgcctgcctcggcctcccaaagtgctgggattacaggcgtgagccacggcgcccggccaacaagttcttacaaacctctgggttgttacaaacccatctggtgctaataaaggtaaggcatcaaccccaatctccaagctgagaattttatcctcaggactgagcactgcggcctgcattcggatgttagtggggctgtcagaaccgtgtctcatgctgttaaaagtggaagtccttcccactcagacccacggaagccaactctgatgagtgggagggtgagcagaaggggcttcggtcattttttatagattcttcaggtaactctagccaccatattaagcattggctcccacaaaaaagcattaaggctcagaaacatcttgtagggtcacaccctccctaaaaacagcacatccctgaagtggtggctgggcagccaggctccaaagcccgctgagctgagcggcagccaagaacaaggtttggtgtttacatactcaaaatcagcctgggttgtcacagcaactcacctcagcacagttcttccttctccacggcggcttgcttccaggctttgctgttctccgtcaccgtcttaacgttcctgctaacctggcctgctgcattctttttatttttctcccaattcctccgccttcttctcatgtgtttgctagtgtgcaatacctcacctgtttggaactcaacaacgtcccctcctgcaaaacgcacctgaaaacaagaaatagcacacaaggcctctaagtggccagaacagatgttaccaggcctaagtccataaggaaagcacccaagccccttgcttttgtcttaaatctttttttttttacacctttaaaataaggttatggtttctaaggcctgccgtaaattaggagtagggagaggaactattgccaagcaccccaaaagttcaagaggtgactgttgatcccagagtagcaaggaaagggacagacaggctataagaagtggacacaagaactcagaactcaggacagtgtaggccttgttagagtcaggcagacaatttcacatacctcagaacgtcataaagccatcatgactttactctggaatagatacgatccagacacctagaaaatgttaaattagattcaacttaaagaggcagagtaatatgtgtggtgttttttaatttcgagcattccaaatggttaagggttttcatgcttaaagagagaaacttagctacctagaacttatttatgagtgctctagataattatctactgttttatatttttttatttataccccgttactaaaacaaaagtaaaaataaagcaaaagattgaaggcattgacatttagtctatatactttctagttcctggctctagttcttagcaatatttgctgctaacctggtgttctgtctctgccaaatttctgcccatgtgaaatatatgagacttgatcctatttccttgctcattgatctacctgaaagggtcatagatgtctccacctccctagagctagtgatcctatatcccatcatctcagccagctagaaaacgaaccatcacatgccacctcctacccaattacgtgcttcataaacagaatacctggcatatagcaggcatttactaaacacttggtgaatgaatacatgagccagtaatccataagatatctgtagaattaattacagttgagccttgaacagcgcaggtcctatgggatcccaccccttgtacagtcaaaaatcctcataaaacttttttttcttttttttttgagacagaatcttgctcgttgcccaagctggagtgcaatggcgtgatctcagctcactgccacctccgcctcctgggttcaagcaattctcctgcctcagcttcccaagtaggtgggattacaggtgcctgcaccacgcctaactaatttttgtatttttagtagagatggggtttcaccatgttggccaggctcgtctcaaactcctgatctcaggcgacccacccgcctaagcctcccaaagtaggggattacaggtgtgagctgccgcacccggccgacaggtgtaactttttttttttttttttttttttttgagacagagtctcactctgtcaccaggctggagtgcagtggctctctctgctcactgcaatctctgctcactgcaacctctgcctcccaggttcaagcgattcccctgcctcagcctcctgagtagctgggactacaggtgtgtgccaccatgcccagctaattttttgtattttagtagagacggaatttcaccatgttagccaggatggtctcgatttcctgacctcgtgatccacctgcttcagcctcccaaagtgctgagattacaggcatgagccaccacacccggccacatataacttttgactctccaaaaacttaactactaatagaagacttaccaatagcataaacaagttgattaacatatattttgtatgtcatttgtgttatatatgtatttcttaccataaagtaaactatagaaaagaaaatgttattaagagaatcataagcaagaaaaaatatgtttactcttcattcagtggaagtggatcagcataaaggtcttcctcctcatgatcttcaggttgagcaggcaaggaggaggagaaagagaaagggttgccatctcagcagtggcagaggcagagggaagtctaaggggacccttgctgttcaaaattgtgttgatcaagggtcaactatacttgcatgaagctataaatttaagagcctagcctattatgggaacagcaattaaaaaaaaaacaccagttggccgggcgtggtggctcacgcctgtaatcctagcactttgggaggccaaggcaggtggatcacctgaggtcaggagttcgagaccagcctggccaacatggtgaaataccgtctctactaaaaatacaaaaattcactgggcatggtggcgggcacctgtaatcccagctacttgggaggctgaagcaggagaatcgcttgaacctaggggccggaggttgcagtgagctgccaagatcgtgccattgcactctccagcctgggtaaaaacagctaaactccatctcaaaaaaaaaaaaaaacaccagttgatcctggcaccaggaagatcaaatggcatttgtttgtttgtttgttttgagacagagtctcgctctgttgcccaagctggagtgcaatggcacgatctcwgctcactgcaamctctgcctcccaggttcaagtgattctcctgcctcagcctccygagtagctgggattacaggcacccgccaccacacccagctaattttttatatttttggtagagatggggtttcaccatgttggccagtatggtctcaaactccggatctcaagtgatccacccacctcagcctcccaaagtgccttggtttacaggcgtgagccactgcaccagccagtacagttttttgttttgttttattttggttttttgagacggaatctcgctctgtcgcccaggctggagtgcagtggtgccatctcagctcactgcaagctccgcctcccgtgttcatgccattctcctgcctcagcctccctagtagctgggactataggcgcccgccaccacacccggctaatttttttttttgtatttttagtagagacggggtttcaccgtgttagccaggatagtctcgatctcctgtcctcatgatccgcccgtctcagcctcccatagtgctgggattacaggcatgagccaccgcgcccagccttttttttttttttttttttaatgtatgggggaaaaatgactagaaggacagaaaccaacatataacatgattgtgtgcatttacttatttaacaaataattgagcaatttatttctgtatgatactattctaagcgttttagagttaagcaaactcacagtaaactgtattgcccatgataaaaactgcagttacataatttaaaagcaagaatcgcagcaattcatcaggcacagtgactcacgcctgtaatcccaacactttgggaggccaaggcaggaagattccttgagcccaggaggtcaaggccagcctgggcaacatagtgagaactcatgtccacaaaaattacaaaatagccaggcatggtggcaagcacctgtggtcccagctactcaagaggctgaagttggaggatcacttgagcccaggaggtcaaggctgcagtgagcgatgatcgtgccactgcactccagcctgggtgacagagcaagagaccctgtctcaaaataaataaaaataaaagcaagaattgcagaaagtataaaccatgaccaactcaagagaataatcaatgaaagaataggcagaatgtctttccaaaaagcagttgagagatccccatcctccacatatgcactagtgcagtggggatgttgccaggcatggccgccagacctctagatagaacactgaaggtgagtctgcagtaaagccatggaatgtgctaattttagtttaggaataccaaattttattgaccgtttttaattcaataagcaacccttggccatgtataatcagttcatgacccatcagaagatcctctgtggttcactcatggcctttggactatactctgaatcatggctttagaagacatttttttagtatacttaaatggattttataacttggttgatgcccagattacagactgtgaggagtatctccacataacttgtaactgctatatatgcagtcagcaattccagtatttagcctgatattaatttatatttttcctcataatctgataatacagtgctagcaagatagatcacaaagtgtaaatgagtgtttctggagcatagatgggtacgctcaaatctttgtatcttgttttttaatagagacggggtttcgctatgttgctcaggctggtgtcgaactcctcggctcaagcaatccccttgcctcagcctcccagagtgctgggattatacatgggagccaccatgcctagcttccttgtatcattttttaaaattcaagtaagagaaaatgtctggcaatagttcataagctataaatgaaacctagtcttaggacccagctttatattgcctcaatcaaatattaatatctttagttcaaaatttgtatttacaaaaaacttttggttcttggggataccgttattgccttctctgttgccatccatataatgtatgttgttttttttttctctctccctctgggctgcgtttcatgccagataaacttccaaaccaaactgggatggcaccaggcacaaataacactcttcttatcttttcccccatctaggttacccctttgctttgttttatcggcattaccttytctacaaggagacctacctcatccacctcttccatacctttacaggcctctcaattgcttattttaactttggtgagtaaactaaattagcagtgacaccgcaattagtgggaacctggaaggaacagacttgaacaaaatttccttgagagaatctaataggtagggaagttataatgctcccacttgcaaagagggttgtatgaagaggaacacagcttaacttttcctttttttcttttatgtacattcttctgtcagataaaaacattttgagggtggttacccttgccatacctcatcaacaaagaatcctcagtttctctgtgctgtggatgtaactgaatgaccgagccaagcagtccccacttagattcattcttcacttcagacattcaaaaatacagtaacaagctgggtgtggtagcccggaattcaaggctgcagtgagctatgattgagctactgcactcaagtctggacaacagagcaagtcgcatctctaaaaaaacaaasaaaaaaagaaaagaaataaaataacaccctaataatcttttttattttaataaataatttccatcctctcctccaaaacatgaggttattctgaaaaaaaagatcctgatgccaacattttttctttatatattacgttgtgattggaagtctcaggacggtgggagtgtaaaaaccaggctaaattctctcttcttgcatccaggaaaccagctctaccactccctgctrtgtattgtgcttcagttcctcatccttcgactaatgggccgcaccatcactgccgtcctcactaccttttgcttccagatggtaaacgtctttcccttagcagctcaggctacagctgacagcggttcaggggacaggggtaggcaggggactgtrgtatagaaattagcagacctaatttctaacccctctcccagcacttagcagtatgacttcaggtaggtggcttatcacaggcccaagtgttccatccacagattgtaatggtaactctttgcctgcctcaaggaagggccaccagctaaccctttgcatactgtgccattaggctctttggtttaacccactatccaggagcagagtcacttcaaggcaagacagaaaagcaacttagaatgagttaaagaacctaagcctaggccaggcaaagtggctcacacctgtaatcccagcaccttgggaggccaaggcagtcagattgcttgagcccaggagtttgagactaacccgggcaacatggtgaaaccccatctctacaaaaaaaatacaaaaattagccctccagcctgggcaacatggtgaaacaaaaaaaattaaaaattagccgggtggggtggcatgcacctgtggtcccagcatctaaattctcatctcagtttagccctcattttgccaagaagccttgagcaacgctcttcccattacaggttttcagcacctccatttgtaggaatttattaaggcttttaatgatgggatgaggagaaaggaaaaaggaaagagaacattgaatttcagagcaaggagaagaaatagtagtgatgctagaataaatacttctgcctctcctaggcctaccttctggctggatactattacactgccaccggcaactacgatatcaagtggacaatgccacattgtgttctgactttgaagctgattggtgagtgatggtcactgcctgccttccttacatgtaggtccctcccccatctcactaaaaacttcctcggcaccccccctccgccccccgccatacacttctggctgcactcagtctacaggccacatcctcagtgtcctctcccaccaccctacccatccgttctctctctgctcaggtttggctgttgactactttgacggagggaaagatcaggtaagtacccattcatcggcagagaggttcaagacttaatgaaagggaagaaaaaagttgttaacaaaagactgaacccaaattccagagcggagcctctccctcattccccagcctgtgcaatctccctttcagatagcactgagcaaggatcaacaaatctaatttgcccaggatccagctcttgcacaaagtccagagatcaatgccagcaaggcatttgctaaagcagcaacagccagctatgcacacacatacgcatttccacaagaagcaactatttgtcatcccccaaagagaaggctatttgaagaaccccagtcagtggggcacacaggtggggaacactcaaagtggctcttgtggggagattcaaggctatcctgaaccatgcattctcttcttggcatagaattccttgtcctctgagcaacagaaatatgccatacgtggtgttccttccctgctggaagttgctggtttctcctacttctatggggccttcttggtagggccccagttctcaatgaatcactacatgaagctggtgcagggagagctgaytgacataccaggaaagataccaaacaggtaattgcccctcttggtccagatgtttgtgtaggtatttcactcactctgaagtgactcttctgaaagctgcattctccagcatgaccctggcatagagacctgagtcatgcaggccctggactgttgtaacaggcactctgtgccaggagtgggccctttttagtttagggttcttccagttatccattctaacactagtacaaacataaaaatccacatttatgccacaggattttgcctgaaccagtcacatttctgcctttaaagcctattttcatgtatatatgaaatatatttatgattgataggtaggtaggcaggttgataggtaggtaggtagatagaggctgggcacagtggtttcacctctataatcccagcactttgggaggccgaggtgggaggatcacttgagcccgtgagttctagaccagcctggcaacatagagagactctgtctctacaaaaaaatacaaaaattatcagacatagtggcatgcatctgtagtccaagctacataggaggctgaagtgggagaattgcttgagtccaggggaggtgggtcaaggctgcagtgagctttgatcacaccactgcactccattctgggcaacatagcaaaatcctgtctcaaaaatatttatcagtaggaaatgcaggagggcacagtggctcatgcctgtaatgccaacgctctgggaggccaaggcaggaggatcactggaggccaggagttcaagaccagcctgggcaacatagtgagaccccatctctacaaaaaaaaattatccaggcaaggtggtacatgcctatagtcccagctactcaggtggccaaggcaaggggatcgcttgagcccaggagttcaaggccacagcgagcaatgactatgcctctgtactctagccggagtggcagagcaaggccctgactctagaaaataaaaattaaaatggtaaaaaaaaaaaaaaaaaaaaagtttaattgccagaagaattccttcactgagaacttgtccatcctgtgtttcagcatcaattcaaccaagaaatgaaggagcagattcaaagtggttatttttattatcttacctccactgggttttcagtcccaatggagattgtgagacctggcaagaccttgagatcagtagcatccctgaggggtaaacacaagactggtccactgtctgctgccctgactttcctacaactcttaagaggtttgcagtccccattcctcatagccagccatagaaatctttccctgaaacaggaaacactttgggcagcagagcttctcatcccattccaggtagacaaccacacccctaaacactcctctccataactgaaggtcagagggtgaagggaatagtctctgctctctgtgaccaggaacttcactcgttcctttccagcatcattcctgctctcaagcgcctgagtctgggccttttctacctagtgggctacacactgctcagcccccacatcacasaagactatctcctcactgaagactatgacgtgagtgtctactaaagcagcagcagcatgactgcaccagagctagaaaatggacaggcaaggatccctacagatagcagagaagtaggaaatatcatctacaagtgcatgttggttttgctctaratctgtgagttgtcaatgccagccgtgctgggacatgttcatcagccagcactgaacaaccttcgcgggcacagggctgtgccaggtgcacatttagcacccgttgccttctctaggagccgctcctagcttgccttatcacatccacgtgacccctcagagcacagcagcttctgattctccatcctattttcttctcttgactgatacatttgggcacttctagggaattcagaaaccaagggaaggggggaagtgctggcttttgctcctgcccagctgaaaggcttgaaaacagttcagtaattctgggcaggtttctctccttaaattaaaatccaatatgggcccctctgtacttaacattccaaatgctcattccaaacactttgccaacgaaggcaaacagtagagaagttaaatacagtgctgcccttgaggctctccaagggaaaggcgaatgaatattctccaggccctctgcttattcctctctgcctattgtgaaggcaatcaggccagactattgagggcatctggcagcaggactcaggcaggtatgaagtagccagccacaagtgtgaaaaggaagagtgctgagagaaactgcctagtcatgtgatatccctaatgcactgtgctttcttccctcaagaaccaccccttctggttccgctgcatgtacatgctgatctggggcaagtttgtgctgtacaaatatgtcacctgttggctggtcacagtaagtagaaaagttgaaacaaggtcctatttagacaagccatgggggccagtrtggggagtggcaagagccctaactgagctrttccctctcaggaaggagtatgcattttgacgggcctgggcttcaatggctttgaagaaaagggcaaggcaaagtgggatgcctgtgccaacatgaaggtgtggctctttgaaacaaacccccgcttcactggcaccattgcctcattcaacatcaacaccaacgcctgggtggcccggtgagctgctggtggggagcctggaccctggttccttccttccactgtcttcccagattggagggcaggggtgtaccatgtcacccctatgcgtctttcccatctgggcagaaccccctgtcgctcacactgactttgacccccacctatacccccctcccaaaaaaaccattactgtcatatttgaaaaaaaggcaagatataaaagtgcgttaagacctgggtgttactccagctctgccaatggacttatgtcctccactgccctgtttatcaacagctttacttgtttgtccccaccactagagtgtgggcagcttgagtagagtgtctggttcaccactgatctcagcatcagcctcagtcactgctgctgaaccaagtggctcgtgcgcacacggtctccagctccgccttgggtctgctttccatctctaaaagtaatcagtcagcactgcctcctgtaccctctgggggctacacgtgggaacccaccagcactccaatccaatcctcagggtgaggacccagaggcaggtggcgggatgcaaggaccagtcagtttgagggtcgccccacccacccttttctccagctacatcttcaaacgactcaagttccttggaaataaagaactctctcagggtctctcgttgctattcctggccctctggcacggcctgcactcaggatacctggtctgcttccagatggaattcctcattgttattgtggaaagacaggtaggcctccagggtgggggtgaaggggaatataagggacaagatgctgatgagctcctcctccctccccaggctgccaggctcattcaagagagccccaccctgagcaagctggccgccattactgtcctccagcccttctactatttggtgcaacagaccatccactggctcttcatgggttactccatgactgccttctgcctcttcacgtgggacaaatggcttaaggcaagtgaaggcctgcttgtgagactgggagggactcactgcaacctcaaaggttgcaaaggacactccaggcctgtctaccttagtggcctctctctccacaggtgtataaatccatctatttccttggccacatcttcttcctgagcctactattcatattgccttatattcacaaagcaatggtgccaaggaaagagaagttaaagaagatggaataatccatttccctggtaagttaatacagctaaactaaaactaccaccaggttacagaatagagcaacagactggaaaaaaacaatagtattagmaatctggggtgaattccaaggattagcctggctactaaggaacacagtatgggcaatgactactgtgacttattgaggcatgctaggaaacatctggaagggctatagaccaggaattacaggagtaactaaccagccttccaaactcctcttgtcttgcaggtggcctgtgcgggactggtgcagaaactactcgtctcccttttcacagcactcctttgccccagagcagagaatggaaaagccagggaggtggaagatcgatgcttccagctgtgcctctgctgccagccaagtcttcatttggggccaaaggggaaacttttttttggagaaggcgtcttgctttgtcacccacgctggaatgcagtggcgggatctcagctcaccgcaacctccacctcctgggttcaagtgattttcctgcctcagcctcccaagtagctgggaatacaggcacgccaccatgcccagctaatttttgtattttcagtagaaacgggatttcaccacgttggccaggctggtctcgaactcctgaccgcaagtgatccacccgcctccgcctcccaaagtgctgggattacaggcgtgagccaccgtgcccggcccaaaggggaaactcttgtgggaggagcagaggggctcacatctcccctctgattcccccatgcacattgccttatctctccccatctagccaggaatctattgtgtttttcttctgccaatttactatgattgtgtatgtgccgctaccaccaccccccccatgggggggtggagaggggtgcaaggccctgcctgctccactttttctaccttggaactgtattagataaaatcacttctgtttgttcagtttttcaccactagcattcctgactgctctctttcacagttcttctccatcatcagggttctctcctttagcacatgggaatctgggagctaaagcctgccttcaaagcatggaaccaaactgcaaactctgtaacctcctatctgtccctgaagtcccggggaacaaacagttttacaccaytggatactttaggaaccccaaaacaaccaggtttgcaagaacagtattcataggataaacaaayagcaaatgtacagccttggcttccccaaactccacagtctcagtgcagaaagatcatcttccagcagtcagctcagaccagggtcaaaggatgtgacatcaacagtttctggtttcagaacaggttctactactgtcaaatgaccccccatacttcctcaaaggctgtggtaagttttgcacaggtgagggcagcagaaagggggtagttactgatggacaccatcttctctgtatactccacactgacctaagaaaagaacagttttgtcagccaactctgtcactcagtagctgtttcagcccttctttagggcaggaaaactatggctgagctagtatttcagctgtgctgttgaatatcaaatccctacaaaggatgaagaaggtcctaactgtgacttccaattatggcagcagccctcaaaggatgtgccctggggcagggtgtggaactgtcatgtgtcttctagctcattrtaagcattgttaaaatgcctactgctctgggaattctatactaagttcagctctaccaagaatttcagggttgagcccagaccttaccttgccatgggcaaaggcccctaccacaaaaacaataggatcactrctgggcaccagctcacgcacatcactgacaaccgggatggaaaaagaagtgccaactttcatacatccaactggaaagtgatctgatactggattcttaattacctaaagtaaaaaagagagaaaagtcagccccagaaacattcccagaaccagccttcaactaacaggtttcaatacctcaccttcaaaagcttctgggggccatcagctgctcgaacactgagcttgtgtaaaagttgaactagaagggggaaaaaagagttcagagctagatggagaccacagtccttctgtccagtcatcgaacaaggaaaaccccatggataagatgagttccctgtgtgctttatatctagactggactcctgaaatgttaggaacaaacagttgccaagcatatggctagctgtacagtgatgggttcagactccctctttcactcagccaggaagctactgcaagaacaggagtggagtttccacaaacatagaaaaataataacagtccttgtcctggtattaatcatgttgttctcccattttctcgcttaaaaatccacatttagttctcccttttcctcttcctcccttcttccctactgacaagttcattctaactttgttctaaggcttcttacccatgaggccacaaaagcggtcaaaggttctgggaattcgggtctggggattcacttcaatcagaacattcttctgtgtatggatataaacctgtagcaagccagctcggttcaggggactatccatcagcatcagcaaactctgagcaaagcagaaaccgagacatggttaaggctgaagagaggcagcactcagctgccaacccttccatacagaggctcaaagggttgtgagcactgtccctggagttacctggtgggtgatatctggccgcgcttccccagggtcccgtccattcttcaacaatatagacttgtgcttgtcacagttgagtagctcatatgtcttccctacctgaagaacagggaacatgacgagagaacagcataagcttctgttacctagccccgtggttcttcaagtgtggtccccaaactaccagcagcagctgcacctggaaacttgttaggcaaattctcaggcccaccctagacctactaaaccaggaacactgggggtggagcccagcaagcccttcgggggattactgtgcagccttatttgcactccccagtgaatggtctgagagggaaacaggaggaagggcacaacctgtgacttcacattatctactaatacactggatttaattaaaaaacctgtggctgttaggcaaggccaatgagacatcctggaactaggcaggagttagtagttagcaaggctgaatgctgtgtttattacaggagcagtaagtaggtactgtgcaaaatatcgagtcaccaccctcagtttgcgtacaccaaacatgcactaagtgaagagctgcaaatctgaacaagaaatgtgaaggccgggcgtggtggctcacgcctgtaatcccagcactttgggaggccgaggcgggcagatcacaaggtcaggagattgagaccatcgtggctaacacggtgaaaccccatctctactaaaaatataaaaaattagccgggcatggtggcaggcgcctgtagtcccagctacttgggaggcagaggcaggagaatggcatgaacccaggaggcggagcttgcagcgccactgcactccagcccgggcaacagagcgagactccatctcaaaaaaaagaaatgtgaaaactaatgatgcaggaggcagtttaatcaaagaaaactctcagaagtaaaaggaagaggggttattcccagttttaagacgggcatgggggcagatgcagtggctcacggctgtaatcccagcactctgggaggccaaggcaggcaaatcacttaaggtcaggagttcaagaccagcctgggcaacatggcgaaaccccatctctactaaaaatacaaaaattagctgggcatggtggcacatgcctgtagtcctagctacttgggaggctaaggtgggaggatggcttgagcccaggagacagagattgcagtgagccaagactgtaccactgcactccagcaagaccctgtctcaaaaaaaagaaaaaagaaagactggcatgagcaaaggtacagatggaatcaagacaaagtagccaggtgtggtggcttatgcctgtgatcccaacactttaggaggccgaggtggaaggatcacttgagcccaggaatttgagaccggcctgggcaacacggtgggaccctgtctcacaaaaaaaaaaaaaaaaattagccaggcgcagtgccatttgctggcagtcccagttactcaggaggatgaggtgggaggactgcttgagccagggaagtagaggctgcagtgaaccatcacaccactgcactctgttgcccaggcaacagagcaagaccctatctcaaaaaagaaacaaaaaagaaaaagtggaaacgaagaaaggaaattttgaggaaaattgggagctgagacactaaagggcagtgattatatatgaagctgctttgtaaaccacagaatcctaatgtatcaagcacaaagccaaaaataattctggagtaagcagggcaggatgggaatgactgacagacactatcctaacaactctctgtacactggaaaagacatcagaagtttgatgttaaagaagtggactacatctgtagcagctaaaagaaataattccaagttgcaatttggagtcccaaggagcattagggtggtcagtaaaaagtctaaaaacaaactgttatatacaaatacaagttttggaaggttaagtttttatgtatcactggaatgtatatgtctagcaacattcttgagatatatggctccaaaaagtctgcgaaaaaagggatgtagattttgaaattgaatagttgaagtaatgtcacagagagcacaaagaacaaatgaccaagaactaagtccatgagacacccttagttatagaagaaaaaaaccttcttgaatgaataatacagtttcaacccattagtaggatataatcatgttttctattcttttaatagattacaggcgcaggcctgtaatcccagctactctggaggctgaggcaggagaatcgattgaacccgggaggcggaggctgcagtgagccaagatcgtgccactgcactccagcctggtagagactgagactccatctcaaaaaaaaaaaaaaaaaaaagtgtatttasaacgaagattaaaatcctggcctgacttctaaaccaatgcgatttcttctgggcctattcaattagttctaacgggtaagagaaaggaggaggaagaacactgcccaaggctttaagatagagaactgctggttctattacatgtggggaaagagatgaatgatagataaaaatgcagatgtaaaagttttaaataataaccaggtctggacagtgtatcataggtggatattagagagaggtgactatggatactaatgaattgaaacacgaagcccttacaaaaagtgtgggcagactaggctacataactacgtttctcatctgcccagtaacttgtcttgggatgtggaatgacgcaaggaacgaaactttcctctgcttagactactataccacagaatcctggtaaaccaattggaagcaaggaggtgagggctagaatatcattcaaaaagagcaaaagaaaatgagtactaccggccgggcacagtggctcacgcctctaatcccaacactttgggaggccgaggcgggcggatcacttgaggtcaggagttcgagaccagcgtggccaacatggwgaaaccccatctgaactaaaaatacaaaaaaattagccgggcgtggtggcacstgcctgtagtcccagctactccagaggctgagtcaggagaactgtttgaaggcgggaggcagaagttgcagtgagccgaggtcgcgcaactgcactccagcctgggcgacagagcgagactccgtctcaaaaaaaaaaaaaaaaagaaagaaaaatgagtactaccatcccaggatgtcaaatcaacgcaaagccaaccaagccaccttccttcaaaagcatctttcacccctctctgctttctacatccactctgggccccttaccctcattccacggagtcccaacctatcgatttactacttctccacttcctgtcccaaactaccttgactgtctccagactggccccttccagcaccacaataagcctacggcctccgatcttgtttyctscccctagtcggggccgcttgggtggcagagcatcccagtcctgtgcctgctccccaccgcttmgttcacgaggcttgaatccatcactgggcgcggccatcttgcaacaataccggaagttgcgctaacgctcttaaataagaacagcgcggcttctaatcacaaatttccttccggctgccattttgaaagtgggccaggaaatggagatgacttgctgtcttgcgctgccctccctgggagggcagccttccagaaaggggcgggacttccgtatgcgcgattcctgtgcgcgaagttcgggtccgtagtgggctaagggggagggtttcaaagggagcgcacttccgctgccctttctttcgccagycttacgggcccgaaccctcgtgtgaagggtgcagtacctaagccggagcggggtagaggcgggccggcacccccttctgacctccagtgccgccggcctcaagatcagacatggcccagaacttgaaggacttggcgggacggctgcccgccgggccccggggcatgggcacggccctgaagctgttgctgggggccggcgccgtggcctacggtgtgcgcgaatctgtgttcaccggtgagcaacctccgccygctcgccggacgcttccagtccctcccccaaaccccttgccctgtccccgcgcccctccacgggcctagcatttcctctgagcagcggcctggcctgatcaccacccatctccccacagtggaaggcgggcacagagccatcttcttcaatcggatcggtggagtgcagcaggacactatcctggccgagggccttcacttcaggtaatggcgggcagagcctgctgaccctgacctttcacccttgacgccgacccagcagtggctatagtcggacgtgcaacaggattcaacgctgctcttttcccaccctcctcatccctgcccctaggatagtgggtgctgcgcgaacctccagcagcatacaaactgttgttttccagagggacaagagaatctctccttgtctgtggtcgtggagaggagcaggccaaaaaacgcgtggtgaggggaaaccgggcaaggctagtgaaactgcggccttttctttttttttttttggagagggagtcttgctctgtcgcccaggctggagtgcagtggcgcgatctcggctcactgcaacctccgcctcctgatttcaagcgattctcctgcctcagcctcacgagtagctgggattacaggcgcccgccaccacgcccggctaatttttgtattttagtagagacggggtttcactatgtagatcaagctggtctcgaactcctgacctcaaatgatccgcccgcctcggcctcccaaagtgctgggattacaggcgtgagccaccgcgcccggccgaaactgtggcctcttaatacctatccctgtcctctccaggatcccttggttccagtaccccattatctatgacattcgggccagacctcgaaaaatctcctcccctacaggctccaaaggtaggtctgagcacttggtaatcacatggcaggtgggatgatcaaggtagctggcaagaaaccccaggggaatatggtagtgtcaggcctttaggcctctttccacatctgcaagagctgtaacaaaaatacctgcctcctggggtcaaagcagcaaattctgaacacactgtgtttgcgtgctttttactgtctcctccctgacgtgtattcaataagagtattgtttgtccctcgtcttgttcactgcctagatcaaagctttgttttaaagccttttttttctaactgcttgacttactatatctacagttacatccactagtacactctgttctggagaagtttgtccctaagcttgactagttcacctgttctctccttctagaccatacataaaagccgtgcctttgagttccccagacctyttcctcctccccacccacgcacacatatacaccctgggtcaggtagctcacctgtaacctgtaatgtacttctttgtgctatacctagtgcaggtcgcttattcatttactagactgggccctgggaataaaagattcattaaacacaattcttgtcccccaagtccttacaggagacatgattacggtacagcacgaaagcgcccacgttagaggttgcacagagtacagagggggaaagagtagtcagctctgctggtgacggggtttgcagttcaagkcttcacagtgggtgagggtgcatttcagctgtgctgcgtcttgtcttccttgtcagcctgattaactctcctccccccagggtagtgccaggctgtacaccattgcacagggcatacagggaggaacatgaaggagaaaatgcttgggaaagggtgtttggccttgaccagccactgctgacctcaatctcagacctacagatggtgaatatctccctgcgagtgttgtctcgacccaatgctcaggagcttcctagcatgtaccagcgcctagggctggactacgaggaacgagtgttgccgtccattgtcaacgaggtgctcaagagtgtggtggccaagttcaatgcctcacagctgatcacccagcgggcccaggtctgactcccaccaccatctgcgtggtgtcagcctttccttcctaggcccagagtattgggaattaggaaaggcagcttattagaaaagcattgtcaccctagtgccatttccacctaaaagctgtgctaattgccactgtgaaataaggagagccagcattagaactcgatagcactcggtgttaggaagcacagaggaaaatggccaagtcttggcttttcctgcacctcttcgagcagagaggcttatgttacaggtttgcctgacaggaagctaaggcagtgcatgttgtattgagagtgaagggttaggggtcgcaaccttcctttcagctccccagtcccctcaaaccacccctcccttcccctcttcacccctgccctcaggtatccctgttgatccgccgggagctgacagagagggccaaggacttcagcctcatcctggatgatgtggccatcacagagctgagctttagccgagagtacacagctgctgtagaagccaaacaagtgggtgagtcgcaagagccgtggggtgagggcttctgagatgcaggaggaggaaagactccatgggtggggctcctgacccaggacagggtctccctgactctctcccaccacagcccagcaggaggcccagcgggcccaattcttggtagaaaaagcaaagcaggaacagcggcagaaaattgtgcaggccgagggtgaggccgaggctgccaagatgatatccttctgctggagagatctcagcccagcccctagggcacctgagttccccattctccttcatgggcaggctgatgagactaaggcgaatgcgactccgtgctctctggcccttggctccttgttgggggtggggactacagatgagatctgaaatcttagtggtagtacctgagccatgactccccactgtaaggccagatcaatagcattggtggccttgccttcatttctggtgctgcccctagttcctggcagcagcctgcagggaggcccacaggtggggtccamggtagggctgggcacaagccacctgagcgcaaccttggatctgacagcccagaggaggactggagcaagggagtgtggtaaggacagggccagggattgagacctgcccttgcgtgtaccttaaccctcctcaccttggagaagcactgagcaagaaccctggctacatcaaacttcgcaagattcgagcagcccagaatatctccaagacggtgagtgtgtcagcccagcgtctctgatggggctgccttgagaaagtgctttcagttaaggcacattgaggtgagggaattcgaaccttgcttgttcsggtttctactcagattggcttctctggccggcgcggtggctcacgcatgtaatccccgcactttgggaggccaaggtgggtggatcacctgaggtcaggagttcgagaccagcctggccaacatggtgaaaccccatctctactaaaaatacaaaagataatgagcccgctgtggtggcgtttagctatattcccagctacgcaggaggctgaggcaggagaatcacttgaacccaggaggcggaagttgcagtgagctgagatcatgccactgcactccagcctgagcaacagagcaagactccgtctcaaaaataaataaataaaaaattggcttctccgatactcctcctrtcaagaatgattcctctgggttccctgaccttttgttctaatcatagctgctgctcagcgctctggatccctaagtgcgagcagaaaccatgtgttactcattgctgcacccctgccctaatctgcatgtgttccatgttaagtagctgctgaattgcaggggtcggaattgaggtctttgcttaatgcaagcatctgtcttatttcctgccctgtagatcgccacatcacagaatcgtatctatctcacrgctgacaaccttgtgctgaacctacaggatgaaagtttcaccaggtgagagatgtggccacactgtggggtatcaccaagaacrtgggacctgagtctggttgtttgggctctggagcctgctacagctattcatatggctcagagacattgaaccaaaattagaaaagggggtggttgacagtttctatcttgcatctcataggattgattttatgagatcaaataggattattcacataaaaagcactttaattataaagttttcatctaaccaaaaagtgatgaaagatgatactcagttttcttactcaagagccctcaaactcctctggtgaatggagggatgttaggaaaggagatgagaaatagcagtggccatgagaacatgcctcctcctttcatgagcctgagattcctggctgtcaaccctgtttatcttttctcttgggagcaaaggagggttcaaagctgagtggggcctgaagctgtcaattaacatgtgcatttctcttctctgtttcttgttcatctggcgatctggcaccacaggggaaggtaagctgttgttgcttctgtggggtcctgcaggccaccttctccagtacccgcctcctaccctaccccctttcccacctccccgaagacaaaccctcaatcagggtaggagggtcgtagagggaatggcctagagtgtcctgcctctcacatttatgtcccctaataatgtcattatctatcttttttttcctacagtgacagcctcatcaagggtaagaaatgagcctagtcaccaagaactccacccccagaggaagtggatctgcttctccagtttttgaggagccagccaggggtccagcacagccctaccccgccccagtatcatgcgatggtcccccacaccggttccctgaacccctcttggattaaggaaractgaagactagccccttttytggggaattactttcctcctccctgtgttaactggggctgttggggacagtgcgtgatttytcagtgatttcctacagtgttgttccctccctcaaggctgggaggagataaacaccaacccaggaattctcaataaatttttattacttaacctgaagtcaaggcttcacgtgttcatgaactgggtaactggcagcaagcatgcgcacgttcacatgtgcgctcctgggtctgtctttgtgtgtgccagcagggggcgcaaaagaatctggctggggcggctaaggggaagcaaggcctgggctccgaaacaggacccaagctgggaaggctggccctgagttctcsaggcccagctgtgctcttcacacaccctccatttctcccacatcacccatttttttaaggctggacagccatggctttgctgagccagattaaaaatctgatgaccccaacaggagctgcttccttggcagcagggttccttgtggctgtggggagcctgcctgtgcctgttgaggcacttctgtgcccagaagcycagtggatcgcgtggcctgctgtaggccccccagactccatttctcagtcaccaggcgtgaggagctgctagctaacaggcctcccctggggaggtgggcttttcatgcccgcagttccggggccaacagaacaggtgcctgtctgttcagtccacagataagctgacacttatcttcccaagacaggccttcccgaatctcaggcaccagagaaacagagccaccgtttatacctgaatctcccactactgcccatttcccatccctgcggggagacaaggaagatgtggaactcagacaaaacataggtgcaaagtatgtccaggaactgccaaatgcagatagggcagcaggtggatctgaacagagggactgggttaatctgcttcgatttttaagatatttttctctgcttggggttgagtatcatgaaagacaaagcagacgtcgcagccccaatcctgagttgctgggaggctaagatgagataaacaactagacaaaagacaggtcaagtgacttggatcagtcttcctcatgttccccttcacactttatttatttcatgctcccaaggcgggaagacaatggaggtgcctagggaaccagtgtttccacatcttgctgcagctgtaaaggcagccattttgtctccttcccattgttcccctttgcctagtgattcgtcccccatccagaggggtgaaggtcagaggttgttggtcagtagtcctccatggtcttcagggctccctgaaggttactgccgagagaacccacccgggagccatctttaccagacagtgttaggagcttcacaattagaccatccaacactgtactggaagatggacccagggccggccgacagagaactacggtgcgcgctcaccagttgctacaggggaccctggccacaggccaggtgaggtctcttgagagggggcgagccaaccccaagctcaaggtcgactgtgggttctggatccaccaggtgacaaatcgcactgggtgggaggaggggctggggcccattgtgtcccttagtggcagccagccaacaagaaccaccccttgtgcaacgctctcagctcaagacgaggggcttccggggtgcgtgggaagtggggagggggctgcagccagctaagggctggggacctgaggcgatggatgttgctgacacagggacaggggcctccatcattacccggcagtattagagactcccaaccgcacccaaacactgctgggtaagacgagggcccccgcccagcccgcccaccttgggtcaggcagcttcaggcccaggatccctgcggaaaagctgcagatccctggctcccatccccccaccacccgagtccctggggacacttcctggtgagccctgctgcccgccaccagccacaccctgggtcgctgatcacgaggcccaggttgcagtccaagcaggccctccgaagcccctcgaccgtcggcccgccgcctctgagccaccttcccctacccccggcagcctttcccgacccgcgacacacaccgatttacccaccctcatcccccctctgcagtcccaagctcagcccaggacctctcccctggtggcctttacctgtcaccgggcccacctgcccccagagagtgggtgctggggagacgaaggggctttaaggccccagattccacggcctagagcccgccctggcctccgctcttcctccttccttctccgcctgccgggcagccagcgcaggctccttacctgggccccgcctgccaccctgcgcacaggtgtgtcctcctgccataggctgcccccccactgccttaaccccttccctcccagcgccagccacgggcacctcctctaaggcttggccactcctctaggcctcccaccctctcccaggggcctcttttctccaacctgcctagtctcacccctgtctccagaggtacaaaaagcgggggctgtccttgggtcccctccccacagcagatgctgcccccaggactagcccattcctctgtggcctcagaccctgcccacagcggagctggcaggccagagagatccctgaggtcagcgaggggtcagctgggcaggagttgggctgtgccgccccgcagtgcccagcctgtgctgggatcccctgagggaaaggggagggagaaggccccgccaggcctgtgaagggcaggcgggtcccagcaaggtgtcgctagtgtgaagttacccaccgctacccagagaccccagctggcccggagcatcagccttgcccctcgattgaggcctgcagagggaacgatcgcgctccactctccggaccgagctgctcccggacccacctcacagcacagccctcagtggagtccaagtcccaccccaagggcaggtagcccaagggcggttaraggaggtgggacttgcctttgtgcagctgcggcttgtatagaaagggcgttgctgggagaggggacctgggcccgacaggtgattgccccacccgtgccctggagggccacagccccagggagctattgggttgctcaatccctcgctgttctctctcccaggctttgtttgcttccttcttaatacccgcctgcaattatttgatgcttgtgatcggtttgtgaatctgtctccctgaccagcctcctaagttccaggaggtcgggggactgtgaatgcctgtgacgccgggggctctgtaaggatttgctgagtaatgcacgcccagcctctgggctttgggacctgtgctgtctcagcctttccaggagtgggcgccagcacttcctgagggatgactcccaccggctttactccccaggacaccagtgtttcaaataaagaagaaaccccactcctgacatgggggaaggaagaggggacaaaaaacaaagcactcttcacgtcagccagctcttcaaactctgcccaagaggataagggcagcagcggcctggatgaggggaggagctgggcgtgcccgggtgctctgaggagcctgtccctgttcccgccagaggggacgcagccgggctggcctcaggtctgcgcttccggctgttaactactcttcttagttcagatctggaactcagcatcaggggagtgtgatcagggcccccctgagggtggccccagctgcaactccagggtaaggagtgtgggctctggggtcagacagcctgggttcgaatcccagcctcactgttccatagccctgtgaccttgggcaagtgaccaagttacttagtttttctgtccctcagtttccgccacggtaaaatgagaatgacagaagtgcctagactgaactaacgtgtgtagtcttttagtgcctgggcacatggcaagcgtgtgatgagtcactgtgcccgtcttatcgtcagccgtcatctcggtgcttttcacaaccaccctgttatgatcgccctccattttaaagaaggakactggggagcttcacccacggtcaccctcccacgtgcgaggcggagtcccgacccacgtccgtctgacggaaggcggagctttcacgcgaggcacgcacggaggcacacacagttacccatcctgccctgccctctggccgcccactcactgggcaagcaaagggctcagaggcgacacacagtgatcccagggctttatttacaagaggagaagggttggccctgcctggggcctggctgggmtatatacagggtcagggagaggtgggggggatgcagccatttaaattacaaaagaatggggcactcctaggttcaggttgtgagtctgtccatcgcgaaatgcttccacagggtcagggctgaggctgccaagagaagggagtgagggagtgagagggtagctggaacctggaggtggaacaagagggtctggggcagctgggaagcacagaatgaggctgcggccaccccatccacccagggaaggcagtggagccaaggacacagggcagggcagggaggacacccaggcagaagagctgtaccatggccacctgaggacagcacygctcacttcctcttgagggaacccttgctcttctccttgtctgctgaccgctgcttcttcactttctcctccctcttgttcttagtgtgcaggttctcatacacatcctccttgtgtctgcagccgggtgcaggggggcaagtacaggcagttggtgcaggtcaggagacagcacagggggacccggcactggcagtcccctctggccaccccgtctcacaggtgacgcagccacggtccctgcactagactccaagctcctagaggacagaggctacatctcatacacgagtgcgctgctggtacctagcagaggcccacacgtgtgggcactcaggaaatgcttatgaacagaaggggtgagaaccaagcctgaacttgaagccaggtccccccagctgcaacacttgtcctctccagaaagtgaggatygggctgggcaggacaaaggggtggatgccgggcrgtggcagtcagggccactcacttggacgaggtgcgggaggccttggcatgggcattcttcatggctgggggataggtgatgttcccgtactccgactcctggcccttctgcgactgtgggcagagggacagtgggaaggtggtggtcccagcagggccaggtggcacccatcctgcactgcagcccccccccccsccaggccctgctctgcacgcacctgcaggacctccagcttcttcttagtggtttcaatgaactgggcgatggccacgtagatgaacttgtactgcgcctccgtctgcaccatgcccgagcgctgcgcccgcaccatctggatggtcttctggatgtcaatgtcacagtccaggcctgggtggggggcagtcaaacctcaggtccaggcataggcggacaccgaggggctgctcaccccccacccccaaacccccaggtgcccctcacccttggtggagatgttctccatgagcatgtcgatgacaatgatggtgcctgtgcggccgatgccggcgctggggaaagacgggggtgccatcagaggccagtcaagccctccccgggaaggggggtacccagcgctcagctccagccccaggcaccacaggagcagcctgagcctccagtgatgggagggaatgtgcccagggtcaccgggcaagtgatgatggaggtttgcccagctctgcatggacacgctccacctcgggctctgcggtgctgacgctggctccccagctgccaccatccttccctcctccactcctcgcgccgactcctcactcctagtgagtggctgcccccaccccggaagacctgggacccccaaatcccaccactgtcctgccggctcccaggtaccctgagccctccccgcctctccctgaaggagttatggagcgtctctcagcatggcttcacttcccttttccttcaaaccctgacgtcagggaaaggatagccctgagacagcagggtgcgggggcacagggtcagrggactcaggggagcagtgcagtaggaagtttctctcctttcccagccctgggcaaacagacctcagggagaccccaggcccaccctcagctgagcccagcaagctgatgccctgagtcgcgctgtctaatttcaaacccagattgtcaaaaataaccccccacacccacttccttcctgtaacgtctaaataaaggccatggggctttcaagaagtgtgtgaatgtgtgtgtggcgggtgagcaggagggtagctctcggggatgggcctgtccctgagagagcacaggacagagccgcgtccccggacagcccatcgggggcacctctagattcagccgacttgccctgtcccaggacaaacagctgctgggggaagaggaggaagccagaggccgtcgcaggcctggggtccacggagggagtgggaagggaccggggcaaggcaggttcccattcccctattctctgcctgatgtgagttactaaactagtaacagcgcccagtttttgagggctgacggaattccagccacaacgatagggtctcattgagttctcacgacaaccctgagatcctgattttacagatgaggaagctgagggttagaaaagttaagtaatttgtccaagaccacacagctggtaagcggaggggccctgcacccactgcctctcatccacccaggccaggccagctcagtgggctcacctgtggaacccctgctcctccttgcagcccccacctctgcaccttaccagaggtctcctgatcacaaacatgcgggtagatagacagaggagttatgtgcagccccaaagaagcatcacccatccccacacagccctgggggccaggatggggcactgcctggggaagctgggagagagggcagagtcaggaagaagccgaagccctgcggctaccgatggaaaaagaggaggaatggggagcacatgcctcatagatgttcctgggagaagaaaccaacagaatgggacctcgagagaaagcggagcagccgggacacaggcctactgtgggtgcctgccyggccttgccctgactagcttgggcctggccagcaactgggtcccgggctcctcctctgtatttggcagggttgggcgagatggtacatccggagagggctctgaggaagatacccacaggcagagggccaaagtggggctggttccagccacgatccacccagggttctggagccatgaggggacccaggagaagccgggggtgagcggagggcactcaatgtgcgagctaacgtttatattgcttataacagctcatggcacttagcagtatttacttctcagctgtcactactaccatcaggattatcatcctcacctgcagtgcaygatgatgggccctgcgtgaggcagactttcctgccgctggttgatctggtccaggaagctgaggacacccccaggctcactggggaccccatggtcgggccagctcaggtactggtaatgccagatctcccgaatcaggtctccctaagccgaggacatagggtcagtgccccctcctctctcggaacacctcatccatctcaccctacccgaccagagaggagaacaagtccagggagggactcccggaatggggcagggcgtgggggccactcacattgtccagbggggagacctgtaaggtacggagtttgtattcggttgtgtcatgctccccgcagttggtcacagagtagggcccataagcacgctgcatgcccacctcgggccagtatgggacgcatttgttctggaaagggagggtygggtggggatgaggcacagagcagggcactgtggcccatcccagrtcctgctctatgttctgagtgcctggcaccggcccaaacatttgttggatggacggatgggctggcagagaggcaggagacctgggctctcgtctcagatcaaccaccaacaggtggtgaggcctggccagccacttcaccggtacatccgtttgtcattcaacaaacgttgccagggcaggcattgtccccgaagctgtgcaaaccacacagcttcacagacacaaataacacccagtctgtgcccctgtgcctcgaggagctcacagagacaggtgaccgggggagacaccgcgctgaggagcgtggctgggaaagacgtaattctccctctaggtcctggaggaaacaagacctggattcacagaggaggcagcgctccggctgtgtcttcaaaaacgaggcatctgccaggcagagatagtgtggagagagtcatttcctagcagaaaatgagcttgtgcaaagaaaggctgggaacctgaaagagctggggctgctgggggcggtgagccttcaagagaagcgtgcgggtcagagggaagccaccagaccttgaatgccaggccttagagtgcgactttatcccaaaggtgaccaggagccatggaagagatttcagaaaggaaggaacttgacccagtttgtgtcacggatgggatcacttcaatggcagcacagagggtgctgtgtagggggagcctgcagggtaaggggcagactccagagagatctatggggcagggaggacaggaggggcctggatgcagacaggtggggcaggggtaggaggaaggaggacagcctggaacctgggtctggagctcagaagagcccagggatgcatgcagggatctgggggtcacgttgtgtagtcgagactttgtcactagccctcagtttcccaacaagggccggaccctcacccctgagatccctttctgccctggcatctgactgctcttcgacttaatggcatgaccacaagcacgggggcggatgcggggaagggggggcgccctacccggcctttctccacctctcgggtggtcatgacgatgacacggctgttctcctgccacgccatctgccagaagtcattgaccgtggcctccagacarccctggctggcgatgtaggtcttagcgttctcatcagggcctagcagctggttctggaygcaagcgtggagagacgcaccccaagacagtgagccccttggcccagcacaggccctgaaccactgccaccctcacccatgcaagaagccagcttcggctttgcccagctgtctctggatctagggtccccccaccagacagggaattcccagggcccagcctctcctcycacgtggcccacactgctgaccttgatgtagttggcattgatgtagtcggacccggggatgttactgtcccgtccctgcaggatcactcggctgtggtcaactgggagtgggcggagaggaggcragatggtctgggttagccagggactcaccacacctgggtcagaccctcctgagctaacaggccattctggtctcagaagccatgaggcttgcggggkactgtgggcagcaggggtgggggatcatctgtatggagggagtgagggagttcacaaggaggttgggagcagggggcaacctgcctgctggtggtggggaggcacytctgggaggagtagaggccttttggagaagggggaggctctgtggggggtgtggggagatggcccctcctggcgtggagggtggagacctgtgagatgaggggaggcagctggggcaggggcggtatcctgggtgaatggggcagcctgggtgctcacaggggagaatgttcttgtagcggttcttgcccttgttctctggccgctgcccttccagacgctggtgcaagttcttcacctcctgcttctgcaaactctgagatgtgggtggggaaatgagcatcagctcccaaagagggcatccatcgggggagctcacgtggggtgggtcaggagcagaggtgggcaaggaggggaaggtgtccgcctggggccccaggccgctgccaccacctcagctgccccagccctgccggtccccaccatgcacctcaaactcctcccagaagccagccttggctgtatcctcggactcctgcttcttgttcagttccaacactcggttctcaatgtcagccgcattcaccctcgtggcatagtacggctggggtggggaagagcgagaagtcagcaactcagagatcccagaagctcacatctgggggacagctcaggggaagtggggaggcagctgggcccacccctgacctgccgcaggtagacaaaggcgcctgaggcctcctcaatccccgtcttcttgaaatgctcyaccaggtccgtgaggctgtcgaaggtctccaaaccacccactgtgtagcgtccaccctggggggagccaaatkaggccattcacaggacttgagtctccctccctgggtccccagccttgaattcaagcccaggcagaccctccctgccacccacactgtggtcacagacaggagcctcagcagaggctcccccgccgcctggctgccttacctcgcacatgaccttgatgtgggtgaccctgagcggggagcctgggccagccttgggctggtcactgagcacagaaagcwcgaagtctccaggctggctgaggctctcacgcacaagaaacgtccagggctcgcccttggcctgcagcagcgtctctgcctgcccgccagacatgtggccatggtaccacctagagaaggcagcgtcagggaaggtaagacccaggccacaggggaaggcgctgagcagagacattcacagagaggggccggaaatcaagcacctactgtgtgccaggcactgcgctacatgcttccaaatccaccacctcatttaggtctctcacaaacatgctgagagctaggtatgatattacccccattttatagatgaggaaactgaygctgagctgttactcactggcctagggcccttgactgactctagggcaagcttccagagctctgttgcccagrctggagtgcagtggcgcggttacagctctctgcagcctcgacctcccaggttcaagccatcctagcctccagagttctaaccgggcttcgaacccagagcccacctctgaaaggcagaaaggctggcaatattcaaaatatttggaggagagaagctaaggatgaatctccgtgaaggatgggactgtgccccagcagagaccagaggcaaagagaaacgcagaccgaggccacaccacagggagtggtgggagatggacacacagactcaagtcacaaggaaggcggatggggtgcgctccgccagggaggcggggaagacaaccccactggggaaagagtggtgtagggggttctggggtgccctggatgatgtcactgaaggggagcccagggttcaaacggatttgaaggggctgtcagggcagaaagcagaactaagccctttccccgaagcacacccctttcccaggaggaaactgtagccccacaaagcccagccccacaggaaaccacgtgatggaaaaaacacaaaactccttctggggagagagtgagaagtgaggttgtgaggtttcctcagcccagggacgaggggagggcgggcaaattttccaaccgcagggatggggggaaggaggggaggaccagtctgtcccaacccatctcacccctgcccggaggtgactccagccgagagacccccagagcctcctaaccccactgggctacttcagcccaccgcctggggacaggctaggaccccaggtagcggggagggggctgagccccttccctcaggccccaggatgaggaagtctccatgcaaatgtcaggctgaccacaggaagcgcagagccaccgagggacagatgcaaattctcgcagaggaggaggcgcacagacaaggcagaggacacagcagaacctgggagaaagagcctctcacacactcccaggctcaggggtgacactggctcctgggacgggtcacccaaaagggcctccagtgcggcttccctggtcttaacctcccgccccggcactgccctcccttccttctctctcttctctcttctccttgaacccaggcctcagcctcctctgcaggggcctcctggggccctgctcctctcttccacctccaggcactggtcagcccgtcctcctctcctggctggaggcaaggagaaagagaggacatgagctttagagggtctcggtgccaaaagccccctgagtgttgcggtggggaagaggaagggcagggggcagacacggagccagccaygtgaggctcacagagagagggaaggccttgaaggaggccgatccaggaaaggaggcctcccaggtgggccacagggctgcaccgtgaccgaatccagctctaagtttcaatcagtgccttgaccaaaaatattgatgcagtttggaggcccgaatctcagagaggctgcaagctggcaggagcaaggttcccgatcatttcaataaccgatccatgaatgcagggatccacggcaagggcaagtcggcttggcccaggggtgcatgtgaaaaccccctagcgttattccgctgccctttactctaaggggatctggcattgagatgcggctgctgaaaggagccatggtgtcatgaggagcattcagagcccccagcccccagcccatgcctttgggagaccacaggaggagtcggggaggccacaggaaggaaatgcctggagtattactctgtgcccgggacagcgtgagacactttacacaggtgaacacttcacatcgtgctctcaatgatctctgtttgggccggagacctatttgaccccacaggacagacccatccccacggggcggctgggacaaggcatcaagtgtcttggcaagcattcatccccatcttcaccccagtgtcagctcctcactgtcctaacatgtgctggggtgaggggcagacggaggaaggcaggctcgattccagaggaagaagagctttctaacaacagagctggcctgcacgacatgctggccaccagcagtggcctccctgtctccagtgggacctgggttgcagcggccagggctcccggagtagggcgaggcagctttctgtggcttcctcggggttaggtggaaagggtggtaggttaggctctgagacaccaggtcccaggacagcagggaggagggacattgagagccccagcyggtgcagggaggggaggggatggagggtaggcagcgccggctgccagtctccctgcctccctggctgttcagggtgggagccggctcatccctgcttgggaatggcgggggtgcggagccctcacctctcactagtgggatcggagcagttcagcgggtacttgaggtggatgatggtgccgtcgcggtcctgcassacaccctgctgctgagtgtagtactccaccagctctgtcagagtcgcaaacttctcccctccatacaggtcatagaaatcccctgagttctggatccgaatatgggtcacctgatcccccaccctgcagggcaccaggcggtgaggccagtcggtgcaggagtagaggcaggagggcagggatcggctgaggtcctgggtgggggcacacatgggcatgggtgggcacagacagggatggggagtgtgggggttgggggcaagggaacagacggggagtcagcactgccacggggaaccaggaatgagtggttcagggcctggatggcacaagagagtggccaaaatgcccggggttgcggggggcccacctacctgacggagagcgagaagtcaccctggttcttgcgactgggccgagccaggaagctaccgtggacacctcggcccttgagcagggtctctgcatccagcccactgaggtctcggtgaaaccacctgggcggcccaggcagggcagtgaggaggggtcccgtgggcaccaggcacccttgcctcctgtctaccgtgggtggcaggcccttacctcaccatcctgggggcttccggagaggaagggggcgcagggaatgaggaggtgcagctagtctgggcaggcagagagctcagggactaagcctcagatgcagctcccagtgccgggccgcctcaccacccccggtggtcccagttctggggctgccactccactggcctggggcagccggcagggcggggacaggaagaggcgcggccgaccccttgggggaactcacttgtacttctcgttttagagcacagcaagggaagagaagcagagcagggtggcactgggggtggggacggggcccacttcccacaygtctgcaatcaaaggctcaggagcatggcattgcacatatgtgacaacacatgcagtaaggacacatgtgtgccttgcacactccaggcccagataatacttcacgcatgcgaacccagacggtcccacggcatctctccctcctccaccagctgcttttacgcagccctccctggcccacgctaataacaatgatggcggtgacaactgtcatcgagtgagtcctgctggatgccgggcgctgtgctataatggcgttcacatgccttgtctgattggtttctcaccacagccctatgaaacaggggctatctttatcattttacagacaaggaacctgaggctcagggagtttaaggcattgcctgagtccatcagtgagtcagctgcagtgccaggattcaaacccagacagtccggttccaaagccagtgctttgaactcctatacaccagccctcagggcttcaaagaacagagattaagagcctccttgtccaaaggggctgccatgggagcaggagactaatagttaagaccttgccaatgcttgcaagagagaagggtgccctcctctaaccaacatatgcagtttgtccatgccactgtggcagagggatggacaacatgaccctgagcagccctgtcaacatgggtcctttctaattcttgtccctaggcctctgccctgccccagcactcccaccagggggcctatctcctgggggctgggggacaaggtcctcaccatggctgattttctcagggctggttgatcttagaggccctaaacactaaggtatatgatgctgcctacctgtaattccaaatacaaacatcaacaccgccaaaccaaaacgaggaaaagcagctcaacaggggatacataagaaacacatattggtggcttcccctagggagggaaactgggtggctggaggacagggctgggggagacacttggttctctacatacctttttgaatgttatatgatgggcatgcattacctttataaaaataaatatgctaactgggaacaatttctgggaaacttttagggtacagggaaggctctttgtctctatctggatgctgtttgcatgggtgtgtataaacgtgaagttggccgggcgcagtggctcacgcctgtaatcccagcactttgggaggccaaggctggcggatcacgaggtcaggagatcgagaccatcctggccaacatggtgaaaccccctctctactaaaaatacaaaaaaattagctgggcatggtggtgggcgcctgtaatcccagctactcgggaggttgaagcaggagaatcacttgaacccaggaagcggaggttgcagcgagccaagatcacaccactgcactccagcctggcaacacagtaagactctatttcaaaaaaaaaaaaaaaaatggagccaggttgtgtgcttaatatttatgaacattatgcatgttctgcttcaggtaaaagaagaaaaagttttaagcccaacaagtctaattttcccatgataactacattatcatttttagaaacatcaaacatcaatgttttcccccaaaaaaggcttttccacttttctttctttctttttgttctatttgtttctggttttcttctctcactggtgccctggggaatctgcctggtgggtttattgcatggtccagctttgactaccccttcagcttggacaccaccccagagccccggaaatccgcggaacccccacgcccaacgccaaggagcaagaagagcacatgcaaagctggctgcagcgcgggacacccgctggcgctctcgctcatctcggagtgttcagagtccagtgcgatgcctggcactgagcaagtgttcaacaaacaagctcgtcagtccatagccacatacctggccacaagtacagcttcctggtcctacacacacagcctgcttgtcatacgcaggcaagggtgcacacacagtcacagcacacacacctcatcatccatgtccacctacacacatacctggtccggtgcacatccccacgcatggaacataaatctgaccacacacgaagtttcaggtccatgctcagcaccaaacgcccactgcaccctggccccaagacactccttccagggcttaaacccacttggtgggaaggaattaactcggcacccagaagaaactaactaggcacctcttcctgacccatggaagaggcaggaattcctctgaagggtgtcaagccaagagacagaactcagacaagaggtacagcttctgctatcctttggcaggaaaataaaaaactacctcccttaccttggcatggtgtggggtttgcagatcactttcacatacacgatctcatttaggcctcagacagccctgtgatgtaggaataattttccccattttcttatgggaggaaacaagcgtagggagactaagaattacaagagtaaatgcctgataattcagaagaaaaaaatatttccttggaagcaggaagataaaagtagagatcaaggccaggcgcagtggctcacgcctgtaatcccagcactttgtgggggtgaggctggtggattacttgacaccaagtttgagagcagcctaggaaacctggagaaaccctgtctctacaaaaaatacaaaatttagccaggtgtggtggcacacccctgtagccccaggtacttgggagactgagatgggaggatcgcttgagcctggggtggtcgaggctgcagtgagccatggttgtgccactgtaatccggcctgggtgacagagtgagaccctgtctcaaaaaataaaaatacagctgggcgcagtgacttacacctgtaatcccagcactttgggaggccgaggtgggaggatcacttgaggtcaggagttcgagaccagctgggcaacacagtggaaccccatctctactagcctgtaatcccagcttctcaggaggtggaggttgcagtgagccgagatcatgccaccgcactccagcctgggcaacagagtgaaactccgtctcaaaaaaaaaaaaattaaaaaccatacagatcaagatcaatggtgatacaagaagataggcagtctggaagcgcaaacaaggcaaaataatctgtagaaagttctggaactgctctgagcctcagaatccccgcctgacaaatgagcttaacaatatttcccaaatactgatgtgaaaagctggtaagtggcagggtttcagtgctgccagcttttacattatactnnnnnnnnnnnnnnnnnnnngaaacacatattggtggcttcccctagggagggaaactgggtggctggaggacagggctgggggagacacttggttctctacatacctttttgaatgttatatgatgggcatgcattacctttataaaaataaatatgctaactgggaacaatttctgggaaacttttagggtacagggaaggctctttgtctctatctggatgctgtttgcatgggtgtgtataaacgtgaagttggccgggcgcagtggctcacgcctgtaatcccagcactttgggaggccaaggctggcggatcacgaggtcaggagatcgagaccagcctggccaacatagtgaaaccccaactctactaaaaatacaaagattagccgggtgtggtggcacatgcctgtaatcccagcttctcaggaggtggaggttgcagtgagccgagatcatgccaccgcactccagcctgggcaacagagtgaaactccgtctcaaaaaaaaaaaaattaaaaaccatacagatcaagatcaatggtgatacaagaagataggcagtctggaagcgcaaacaaggcaaaataatctgtagaaagttctggaactgctctgagcctcagaatccccgcctgacaaatgagcttaacaatatttcccaaatactgatgtgaaaagctggtaagtggcagggtttcagtgctgccagcttttacattatactattaatcctcaggccaaccctacttagtaggtgttattcacccaattttagaaacagaaactaagactcagagatgttaagtaattgcccaaggtcacaagctagtgagtaggaaggtgggtaaaacacggctgtcagacgccggagcctggtgccctttcccccaacaaccatactgcagcagacagcgtcgggggcagatgggatgggcactgccacagcccatgatggaaggtggaggaagaagtgctcccccagaggcaacatgggtcagggcaaagaggtggcacgcacagagtccacatgggcagtgcctggccgtgagcaagccatgtggctggagcaaagttgttctgagaggtggggaccctgctgtagagggtcattcaaggccaggctgagaaaccaaggatgaaatctgcaccaggggaggcctggccaagctacctggcaggaaaatgaccacagacgggatcagggaccagaagactcagtaggaaccccatcggtggggccgacagtgacaagatgtgcactggggcaggggcagacatgagtgtgagaagcaagaatcagcagggctagggagccacccacccacaaactcgccagtactctgtaagcaggttgtcactttttcttttcttttttttttttttttgagatggagtctctcccgctgcactcaggctggagtgcagtgacgcaatctcggctcactgcaacctccgcctcctgggttcaagcaattctcctgcctcagcctccctagtagctgggactcacaggtgcgcaccactgtgccagcctaattttttttttgtatctttagttgagacagggtttcaccatgttggccaggctggtcttgaactcctgacctcgtgatccacctgcctcggcctcccaaagtgctgggattacaggcttgagccaccatgcccagccggttgtcactttttcttttttctttcgaccggttgtcactttttctttttctttcctttcttctttcgactgggtgtcactttttctttttctttcctttcttttctttctttccttccttccttttctttcttctttctcgctctttcctttttttccttctttctctttttctttcttccttcccttccttctttccttccctctcttttttttttttttttgacacagaatcttgctttatcacccaggctgaagtgcagtgtcacaatccaactcactgcagcgtcgacctccttggctcaggtgatcctcctgcctcagccttccaagtaactgagaccacaggtgcatgccactacatccagctatttattagtagtaatagtagtcgtagtcgtagtagagatgaggtctctccctatgttgcccagggtggtcttgaactcttgggctcaagtgatcctcccacctcagcctcccaaactgctaggactaccacatgcttgggccatcatacccagtatttttttttaatagagatggggtctctctatgttgcccaggctggttttaaactcctgagctcaagcaatcttcccccttcggcctcccaaagtgctgggatcacagacgtgcgccacctcatctcgtcaggttttcactttcaacatcctagctccaacatggtctaacctgctgtggccctgcctccgctccactagggtcctctgccacgggcacactgtcctttttttgtttgttcccacattagggctttgtgctcaccatctcctctgcccagagatgcttgactcttgatcactacgtcacatggccagctcctcttcctcctcatccgggtctcagctcaaatgtcacctcctcgggaaggcctccctgatccctccagctagtaatgtcacctgcacacccagtcacttgctagcatatgaagctggttcattttctttttttttttttttttttgagacaaggtctcactctgtcgcccaggctggtgtgcagtggtgcaatcatcgctgactgcagccttgacctcccaggctcaagcaagcctctcaccttagcctctccatagctggaaccacaggacgtgtgccaccacacccagctaatttcttattttttgtagagacagggtctcactatattggccaggctggtctcaaactcctgggctcaagcaatcctctcgcctcagcctcccacagtgctgggatcacaggtgtgaaccactacacccggccaaggctgtctattttctgcgtaatacttctgagaatctgcaatgatccaatttattgggttatttgttcggtctgtaacctcccactggaatgtaagctccgtgagagcagagaccatgtctgtcttgttcactccagtattaccagcatcttaaacagcacctggtgcataatagatgctcaacacgtacctgttgaatgaatgatgcaggggaaagggaagtgaaaggaaacaaagaagatgggaccaaagtctgatgttgggaagtgcggagaagttggctggacgtgggagggccttcgcgggtggcctctgactgctatgtttgaggtgttgtgagctacccagggggacaggtcctaagcaggaggcagaagcaggagcccagaggctggaagtagaaatgcaatggagagaacagatacacacttgtccaggggaaaatgttaaagagggggcagaggagcatgagtgagccgggggtcctcacaccttgcgggaaggggaagttcatagggaccggaaacaggcgcagggcagcggcagatcgcactcacgttcacacacgtcggagtgagcatcaacaaagccctccctccctccaaaactaacaggagactgggaccccgatggtgcccgggacttacccacgggacagcatctctctgtagggagggggaagccacggcggagggccgcagggggcggggctgagccagcggcacagctgtgcacagtggcccaagccaggtgaggaagaaccgctcagtaatcagccacttcctcctcgatcctgcctgccaggccaatggcactgcagggacaaaccctggactaatagtctccaggaaaaggacaggtggggcggggctggcccgagaccgcccacagcggccagcttccctgcagccccaaagcgggagtacagcaggcccgcctgctggtccagggccgccttcccccgggagaggaggagccacctggagctccacctggagctcaagctgacagagcggcggggtattgggtaggggaacagaccaggaagtaaccctggctgaggaagagcaaccaatgggggaaacctctccgtaggcggaaaccaaagggcctaaggaaaatccctaacagcccagttcctcagagaaggaggtaccccctgtgcaggcccacccacccagggcgctgagggacccactccagcctctcaacctgccccgggggaaggggaggagcctcaggtagggttaggccctggggcagggttaggcccagccaggaccatagggaggagctgttcagggggatggggcctggaaaggcagagggaatcagggaaggagagatgggggttgtcaggtccgcaagagactgacaccaaggctaagtcacaggcgcatttattattgtctggaacatcaaggcctttcctcccctggcagtggcacaagggagggccaactctcaggaggcggccacgctgccaccagcagcaggcccatggggtggcagggtcatgggcggcagaaacagcgccttcagcttgcctgacaggctggcgatctcaggatcctgggcttcgtaggacttgaccaagcgagcaaacttaaggacacctgcaagagggagtggaaggtcaacccttctcctaaggaccagcgtgcctaagacacctggagggggtggtagtttaagcatgaactgctcccccactggctgggcagctgtttgccaaacaggacgcatgcaggcctctgtcccgtgtggtttggatgatgacatttggtctacactgggcacaactagatgggatgcagtgaatgaaaatgtcccaaggcagtgtgcttcttgctctcaggtgaaccattttagcagtttagtcactggaaccccaagaatgaacacgagaccccaggtctgtagctggaactcaggaaggctatgaggcagcagagctgaatcagtcaacacctttggggaacaccaggatctcaccaaaaatttaaccaccaaccccccccaaacaaaaattagctgaaacaccctggagagactgcagccactgctgtcatgcagacatgtcactaaaaggtggcacaacagcatttaagtccagctctgctactcgagagtctgcaccattagagtttgcttcctcatcacaaaatggaataataatgtgattaacagtacaggttggccatccttaattagaaaatccaaaatctgaaattatgagtgccagtgtgaggccgaaaatggaaaattccacacctgacttcatagtggggggtgggggagactgtagtcaaaacgcagtcaaaactttgtctcatgcacaaaattattcagactattatataaaattaccctcaggctatgtgcataaggtgcgtgtatatgaaacaaaacaatttcgtgttcagatttaggtcccatcccccaagatatccatgtatatgtaaatattccgaaatctgaaaaaacccgaaacacttccggtcccaaccatttcgggtaagggatacagaacctctactgtacaaaacgcaactcggacgcacaagctcagggtagaccctgggctctgagtgccaagaatgttagtcagattgtggctgccgccgtgtggcgagaaaggggacaaccgctcatgggcccacagatccggcgccctctcccgacccaactcccgccttcccgcgtctgacccgccttcccgcgtctgacccaccttccccgtcgcagctgaagccataggctttgataacctcctgctggatctgcgtggccacgggcagcacgaattgc

SEQ ID NO: 97849 - DNA, 14699 bp, Homo sapiens
  misc_feature (1)...(14699): n = A,T,C or G
cccaccgtgggacctgggcccctgccacctgcggggccctcaggcctgccatcgctgccaccaccacctgcggcccctgcctcagggccgcccctgagcgccacgcagatcaaacaggagccggctgaggagtatgagacccccgagagcccggtgcccccagcccgcagcccctcgccccctcccaaggtggtagatgtacccagccatgccagtcagtctgccaggtgagcggccaggtggggcggaggtgggcctggaaaggggacgacgacaaggcggcgacgagagagggagtagcagggaggggccttgcgctggtgtagtgttttagaaaagcacgcccctctcctccgtccaggcctagtggccagtgaggcccgcagcagctcacagcctgcaggggtggttttgaggcgggggctacaagcactcgccggggccgcggcgctgcgggctccatcgggcagctcgcaccgcctgagcgcccgctgcttccacgcccggcaggttcaacaaacacctggatcgcggcttcaactcgtgcgcgcgcagcgacctgtacttcgtgccactggagggctccaagctggccaagaagcgggccgacctggtggagaaggtgcggcgcgaggccgagcagcgcgcgcgcgaagaaaaggagcgcgagcgcgagcgggaacgcgagaaagagcgcgagcgcgagaaggagcgcgagcttgaacgcagcgtggtgagtgcgtcactgcctgcgccaccgccttctttccctctttccttccttccctctgcgctgcgctgcgctacgctacgctgcggggctgtggctgggtgggcgggcgagtcacgtcgccacctgtcggaggggaggtaccactgcagcccaggaaatggagcccaaaaggttttcagcgagagccatctgcattcctgggttgggaaaaggcatgctcagatgggactacctgtggatcccaagaagggcaaatattcgggagcgggggccgcagttaagttccaggtgggcagagtttcaatgagttgaggcattttggcattcggctgtcgaaacaaatgggcagcttaaaaccagccacctcttttcataactgccgctttgactccacttttccctgtatcccacagaagttggctcaggagggccgtgctccggtggaatgcccatctctgggcccagtgccccatcgccctccatttgaaccgggcagtgcggtggctacagtgcccccctacctgggtcctgacactccagccttgcgcactctcagtgaatatgcccggcctcatgtcatgtctcctggcaatcgcaaccatccattctacgtgcccctgggggcagtggacccggggctcctgggttacaatgtcccggccctgtacagcagtgatccagctgcccgggagagggaacgggaagcccgtgaacgagacctccgtgaccgcctcaagcctggctttgaggtgaagcctagtgagctggaacccctacatggggtccctgggccgggcttggatccctttccccgacatgggggcctggctctgcagcctggcccacctggcctgcaccctttcccctttcatccgagcctggggcccctggagcgagaacgtctagcgctggcagctgggccagccctgcggcctgacatgtcctatgctgagcggctggcagctgagaggcagcacgcagaaagggtggcggccctgggcaatgacccactggcccggctgcagatgctcaatgtgactccccatcaccaccagcactcccacatccactcgcacctgcacctgcaccagcaagatgctatccatgcaggtgagacccctccttccttgccctggccctttggggccaccttccccctatcatgactgggctctttcattcctatggccaagactttcctcccctggcctggcatgaacctttcctgagattgctgccctgaactttgcctccctgacgttctctcagccttgtcttctcatggccttccctggccacaaagcctgtatgccccacagcccagttctctccatagtctagtatccttcccatgacagaggcccacacgggagcttttgaaggacacttttctattctcacagccccattctcccaagcccttcacaaacctgtcttcttatttatttttttgagacatggtctggctctgccacccaggctggagtgtagtggcgcaatcacagctcactgcagcctcgacttcccggtctcaagtgatcctcctacctcagcctctggagtagctgggattacaggcgtgtgtcaccatacctggctactttttgtatttttggtagagacggggtttcgccatgttggccatggctggtctcaaattcctgagctcaaagcgatccacccacctcggcctcccaaagtcctgagattacaggcgtgagccaccgtgcccaacccacaaacctatcttctgatttctctggattcaactcattttttgccattttctcctcttctccctctgcgaggtctttcatgtttttccccatctctagatctgtaactttctagaaagggccctgtagctttgggtttgggtgtcataggcgataatgagctttacttactatcctttcaccattttttggtttttgagacggagtctcgccctgtcaccaagctggagtgcagtggcgcgatctcggcttactgcaacctccgcctctggggttcaagtgattcttctgcctcagcaggcactgcctgcccgagtagctgggactgcaggcgtgtgccaccaagtacagctaatttttgtatttttagtagacacggggtttcaccatgttggccaggatagtcttgatctcttgaccttgtgatccacccgccttggcctcccaaagtgctggaattacaagcgtgagccaccgcacccggcttcctttttttcttttgcccagactggagtgcagtggcgcgatctcggctcactgcagcttccacctcccaggttcaagcgattctcctgcctcagcctcccgaggagctgggactataggcgtgtgccaccctgcctggctaatttttttgtattttttgtagaaacagggtttcaccatcttggccaggctggtcttgaactcctcacctcaggtgagctgcctgcctcagcctcccaaagtgctgagattataggcttgagccactgtgcccggcctcttcttgtcttattttctaaacttctatcatcttccaccttcttcacgcagtctacctctctctgtccttcccctcagacccttctgatgactgtaatctcctgtcctgtgtcatccatatgtccctcctccagtagggctcagcctgtccacccctgccaggcctctagttcttccactctgcctttgttccactttggacctccttgtgtttgtctgactcagttcccaggcttggatcccttcacccaaatgcatggtttgccccaaacctgccttctggtgacaccttcctcttctctgccctccagcctctgcctcggtgcaccctctcattgaccccctggcctcagggtctcaccttacccggatcccctacccagctggaactctccctaaccccctgcttcctcaccctctgcacgagaacgaagttcttcgtcaccagctctttggtaaggatggaagttggggtaggcagctccaatgagaaaagggcagaaaggaggtatttgggtggggggatgggcctagttgggcttggggagggatgaggaggtgcctagaggagctgggcatgggaataggagagctggagctctgcccaagagaagcacgagttttagtgtcagcctaagaggttcgaatcccaattccaccctaccactggcaacttacagaactgggtgtgttacctcactttttagttcattacctttgtatgtaaaggagctggctatcccctggtccagagcaggtacttgttatccgttggtcatatgccccttgcccttcctgctcacagctgccccttaccgggacctgccggcctccctttctgccccgatgtcagcagctcatcagctgcaggccatgcacgcacagtcagctgagctgcagcgcttggcgctggaacagcagcagtggctgcatgcccatcacccgctgcacagtgtgccgctgcctgcccaggaggactactacaggtaccctagggtgccccagcccaggggacatgggctcagcgagcctgggaggagctgtgggcatggtacggctgggcaccgtgctcctgggggagggaacccctcctctcccaaccccttcggtaagagggggcaaggtcagagttggtctcaagtctcttacctctctgctatgcactgccccttccctagtcacctgaagaaggaaagcgacaagccactgtagaacctgcgatcaagagagcaccatggctcctacattggaccttggagcacccccaccctccccccaccgtgcccttggcctgccacccagagccaagagggtgctgctcagttgcagggcctccgcagctggacagagagtgggggagggagggacagacagaaggccaaggcccgatgtggtgtgcagaggtggggaggtggcgaggatggggacagaaagcgcacagaatcttggaccaggtctctcttccttgtcccccctgcttttctcctcccccatgcccaacccctgtggccgccgcccctcccctgccccgttggtgtgattatttcatctgttagatgtggctgttttgcgtagcatcgtgtgccacccctgcccctccccgatccctgtgtgcgcgccccctctgcaatgtatgccccttgccccttccccacactaataatttatatatataaatatctatatgacgctcttaaaaaaacatcccaaccaaaaccaaccaaacaaaaacatcctcacaactccccaggaacatggctgtgactattctttgcgggatatgggggtgaggctgggtctcagtgcagcggtgcttagagagaactgcagccagggcctggcagggaagcgggaagagaccagaccttcttaaggaacggggtgtgggggctgggaagaattggagaggggatccctgaagagcccagagccttgactcagctggaggcggtaccatgggtgctggtgccccctcctgccccaaggctgggcaggaccgctgcgcgccagtggaggcctcggtctgggctctgtggcttatgcctgtgagacgcgggtggattgcttgagcccaggagttggaaaccagcttgggcaacatagagaaaccccatcttaagacaaaatcagctgggggttgtggtgcacttgtggtcccagctactcaggaggctgaggtgggaggatcacttgggggtcgaggctacagtgagtcatgatcgcaccactgcactctagcctgggtgacagagcaaggccctatctcaaaacaaacaaacaaaagacaccccaaccaaccaaacactagaggcctgggacaggcccacctctgacgtggtcagttctaggaatctattcagacgggtctcactgctaggagccaccagagtcctccggaacaagggcttcagagtcctgaaacctttccgtggaatactttaagaaacggttatgaggccaggcgcgacggctcacgctggtaatcccaggactttgggaggccgaggcgggcggatcacgaggtcaggagttccagaccagcttggccaacatggcaaaaccctgtctctactaaaaacaaaacattagctgggcatggtggcgcgcgcctgtcgtcccagcgacttgggaggttgaggcaggagaatcgcttgaacccgggaggtggaggttatggtgagccaagatcccccccagctgcactccagcttggcgacagagcaagactccgtctcaaaaacaaaaaacaaagccggttatgaagcgggggtggggtgggctagttttaataggtccaggcgattagtacctggcatccttaaccacctacagtttgagaagggagtgggtgataaaagcctggaagggaagggaaatcgggccgggcattaggctccatcgctcatcaatagacaaggcctttaggaaactgcgacaacggcttttgctctgggcctttactgccgaatccaggtctccgggcttaacaacaacgaaggggctgtgactggctgctttctcaaccaatcagcaccgaactcatttgcatgggctgagaacaaatgttcgcgaactctagaaatgaatgacttaagtaagttccttagaatattatttttcctactgaaagttaccacatgcgtcgttgtttatacagtaataggaacaagaaaaaagtcacctaagctcaccctcatcaattgtggagttcctttatatcccatcttctctccaaacacatacgcagcagtgttacagctcttttagaatttgtctagtaggctttctggytttttaccggaaagcccctcttatgatgtttgttgccaatgatagattgttttcactgtgcaraaattatgggtagttttggtggtcttgatgcagttgtaagcttggggtatgaaggtttgggccmcgcctgggcgcttccggctgcgccggatgctgtttcctttccgctcccaggggcgttgggaacggttgtaggacgtggctctttattcgtgagttttccatttacctccgctgaacctagagcttcagacgccctatggcgtccgcctcgacccaaccggcggccttgagcgctgagcaagcaaagggtgagaatcgtcctagtcaaggcatrggctgctggcctggggtagtcaaggcatgggctgctggtctggggaggatgcgggcggagratgtggggcgacaaacctggctacgtccgccgggaaaatggggtaggggacgccgggtaccgtccttctaagtggggcgcttgcccccaagacttgggatcttattgggttacctacagcctcaatccactaattccttgcgctctccgctgggcccgctgtctgttctccgacgcctacccgggacgcctccctgggatgcttctggcgcgcagtggtcctcgcggaggtgatccaggcgttctccgccccggagaatgcagtgcgcatggacgaggctcgggataacgcctgcaacgacatgggtaagatgctgcaattcgtgctgcccgtggccacgcagatccagcaggaggttatcaaagcctatggcttcagctgcgacggggaaggtgggtcagacgcgggaaggygggtcagacgcgggaaggcgggagttgggtcgggagagggcgccggatctgtgggcccatgagcggttgtcycctttctcgccacacggcggcagccacaatctgactaacattcttggcactcagagcccagggtctaccctgagcttgtgcgtccgagttgcgttttgtacagtagaggttctgtatcccttacccgaaatggttgggaccggaagtgtttcgggttttttcagatttcggaatatttacatatacatggatatcttgggggatgggacctaaatctgaacacgaaattgttttgtttcatatacacgcaccttatgcacatagcctgagggtaattttatataatagtctgaataattttgtgcatgagacaaagttttgactgcgttttgactacagtctcccccaccccccactatgaagtcaggtgtggaattttccattttcggcctcacactggcactcataatttcagattttggattttctaattaaggatggycaacctgtactgttaatcacattattattccattttgtgatgaggaagcaaactctaatggtgcagactctcgagtagcagagctggacttaaatgctgttgtgccaccttttagtgacatgtctgcatgacagcagtggctgcagtctctccagggtgtttcagctaatttttgtttggggggggttggtggttaaatttttggtgagatcctggtgttccccaaaggtgttgactgattcagctctgctgcctcatagccttcctgagttccagctacagacctggggtctcgtgttcattcttggggttccagtgactaaactgctaaaatggttcacctgagagcaagaagcacactgccttgggacattttcattcactgcatcccatctagttgtgcccagtgtagaccaaatgtcatcatccaaaccacacgggacagaggcctgcatgcgtcctgtttggcaaacagctgcccagccagtgggggagcagttcatgcttaractaccacyccctccaggtgtcttaggcacgctggtccttaggagaagggttgaccttccactccctcttgcaggtgtccttaagtttgctcgcttggtcaagtcctacgaagcccaggatcctgagatcgccagcctgtcaggcaagctgaaggcgctgtttctgccgcccatgaccctgccaccccatgggcctgctgctggtggcagcgtggccgcctcctgagagttggccctcccttgtgccactgccaggggaggaaaggccttgatgttccagacaataataaatgcgcctgtgacttagccttggtgtcagtctcttgcggacctgacaacccccatctctccttccctgattccctctgcctttccaggccccatccccctgaacagctcctccctatggtcctggctgggcctaaccctgccccagggcctaaccctacctgaggctcctccccttcccccggggcaggttgagaggctggagtgggtccctcagcgccctgggtgggtgggcctgcacagggggtacctccttctctgaggaactgggctgttagggattttccttaggccctttggtttccgcctacggagaggtttcccccattggttgctcttcctcagccagggttacttcctggtctgttcccctacccaataccccgccgctctgtcagcttgagctccaggtggagctccaggtggctcctcctctcccgggggaaggcggccctggaccagcaggcgggcctgctgtactcccgctttggggctgcagggaagctggccgctgtgggcggtctcgggccagccccgccccacctgtccttttcctggagactattagtccagggtttgtccctgcagtgccattggcctggcaggcaggatcgaggaggaagtggctgattactgagcggttcttcctcacctggcttgggccactgtgcacagctgtgccgctggctcagccccgccccctgcggccctccgccgtggcttccccctccctacagagagatgctgtcccgtgggtaagtcccgggcaccatcggggtcccagtctcctgttagttttggagggagggagggctttgttgatgctcactccgacgtgtgtgaacgtgagtgcgatctgccgctgccctgcgcctgtttccggtccctatgaacttccccttcccgcaaggtgtgaggacccccggctcactcatgctcctctgccccctctttaacattttcccctggacaagtgtgtatctgttctctccattgcatttctacttccagcctctgggctcctgcttctgcctcctgcttaggacctgtccccctgggtagctcacaacacctcaaacatagcagtcagaggccacccgcgaaggccctcccacgtccagccaacttctccgcacttcccaacatcagactttggtcccatcttctttgtttcctttcacttccctttcccctgcatcattcattcaacaggtacgtgttgagcatctattatgcaccaggtgctgtttaagatgctggtaatactggagtgaacaagacagacatggtctctgctctcacggagcttacattccagtgggaggttacagaccgaacaaataacccaataaattggatcattgcagattctcagaagtattacgcagaaaatagacagccttggccgggtgtagtggttcacacctgtgatcccagcactgtgggaggctgaggcgagaggattgcttgagcccaggagtttgagaccagcctggccaatatagtgagaccctgtctctacaaaaaataagaaattagctgggtgtggtggcacacgtcctgtggttccagctatggagaggctaaggtgagaggcttgcttgagcctgggaggtcaaggctgcagtcagcgatgattgcaccactgcacaccagcctgggcgacagagtgagaccttgtctcaaaaaaaaaaaaaaaaaaagaaaatgaaccagcttcatatgctagcaagtgactgggtgtgcaggtgacattactagctggagggatcagggaggccttcccgaggaggtgacatttgagctgagacccggatgaggaggaagaggagctggccatgtgacgtagtgatcaagagtcaagcatctctgggcagaggagatggtgagcacaaagccctaatgtgggaacaaacaaaaaaaggacagtgtgcccgtggcagaggaccctagtggagcggaggcagggccacagcaggttagaccatgttggagctaggatgttgaaagtgaaaacctgacgagatgaggtggcgcacgtctgtgatcccagcactttgggaggccgaagggggaagattgcttgagctcaggagtttaaaaccagcctgggcaacatagagagaccccatctctattaaaaaaaaatactgggtatgatggcccaagcatgtggtagtcctagcagtttgggaggctgaggtgggaggatcacttgagcccaagagttcaagaccaccctgggcaacatagggagagacctcatctctactacgactacgactactattactactaataaatagctggatgtagtggcatgcacctgtggtctcagttacttggaaggctgaggcaggaggatcacctgagccaaggaggtcgacgctgcagtgagttggattgtgacactgcacttcagcctgggtgataaagcaagattctgtgtcaaaaaaaaaaaaaaaagagagggaaggaaagaaggaagggaaggaagaaagaaaaagagaaagaaggaaaaaaaggaaagagcgagaaagaagaaagaaaaggaaggaaggaaagaaagaaaagaaaggaaagaaaaagaaaaagtgacacccagtcgaaagaagaaaggaaagaaaaagaaaaagtgacaaccggtcgaaagaaaaaagaaaaagtgacaaccggctgggcatggtggctcaagcctgtaatcccagcactttgggaggccgaggcaggtggatcacgaggtcaggagttcaagaccagcctggccaacatggtgaaaccctgtctcaactaaagatacaaaaaaaaaattaggctggcacagtggtgcgcacctgtgagtcccagctactagggaggctgaggcaggagaattgcttgaacccaggaggcggaggttgcagtgagccgagattgcgtcactgcactccagcctgagtgcagcgggagagactccatctcaaaaaaaaaaaaaaaagaaaagaaaaagtgacaacctgcttacagagtactggcgagtttgtgggtgggtggctccctagccctgctgattcttgcttctcacactcatgtctgcccctgccccagtgcacatcttgtcactgtcggccccaccgatggggttcctactgagtcttctggtccctgatcccgtctgtggtcattttcctgccaggtagcttggccaggcctcccctggtgcagatttcatccttggtttctcagcctggccttgaatgaccctctacagcagggtccccacctctcagaacaactttgctccagccacatggcttgctcacggccaggcactgcccatgtggactctgtgcgtgccacctctttgccctgacccatgttgcctctgggggagcacttcttcctccaccttccatcatgggctgtggcagtgcccatcccatctgcccccgacgctgtctgctgcagtatggttgttgggggaaagggcaccaggctccggcgtctgacagccgtgttttacccaccttcctactcactagcttgtgaccttgggcaattacttaacatctctgagtcttagtttctgtttctaaaattgggtgaataacacctactaagtagggttggcctgaggattaatagtataatgtaaaagctggcagcactgaaaccctgccacttaccagcttttcacatcagtatttgggaaatattgttaagctcatttgtcaggcggggattctgaggctcagagcagttccagaactttctacagattattttgccttgtttgcgcttccagactgcctatcttcttgtatcaccattgatcttgatctgtatggtttttaatttttttttttttgagacggagtttcactctgttgcccaggctggagtgcggtggcatgatctcggctcactgcaacctccacctcctgagaagctgggattacaggcatgtgccaccacacccggctaatctttgtatttttagtagagttggggtttcactatgttggccaggctggtctcgatctcctgacctcgtgatccgccagccttggcctcccaaagtgctgggattacaggcgtgagccactgcgcccggccaacttcacgtttatacacacccatgcaaacagcatccagatagagacaaagagccttccctgtaccctaaaagtttcccagaaattgttcccagttagcatatttatttttataaaggtaatgcatgcccatcatataacattcaaaaaggtatgtagagaaccaagtgtctcccccagccctgtcctccagccacccagtttccctccctaggggaagccaccaatatgtgtttcnnnnnnnnnnnnnnnnnnnnagtataatgtaaaagctggcagcactgaaaccctgccacttaccagcttttcacatcagtatttgggaaatattgttaagctcatttgtcaggcggggattctgaggctcagagcagttccagaactttctacagattattttgccttgtttgcgcttccagactgcctatcttcttgtatcaccattgatcttgatctgtatggtttttaatttttttttttttgagacggagtttcactctgttgcccaggctggagtgcggtggcatgatctcggctcactgcaacctccacctcctgagaagctgggattacaggctagtagagatggggttccactgtgttgcccagctggtctcgaactcctgacctcaagtgatcctcccacctcggcctcccaaagtgctgggattacaggtgtaagtcactgcgcccagctgtatttttattttttgagacagggtctcactctgtcacccaggccggattacagtggcacaaccatggctcactgcagcctcgaccaccccaggctcaagcgatcctcccatctcagtctcccaagtacctggggctacaggggtgtgccaccacacctggctaaattttgtattttttgtagagacagggtttctccaggtttcctaggctgctctcaaacttggtgtcaagtaatccaccagcctcacccccacaaagtgctgggattacaggcgtgagccactgcgcctggccttgatctctacttttatcttcctgcttccaaggaaatatttttttcttctgaattatcaggcatttactcttgtaattcttagtctccctacgcttgtttcctcccataagaaaatggggaaaattattcctacatcacagggctgtctgaggcctaaatgagatcgtgtatgtgaaagtgatctgcaaaccccacaccatgccaaggtaagggaggtagttttttattttcctgccaaaggatagcagaagctgtacctcttgtctgagttctgtctcttggcttgacacccttcagaggaattcctgcctcttccatgggtcaggaagaggtgcctagttagtttcttctgggtgccgagttaattccttcccaccaagtgggtttaagccctggaaggagtgtcttggggccagggtgcagtgggcgtttggtgctgagcatggacctgaaacttcgtgtgtggtcagatttatgttccatgcgtggggatgtgcaccggaccaggtatgtgtgtaggtggacatggatgatgaggtgtgtgtgctgtgactgtgtgtgcacccttgcctgcgtatgacaagcaggctgtgtgtgtaggaccaggaagctgtacttgtggccaggtatgtggctatggactgacgagcttgtttgttgaacacttgctcagtgccaggcatcgcactggactctgaacactccgagatgagcgagagcgccagcgggtgtcccgcgctgcagccagctttgcatgtgctcttcttgctccttggcgttgggcgtgggggttccgcggatttccggggctctggggtggtgtccaagctgaaggggtagtcaaagctggaccatgcaataaacccaccaggcagattccccagggcaccagtgagagaagaaaaccagaaacaaatagaacaaaaagaaagaaagaaaagtggaaaagccttttttgggg

SEQ ID NO: 97850 - DNA, 28553 bp, Homo sapiens
gaggtggaggttgctgtgagccgagattgcgccacctcactctagcctgggcaacagagtgagactccatctcaaaaaaaaaaaaaaaaaatcttcatcccttttcaggctctaatcaatcgtggggttaacctggatcccctgggcaagtggtcaaagactggactagtggtgtatgattcttctgtgcccattggtaagtctcccccacccaagagcccttctacctctgtccctgtccctaccgcatgtcacagggtggtccttctccacaggtgctacccccgagtacctggctgggcactacatgctgcagggagcctccagcatgttgcccgtcatggccttggcaccccaggaacatgagcggatcctggacatgtgttgtgcccctggaggaaagaccagctacatgggtatgagaggggcaggcaggtgggattcatcgggctgtcttgcttttgaaagtagatggggttgctggggttgctgactcactagtgctcatggaacacaatgtgcaggtagctagcagggtggtgaggaccagtttctggagtcggcctgggttccagtgtgccacttactacccatctgactatggattctcttttgtcatccataaaatgggatggtaattgtgcttgggttggcccttgtattacgcttggattgtgagggttaaaatgatgcgtttagaagtccttggcagtgttcagcacatagtcagcagccataacttttattaagctgctgtcacttaaaagaagtaatttagtatgtaggaccacataggtgtttggtaaaaatgggaaaaccacatcggtagacttgccgatcaccaggggctagtgcagagtggatcagcctatacagtaggcaggcttgttgggagcgaagttgccttgaggtgatgacacttctcatgtggattcctggacaggagggtgggagcaagtgtggagacagtggaactggctgatcagcactgttactgccctctctttagcccagctgatgaagaacacgggtgtgatccttgccaatgacgccaatgctgagcggctcaagagtgttgtgggcaacttgcatcggctgggagtcaccaacaccattatcagccactatgatgggcgccagttccccaaggtgagactcgagctgtgtgtcttctgaggcttcttccggttgaccttctcccttcctgacctcaatgtttagactcgaccctagtaaatattgccctgctggttgcagaagagacatatgattcatctgtatcttttctccaggtggtggggggctttgaccgagtactgctggatgctccctgcagtggcactggggtcatctccaaggatccagccgtgaagactaacaaggtgaggagtcaggtggtgggcccctgagaggccttggctgggtctcgtagagctggaaactgagatggggacaccctctgggctcccctctcctcctgaggctgcctttgggtctctttttgggacaggatgagaaggacatcctgcgctgtgctcacctccagaaggagttgctcctgagtgctattgactctgtcaatgcgacctccaagacaggaggctacctggtttactgcacctgttctatcacagtgagacctctgccatggcagagcaggggaggctgggctggggggctctttgccccttagagctcccttcagctccagctctgctttttcctccgttctttgtcttccccccacatccaggtagaagagaatgagtgggtggtagactatgctctgaaaaagaggaatgtgcgactggtgcccacgggcctagactttggccaggaaggttttacccgctttcgagaaaggcgcttccaccccagtctgcgttctacccgacgcttctaccctcatacccacaatatggatgggttcttcattgccaagttcaagaaattttccaattctatccctcagtcccagacaggtaagtaatctttttcttcccttcgtcaccacctttgctctttccacctttcaggaggctttatggtgtgacaagaggaagggaaaggaaagattcatgcatcccttactccagcctttgcatgcttggctgagagaaccctctcattccagctagaattgcttttgagtgctggaccccatgtgaacaggctaaagtgttcatatggatggaggcctgttcctttattctgccaagtggctgcagttgttcagcactaaatgcattccaaatgcaggttgtggtttcttttccttcttggcacagggtggacttactggtactggacctctgctggtccagcaatctcagcactgggttggaacagagctccacagagctttgtcagcagttctctgagcccttcacactcattgcagattgttttctcagccatcttgaggagtctggcctggatctcaagggaagggtggggttttctgaaacagccttgagagcactgcttactgggatataaccctgggtttagttggaagagggagagaagtgctactttagaaatagtagaatttgtctgggcgtggtggctcatgcctgtaatcccagcactcacctgaggtcaggaattcgacacggtgaaaccctgtctctactaaaaatataagaattagctgggtgtggccaggcacggtggctcacgcctgtaatcccagcactttgggaggccaagacgggtggatcacgaggtcaggagatcgagaccatcctggctaacacagtgaaacccccatctctactaaaaatataaaaaattagctgagcttggtggtgggcgcctgtagtcccagctactcgggaggctgaggcaggagaatggcatgaacccgggaggcggagcttgcagtgagctgagattgtgccactgcactccagcctgggcgacagagtgagactccgtctccaaaaaaaaaaattagctaggtgtggtggtacgtgcctgtagtcccaactactcaggaggctgaggcaggagaatcacttgaacctgggaggtggaggttgcagtaagccgagatcacgctattgcatttcagcctgggcaacgagcaaaactccatctcaaaaaaaaggaatagtaaaatttgctataacttaaaaagtacatattttaattatcccgcacttcatcacaattcacatggaaagaaacttctctgatttaaaaaataaataggccaggtgtggtgatggctcatgcctataaatcccagtactttgggaggctgaggtgggaagattgcttaagaccacgagtttgagacctgtctgggcaacaaagggagacagtagttccagctactctggaggctgaggtaggaggatcccttgagccccaggagtttgaggttgcagtgagctatgatggcaccactgtactccagcctgggcaacacagtgagactctacctcaaaaaaaaaaaaaaaaagataaataaagcctagtgcttcaaattcatttagaagaccctgcgaggccgggcgtggtggctcgcgcctgtaaccccagcactttgggtggctgaggcaggtggatcacctgaggtcaggagttcaagaccagctggtcaacatggtgaaacctcatctctactaaaaatacaaaaattagccggacatggtggcgcacggttgtgattgtccggaggctgaggcaggagaattgcttgaacccaggaggcagaggttgcagtgagccgagatcacaccactgcactccagcctgggtgacagagtgagattccatctcaaaaaaagaaaaaaaaaaccccaaaaccctgagaatcacctcttccttacagcatcttgttacttcctgtcctcaagagggcgcagcttcctgtagaaaccttttggcccaaggataggcagtgatttttttttttttttttttttttttgagacggtgtcttgctttgtcgctcaggctggactgcagtggtgcaatctcagctcattgcaacctccaccttccaggttcaagcgattcttgtgcctcagactcccaagtagctaggattacaggtgtgtaccaccatccctggctaatttttgtatttttagtagagatggtttcaccatgtgggctaggctggtcttgaactcctggcctcaagcaatccacttgccttggcctcccaaagtgctggaattacaggtgtgagccaccacgcctggcctataggcagtgatcttttaatacaaggttcaactaggacttgagtaaaggccaagttatattaagtaatgggaatttaggtaatctgctcttaggcactgacctaattgtgtggagctcctgcccaggaaatggcaattctcatattttaatatgagaatattaaaatatggtgataaggcccattttctgacaccatctgtttaattttaaccccaggaaattctgaaacagccacacctacaaatgtagacttgcctcaggtcatccccaagtctgagaacagcagccagccagccaagaaagccaagggggctgcaaagacaaagcagcagctgcagaaacagcaacatcccaagaaggcctccttccagaagctgaatggcatctccaaaggggcagactcagaattgtccactgtaccttctgtcacaaagacccaagcttcctccagcttccaggatagcagtcagccagctggaaaagccgaagggatcagggagccaaaggtgactgggaagctaaagcaacgatcacctaaattacagtcctccaagaaagttgctttcctcaggcagaatgcccctcccaagggcacagacacacaaacaccggctgtgttatccccatccaagactcaggccaccctgaaacctaaggaccatcatcagccccttggaagggccaagggggttgagaagcagcagttgccagagcagccttttgagaaagctgccttccagaaacagaatgatacccccaaggggcctcagcctcccactgtgtctcccatccgttccagccgccccccaccagcaaagaggaagaaatctcagtccaggggcaacagccagctgctgctatcttagatggttgaaaactagacgggtggctcactgccattgtcaccaggttggaactcttgcctctgtgaggatgccttctctactgtgcatacccatgaaatttaatacacattttaaaacctctggccactgagtatttttgagggaactgggtgctgcctttgccgctttaagggtaaagatgggaggtgggactgggatcttctgaggagagggaatggttgggtgctactgagaaataaggtcagttttaggctcctgcatccttgggttttcccaggaagggaaagccctggagtcagagctaggggtgattgaactccggggagaggagggcaatagaagtgtaggggaaggcggggcacactagctcatgcctgtaatcccagcactttctgggaggccaaggcgggtggatcacctgaggtcaggtgttcgagaccagcctggctaacatggcgaaacctcgtctctactaaaaatacaaaaaatcagccgggtgtggtggcgggtgcctgtaatcccagctactcgggagactgaagcaggagaatcgcttgaacctgggaggctgaggttgcagtgagccaagatcgcgccactgcactccagcccgggcgacagtgagactcggtctcaaaaaaaaaaaaagtcgtgtaggggagatgggcttgccaccagaacccatggggtactggaggtcctgggctttacgccaccccggctggagtccaggcggtggctcccctcatcacagggctcggcctcagacccggaaaggtccagggtccggcctccaattggagcctgtcattggcttcccctcggcccgccccctgacctctgccccgctgccgagccgcctgattggtcggctctgtcccgccggcgccgcattggctcttctggctcgccttccatccctgctcctgcaccggtctgcatctcccagcagaaggcgcagccatgaatccgttattcggccccaacctcttcctcctgcagcaggagcagcagggcctggccgggccactgggggactcactgggaggcgaccacttcgccgggggaggagacttgcccccggcgcctctctcgccggccggccctgctgcctactcgccgcccgggccgggcccggccccgcctgccgccatggccctccgcaatgacctgggctccaacatcaacgtgctcaagaccctgaacctccggttccgctgcttcctggccaaggtgcatgagctggagcgccggaaccggctgttggagaagcaactgcagcaagcgctggaggagggtaagcagggccggcggggcctgggtcgtcgcgaccaggcagtgcagaccggcttcgtcagccccatccggcccctggggctgcagctgggcgcccggccggccgctgtctgcagcccttcggcgcgcgtgctgggctcgcccgcgcgctccccggccggccccctcgcgccctccgcggccagcctctcgtcgtcctccacctccacctccaccacctattcctcgtcggcccgcttcatgcccggcaccatctggtcgttctcgcacgcccgccggctcgggccgggactggagcccactctggtgcaagggcctggcttgtcgtgggtgcacccggatggggtgggcgtccagatcgacaccatcacgcccgagatccgcgctctctacaacgtgctggccaaagtgaagcgggagcgggacgagtacaagcggaggtagggattgggaaagggggacaggtctctctgtgtcataccactcacaacgggccgcgagttggtgtgggttccgaagaatcaggggtgaaaagaatgagagtaaagtttgtgctgtgtaatgaggagcttggaagcaattggatgcagggagactagaatccgcagagaatgcagaagccctgctcgtgacaggaagaaggacgctgggagcggaacacggggggattcctacttttccggcttgtctctgccatccaggcttaactgcgggttttgtgcggtgtgaaagggactggggctctgccctaccggtctcagccctggggcaggttagggatataaacttcaaaagtaggaggcaaggatatagcgtaaatttgggagactaaattgagtgaaactggaaggggctggtgagggaggggctgtaccttgcaacgagtgattctttcacaccccaaggtttcccaaagaatattgatggaaaccaggtacctgctgtggtttcataggaaaagctccgggacctcaagccattgcttgagtaggtcaacaaactgggaaaagaaagagtgaagggaattcactagggtgagggtggagagcagggctgacaggggaatcttggcagtataaagcgccagtggggagggagagtggagagccagcaggggactgagcagggagaagctgggatatgggccctccctaggaccgcgaggccgcggggcgggcccggtgcattctgtggatgaagatttggctgtctgagaggagcccggccccaaggggcaagggaaagggatgtgatgccaggagtgctggctgtataccaagtggattcctyagatggctgataaccaagccgataggacaggagtgagagcagaggtagtgtcttgcagactccaacccaagccttgaggagggagcgggtgactgacaggctttggtttggcggcctcccctctcatctcagctattatgaccccttgtgggcgggcctgggaactacctatgcagcccagtgtggcggagattcagcactgggtgaggattggccgaatgttctaggaaatgaccgctgggtctaggggcgaccttcagggatctccaccctgctggagtttaccagatcacagatcagcaggctttctttttttttttttcccataaatgataatattttattatagaaaaagcatcccaaatacaggatttcgtaaacactggtaggtgaacaagtgcaattttagaagtaaatgcaaagtaaagaggcaaaacctacaagcattttgccttcagaagaagatgtagtgttctcctgcactagtgatcccacccagaacacaaatgtggctctgtctcccgtgaaagcatcagatttgctttctgagctcagtatgcccatttcaataattgcaaagtgatggcaagaagtggcgttgaacacatgactacagacccttgacttaaaatattgagacagggacttgctctgtcatccgggctggagtgcagtagcgtcatcacagctcactgcagcctcatcctcctgggctcaagcaatcatcctgcctcagcctcttgagtagctgggactacaggtgtgcactaccatgtccatgcctggctattttttttttttctttttgcgttgtccaggccagtctcaaactcctgacctgatcagcaggctttctgagcttgagtcctgtcctcgtgctggcttccttagttgtggtccatgttatgtgtccttgggagtttcagttgtcctgaaatcatcgttctgccacccagaaccagcctgctctgcccctgcaggagttaactacgcgctcagcagtggcacaggcacagttctggaatacatccataaccacaggaacaactgctgttctcaggagcattttttttttaaactgaaggagcgtttgtccttggtccagctgtccaggacaggaaggagttattccttggggactgattagctcatcgctctgcagcacgctgctgtgtagagagccttagctggattcggatggtgcgtgatactggcagtgactcttcttcctccctagattccctgccctcattctggtctctttatagcaacactgtaactcctgtcttctgcctggaaggcctgggatggcttgagcgctacactgggaggtagctaaaggcctcctgcgttctattttcagctcccctgccttgtgcgtgacctttttttgagcccccattttcccaacataggaatggtccctgctttctctcttcaacccagggatacagttttttggaagagagatatttggtccatgcagaacacatggatatcgctctcaaattctgcccatgttaagggaaccttataagtgagaccagatggaaatggaggtgaaaatgaacctgtctgtgtgaagtctggccaaagaacaaatagaactgtagtgggcttccagatgattcatttgtagattttttttaccctgtaagatttccttaggcttaacctttagctataactgccttacttaagtttcttccaggctctgttgagctcactgtcagatagcccctcctgccctctttcacacatcttgtccagggttagcgtgcccttgacaggcttactgtctccctccagggactcgtgggctcccggcgcatgagggcaccacagttcatgccttcacatcatagatgaagaaaccaagacccagaaaagataagggtcttagctaagaaaacataatctgatgcgactggttcccttagtggcctgactgtatgcatgagaatgccagggaggaggggagaagcacctacgggacacacagggaagggggctgggagccaggaaggctgggagctgggctgtgtggggagccagcagggtggtggctgggctggctgcctcctcctgctctgcccagcagggaggggcagtcgaggtgatgtggaggagttattattaggaatactgcagtgcggctgtgaatgaggagatgggacccagaggctgacacaggaaggaagatggagggaaggggaagaaagggcttcacccaaggcttcagaagctgcccactcagattttaattttcttgctgtcttcttggccccttcctaaccacctttcttgtgttgaagtttctctcttggtgcagttcccctcccttctcgggttgacagaagtgatgagctcacaggaacaggatttgagatgtgctgctacgccagctagactgcagggccctggaatgccgggcgggtcctaagcagcacgttgccctggcttccatctctgtgatggaatagaatatgcactgcctgccatggctgatgagacatgacaaagctggctctgggaagcatgccctacctaggaccctgccctgtggcccagggtgtcgtccggcccacttgcagtcttaatctctgaattctgggccctggaacaggctgtgtctagttctcatttgccgtactcaccgggcccctttacatactctactttctctttccctctgggtttgagtgctagtaaccccaggctcgtgtgtccactgctgtcatgctgctgtgggacttccggcctctgagccagtctggtcacctctctgtgactcccttagaggaggctctgggtgggtagtttctggagctagtggggaaggactttgagtgtctcctaccaggctcttgacccactctgttgatacactatgtgtcctgcagatgcttttacagggttaaatgataccacaagaggcagggcagcgggctcgacgagctctgttctgrtgcgggcaggaggcgggagcccggatctgtgcgactgaaggtgggagactgggccgggtggacctggtggtctggtgtgggcaggaggtgggcaatgaggccagccggacagctggctgagctggggcctgagcagggatgggcatcacggaggaccggagcctcagcacttgcccaaacagagctcctggtgcacagcccggaggttccgggaaggcagctggcgagctcgacgcccatcaggaagcacagagccgcgtgacagctgcagttggtcaccagctggctggccaggcattcctgtgccctgctcctccccatccagggaaccagaactggggtctgaggcctgagccagagaggtggggacagggagccatgggggcagggaaggactctgtacctaagctctctccgcccttcccatgtctgtcaggtgggaagaggagtacacggtgcggatccagctgcaagaccgtgtaaatgagctccaggaggtgagggtggcgccccacttgctgctggtgcttccctgggtacccctgtctgcccatgaccctgctgccgtctccctgtccctccttggcatctttatcttcctcccacctcggcagtgccaccaacatcagggtttctcccaactgcaggaagcccaggaggctgatgcctgccaggaggagctggcactgaaggtggaacagttgaaggctgagctggtggtcttcaaggggctcatgagtaacgtgagtgcagccccaggcttcccgagggtcgaagtgaggcttctgaggccagaagagtaggcccttctagtgttggcctgttggcctcccgtccacggctcctccccttctctttgctttccttccctttttcccctagccacccctaactccagagaaagacaagsaacaaaagtctcggtgttgcgtcacagaggtggcgcagcttctgagggcctggggttgcagagcagttagtgagcagcttctggggtggaggctctgcagctggcgccggggcgctgggccgattcctcagcctctgaggcctcacctttggcgtggggaaataaacgcgtgcgctctgcaggagtattgtgagggtggtcatgtactcgggacagtgcccagcatgcagtgttagctggaagagtgttagctgttgcgattattatagtcctttctccactcttataattcccaggagtctctttctctctgggaatgtaagttctaggaggatgaggaccgctagtcgttccagtgagccccctgcatgtcccaggcactggccatgccctccagggcttccgtttggccagggagcagtggcccgagccgccccatgcccagcatattcacacagtgctgtggggaggccaccgctacccaggaagaggggtgcagtcagctcagggagactccacagaagaggcaccggtgcaatgtggtgggaaggatgaggaccttgccaggcctaattcgtccttgtctggagaactgggcgcctcctcactgttccctgggctccctggacagaacctgtcggagctggacaccaagatccaggagaaagccatgaaggtggatatggacatctgccgccgcatcgacatcaccgccaagctctgcgatgtggctcagcagcgcaactgcgaggacatgatccagatgttccaggtgaggacggagctgccctctgctctcaggggtgggtggggcaggtggatgcttccgtggcrgctggcctggaacgcaggccctgcctcctgcttggggagccttacctggcaactggggccctcacggggctagactggggggtaaggagcagcatcaggaggggcatcgtggaagctgtctctaacgccgtctctcccttccccctctctctcctctgtctgcttcctctcctctcttcctctcatcttctctcttgcttcctccacagaagaagctggttagtttgatctcacgcaagcttattaatgtcccagtcccagtttctaagctgcctaggcctcctggccctcagtttgggcccgctgggctcttgagcacggatttttttctgccctttcccttttccttgctcttccccctttttctctctatctcttgttctcttgactgcatttctttctctcccttctcccccggctttccagatctggatgtgattcaggttctcttttgtacacattgcacactcatcctccttgcgtcctaaagcttttttttttttagttgagtcatttaatcaaaaagactttttttagaaaaaaatttcctcttgagccatcatgcacatctgactgcagccccagcgagcccttccttccttgtctgactgctcttcttctcgatttcttcttgttctgccttctcggtttgcagccctgacccccgctgtgtgtctggcccttggtgactgtccgtgtttctgttcctgtcattgtaactgtgacttttctctctgtctgcccccccttcctactggttcatgcttctcccccattcccaccctctctgcccggcctcccgctcccgccctttctcctcatgcacccggcctcgtctctgtagtctctgcacttgtctcccattaaggtcccatccatgggggggcggaagcgggagcgcaaggctgccgtcgaggaggacacctccctgtcggagagtgaggggccccgccagcccgatggggatgaggaggagagcacagccctcagcatcaacgaggagatgcagcgcatgctcaaccagctgtgagtccgcaggccgtgctcccgcagcaccgacgccacagcagcccaggaggccggagctccccagtcccccgccaggacgaggccccgcccgccctgacacccgggttccctgtctctaggagggagtatgattttgaggacgactgtgacagcctgacttgggaggagactgaggagaccctgctgctttgggaggatttctcaggctatgccatggcagctgcagaggcccagggagaggtaacctctgctcccggcctcagggccctctggctctgcctctccagcctgamgcccactcccccgctcctctccttgctctgtccccccatgtggctgtcatcctctacctgcgtctcccctcttcctttatccttttgcttttctttctccagtttctttaaccagacttcctctctctctctctccctgacttggccctttggaatgcgtcccatcccatccctccttggctggcctcccccgcttccctttctactccagcagcaggaagatagcctggagaaggtgattaaagatacggagtccctgttcaaaacccgggagaaggagtatcaggagaccattgaccagatagaggtaagggcaggagcggaagccaggggcgtggtgtcccagagggttttgagtggggctgcaggcgcagtggcctcatccctgctgcaggaccctagagaccaaggtcttgggaggaggagtgatctctcagctatagtcctcctggtgggctctgaagacctcaggctctggaaacagacagatatcggttcaaatctcagctctgttacttacaaccaccctgaacttgtaataagttacttgttccctctgagcccctcctttcctttcctttcctttcctttctttccttccttccttccttcctttctctctctctctctcttcccctccccctctatccctccctccctctctcccttgtctttctgtcctttcttttttgagacaaggtctcactctgtttcactctgttgcctaggctggagtgatcctcccaccccagccttctgagtagctgggcccacaggtgtgtgccaccatacccagctaatttttatttgtatttttttgtagagatggkgtctccctgtgtttcccaggcaggtcttaaactcttgggcttaagtgatcctcctgcctcggcctcccaaagtactagaattagagacatgagccatgtgtccagccctacacctgtttctttttctttctttctttctttctttctttttttgagacagggtcttgctctgtcactccaggcccactgcagccgtgatcttctggatccaagcaatcctcctacctcagcctcccaagtagctgggaccacaggcgtgtgctaccacgcccggctaattttttgattttttttacagagaacagggtgtcactatgttttccaggctgccctcaaacttctggattcaagcagtcctcctaactcggccccacaaagtgttgggattacaggcatgagccactgtgccgggcctttttatttgtaaaatgaggaatttaataatacctcacctatagggttgtttagaagatcagatgaaataatgcatatatagagcttagggcagtgtctggctcatagcgagtgtagcatagtggggactgttttattattattaacactatcagtgccatggcactcagagatggactgggactttcctgtttcttccactcagcctttgagataacagagaaatctccatgctttttcccaagccttgaagtaccttctagaggtacctagaggcaagtggagctggtgctttagctcaaactctaggctttaggagctgcaagaaggatttgtggaggccgggcgcggtggctcacgcctgtaatcccagcactttgggaggccgaggcgggaagatcacgaggtcaggagatcgagaccatcctggctaacacggtgaaaccccgtctctacgaaaaatacaaaaaaaaaaaattagctggccgtggtggcaggcacctgtagtcccagctactcgggaggctgaggcaggagaatggcgtgaacccgggaggcggagcttgcagtgagccgagatcgcaccactgcactccagcctgggcgacagagcaagactccgtctcaaaaatacaaacaaaggaagaaggatttgtggaaccacagaatggaggttgctgttgctgtgggaggagggatggacgggacccccgtgagctctcctggcctggtgaggtggtcctttcccgacgctctgactttgggagaggcatggagccttctctgcgtctcagcctctcttcaggcccacatgggagattcatacgtagtccccccttatcttcagggcatgtgttccaagacccacagtggatgcctgaaaccaaagatagcactgacctcctgatagcttgggtccagttgctgtcaactggaacgtgtttctgttcatgtctcccacccacacattcaatgccttttctatcttaactaagcacttagcgtgcgctgtggcggtaccttttgcagttcgaggtgtgacagcaaaactggcacaaatttctttttccttctttacaatttcacggatagaagattcattcttactgtagagcttaccaacctcagcatcggattctttttcttattaagttgaaaacttttaccttttcacttaaagggagcatattttggcttctctttcacatatccaaattgccagcatcactactcttgtgctttggggccattatgaagtaaaaataagggttccttgaacacgggcactgccataccacgacagtcaatctcatcactgagatggctcctaagtaactaatgggcaggcagtatagacagtgtggatccttgggacagagggagggttcatgtcctggtctggatagagtgaggtttttttttttttttccgagacggagtctcgctgtgtcacccaggctggagtgcagtggcttgaactcggctcactgcaagctccacctcctgggttcacgccattctcctgcctcagcctcctgagtagctgggactacaggcgcccgccatcacgcccggctaatttcttttgtattttttagtagagatggggtttcaccgtgttagccaggatgatctcgatctcctgacctcatgatccgcccacctcggcctcccaaagtgctgggattataggcgtgagccaccgcgcccggcagagagagtgagattttatcaggccactcagaacagcgtgcaatttaaaacttaggaattgtttatttctggaatatttcatttaatattttcagatcaaggttcaccttgggtacctgaagccgtggaaagtgaaaccagtggataaggagagagtgactttattcttttcatttatttatttatttatttatttttttgagacgtagtctcgctgtgtcgcccaggctggagtgcagtggcgcgatctcagctcactgcaagctccacctcccaggttcacgccattctcctgcctcagcctccagagtagctgggactacaggcgcctgccactacgcccggctaattttttgtattttttagtagagacggggtttcaccatgttagccaggatggtctcgatctcctgacctcgtgatccacccgcctcggccttccaaagtgctgggattacaggcgtgagccaccgcgcccggccttgactttattcttattgctgtcacattggaggtgtttgagaaggaagtcgagaaattattttcctatatactcattctcccaacacacatcaaactgtcctgctcctgcatcaaacctggttttcttggccaggtagatgaggtttcctggatttgtgctgctagctaaagacatggcaagggaaaccagtactccccaccctcccgtctaccgcggctcactgtttcctcctcctgcctgacctgattcttgtctccctcttttggatggtggatttaaggtttgtgttttcactgtgccttcaaccaactaggggcctttgtgcggccatcttcgtgagaagagatctcgggctgccatctctccctagtcttccctggacctcaagtgcccagtgtaaaacatgatctgaaagaacgaaaataatatcttaaatggaatcatgccttttaagctatttttggctgggcgtggtggctctcgcctgtaatcccagcactttgggaggccaacgcgggcagatcacttgaggtcaggagtgtgagaccagcctggccaccaacatgtgaaaccccgtctctactaaaaatacaaaaagtagccaggcattgtggtgggcacctgtaatcccagctacttgggaggctgaggcaggagaattgctggaatctgggaggtggaggctgcagtgagctgagattgtgccactgcaccacagcctgggtgacagagcaagattccatctcaggaaaaaaaaaaaaaaaagtattttcaaatcatctgactcctcctctctcccagtgcaatgactttaggcagcagtccccaacctttttggtaccagggactggtttgtggaagacagtttttccactgacccgggggaaatgattttgagatgattcaaacattacatttattgtgtactttattactatttttaaaaattattattattatttttagagacagagttttgctcttgttgcccaggctggagtgcaatggcgcaatcttggctcactgcagcctccgcctcccgggctcaagcaattctcctgcctcagcctcccaagtagctgggattacgggcatgtgccaccacgcctggctaattttgtatttttagtagagatggggtttctccatgttggtcaagctggtctcgaactcccgacctcaggtgatccaccacctcggcctcccaaagtgctgggattacaggcatgagccaccgcacccggcctgtgcactttatttctattattattacattataatatataatgaaataattwtacatctcaccataatgtagaatcagtgggagccatgaacttgttttccgcaactagacggtcccatctgggggtgatgggagatagtgacagatcatcaggcattagattctcataaggagcacacagcctagatccctcgcatgcacagttcacgtaaggtagggttcaggatcctgtgagaatctaatgccgccgcggatctgacaggaggtggagctcaggctgtaatgccagtgatggggagcagctgtaaatacagatgaagcttcactcacttgcccactgctcacctcctgctatttggcctggttcctaacaggccacagacaggtactggtccgtggcctggggtttggggacttctgcattaggggaaccgttaggaggacttgctgacctcaggagtacccaaggtgcctttatctttgtgacctttgatctctcagggtcactaagatggagcaaggtaaagccaaggcccagagtggtgggcgggaggcagttcttccccaccgctcctcacctctctctgtctcctcccgtcccacccccaagtctgttcacacagygagcctgcagttttcaaggtggcttgtcaaggacatctcctgacatgcacgttcacctcctgaccttgttcctgctgtaaatttgtgaattaagtggggacatagacatatgcagagactactggtggcagtactagccttgtatttcagtagaatatatttggttcatttccttcttcccagtctccctgagtgatggttccagaacccagctccctgcactccggttcttccaaggtggagaaattggggtgtaggcagctgatctgaacaagggctggtggcactgtattttccccctgggttgaacagtcaccgtgtcctgctcctcccactactgtggggccccagctgtggatccaagcctgccagggaagctgtccccactagggcttctcacccagccagccgccatctcaccccaaatgtcactgtcctgaccatctctgctgtctggccctgtaacctgtttccttctttctctaagttcccaccctctctgtccaatccacattatggcagctggtatcctccccgttctcttcwctcaggcagtcacgaacgtcatctccaggaagtttcattttgcttccccttgcggcccctgccctttgtacccaaaacaaagagaggcagtcgactgtccctggcactgagtttgtgctgcctgggccctgcctctccgcctgcctcagagtgtgggctgcagaatgggcccggggagggagaccggatttctttgattctgagccccgtgttttccacgtgtgacatttctgaaatcaggacaggtctcagaatcaatggcacctccaatatgggagtcttccytttagtgtctgaaaatggcttttaggtgagaaaataaagtgataaggagagaatggtaagaggattgggcccctttcagcagttagccaggcttgtatgccacgggtcacagagagagttaattcccttcgaggtctgggtctgccaggatgaggaaaacctgtcgctaacccttacgggagctcacagtgcagtgaggggacagcccaggaccagcgcagtacaggggatgaggggtgagccgggccccataggaacctgtgtggccctgggagcctgtggatctgctccatcccgcccacactgactttcctcaccactcttatcagtcttaaaagaacacagcctgcagcagtacctttgcattcctccataggcaaagatttccaggaaaagcagaggaaacaatggtgtattcgctgccttctgccttggtctggtttattttaaaatctgagccttcagtaatggctgcctgggcccccggcccagccactgctcttggcgtgttggcctcctggcgggggcaacagaggcgctgtgaacgccacctgttaaccccgatggccctgcctgccccaccacagctggagttggccacggccaagaacgacatgaaccggcacctgcacgagtacatggagatgtgcagcatgaagcgcggcctggacgtgcagatggagacctgccgccggctcatcacccagtctggagaccggtaggcgcctcccctgggcatggggccttccagggggacacagcggggagaaaggttggaacacagccccagagaccctcaggcaatgactgggtcacatcttgctgtggggctgccctttgggagttacctggtggggctggcccagacccacagctctctcccttggcagttggatgagctatgtccattcatgacgggagggctgaaacctcccaaggccaccagctctggtggttcccctggttagaggcagtttaaaaactggcaaggaacagaagggttgtgggggcagatttttatctaaagtcagggccatgatttgtgcatttgaccctgtgtaagttacacygcaacaagaaagtgaatttttaaaaatcacaaaaatactgcagatagacataaagccaaggccctagagtcagggtgctggaggctcagcagcttctctcctactgtgacttcagctatttctttttttttttttttttggctcactacaacctccgcctcccaggttcaagtgattatcttgcctcagcctccaaggcgcccgccaccacacctggctaatttttgcatttttagtagagatggggtttcaccatgttggccaggcttgccttgaactcctgacgtcgtgatccacccgcctctgcctcccaaagtgctggaattacaggcgtgagccatcatgcctgacctcagcctctgagttcccaagacacaggcggggcccatttccctgtcagggtgggtttggagagagttcagtccctgccgctccctcgccatcccgcggccccgccctcgcttccggtacttctcacgggctgccagagggtgaggcagcaggaggaggagtgccgtccgtcttcaggattcctgcctgccccaaggttgacaactggtgtttttttctagaaagtctcctgctttcactgcggtcccgcttagcgacccgccgccgccgccaagcgaggctgaggactccgatcgcgatgtctcatctgacagctccatgagatagagacctgcctcccccttgcacccgaggccctcgcagcagggagctcagcgaggcagagggtggggctgcacagaggggaacatcagctgcagctctgcaccaggccggyccctggggactggggcgctcctccctcaggctttctccctcagtcttggcttctccagggctctggggtgtctggagctaggcttggccctaccattctggggccatttccaccacagttggggctctcctgccttcacgcgtgggtgtctgctacttccccatctttaaaatgctgccagagcgattgcggcccctcaccttgtccacgtatcaggaatgtgaatgtgggacctttcctccatccctgttgtccggagccagctcactgtcttccacactggtgctaactggcccaggcactggagtggaatagaatgcagctggaggctacgcatggcctctgcagcacacgcagctggagagggcttctgtccctgtcagcggcagagggcgttggggctggccggggcaccttgtccctgctatggtccacrtgctmacgctgtccacctgccaggtggagtgtatgtggctgtggccctccctcgtggaggtgccgtgctttaaagaggccttagtgcccgggatgggcacagtgttttgaagggaggtgggagctcttgctctcctggtcactgcagaatgacagagaaggtgaagctccatgcatgtgtgcgcgggtgtatgtgcgctcagggtctctgtttaagtatcagctaaagatgtgcttcctccgtgtctgtcatacactgagaccaacaggctacagtgtccctgattcttggaaaagcctggagaagctggggagatgcggttcmcaatgcctcggtataggaggctgtgttgagctgacattcaaatggattctttaataataatgaaactggcgagtatttattgtgcactttggtgtcactgtctcaagcacttcctaatattcactagtttgaactctgaggtaggtactttttttttttttgagatggagtctcatactctgttgcctaggctggagtgcagtggtgtggtctcagctcactgcagcctctgcctccggggtgcaagcgattctcctgcttcagcatgcctgtagctgggactataggcatgtgccatgaagcctggctgatttttgtaattttagtagagacggagtttcaccatgttggccaggctggtctcaaactcctgacctcaggtgatacacccaccttggcctcccaaagtgctggggttacaggcgtgcgcgctctaccgaggtatgtacttttgtctccactaggtaagcacacgtgcaaagtgaggcccgggagtaactgcccaaagcaactgagccgttcagtggcagagccaggggtctggacctaggtcccagctacacgccttgcccctacccaagttcccctaaggacgatgatggaaataagtcaccctgacacatctcagttcatcttcctcaaaactatgcgaggtgggcatttttaccgatttttaaacattatatagtccttaccgccttgggcatggttttaggtacttggtttacctagatgaatcctgcttgaagaccttaggggctggccacgatgtcctcagataagacacgagggcacagaaagcaatagagcacgtgctcaagacctcacagctgcggaggccaagctggaattgcccgctgcagctcagctccaggctgagctccactaaccagtcagcgtcagagcccagtgcgagccctgacttcctccacctgtcagcctccctggggctgcccacagaatagcttcttccatgtttggccaacagcagatagcctaggactggagcgaggagaggaaaaggccttgttctctgaagtagtggtgccagcttcctgtagcactcaagacgtctgagcgggaagcaaatggttctcgaagcaagcaaggctgtttggaggccctaccctcagtctgaggagaacataccaggtccctccccagcaagaatgtctcaccttgacacaagcccagcttccctcccctctgccccagaccctagaataagacaggacaagtaactggttgagcacagggtactttattgatggtacatgacaaggtgcggctccctaggcccctcccctcttcaaggggtctacatggcaactgtgaggaggggagattcagtgtggtgggggactgagtgtggcagggactccccagcagtgagggtctctctcttcctcttgtgctcttgctggggctggtggtccaggggtcttactccttggaggccatgtgggccatgaggtccaccaccctgttgctgtagccaaattcgttgtcatacctagaagatgaaaagagttgtcagggccctttttctgagccagccaccagagggcgccagaccctgcactttttaagagccagtctctggccccagccacataccaggaaatgagcttgacaaagtggtcgttgagggcaatgccagccccagcgtcaaaggtggaggagtgggtgtcgctgttgaagtcagaggagaccacctggtgctcagtgtagcccaggatgcccttgagggggccctccgacgcctgcttcaccaccttcttgatgtcatcatatttggcaggtttttctagacggcaggtcaggtccaccactgacacgttggcagtggggacacggaaggccatgccagtgagcttcccgttcagctcagggatgaccttgcccacagccttggcagcgccagtagaggcagggatgatgttctggagagccccgcggccatcacgccacagtttcccggaggggccatccacagtcttctgggtggcagtgatggcatggactgtggtctgcaaaaggagtgaggccctgcagcgtactccccacatcacccctctacctccctccccaccttgaaaggaaattatgggaaagccagtccccagaacccccaaccccagggttgcacgcagccccggcagggaggagccagtcttggatgagaaaggtgggagcctcagtcccattccccagctctcataccatgagtccttccacgataccaaagttgtcatggatgaccttggccaggggtgctaagcagttggtggtgcaggaggcattgctgcaaagaaagagggagcggggcgcaagtcaggggagcgtgtccatagggtgccaggctggccgcttctccacgggccctgccttcctcacctgatgatcttgaggctgttgtcatacttctcatggttcacacccatgacgaacatgggggcatcagcagagggggcagagatgatgacccttttggctcccccctgcaaatgagcctacagcagagaagcagacagttatgaacccgggtcctgcctttgcagggctgagtcagcttcccctcccgcgggccctcctgcactcaccccagccttctccatggtggtgaagacgccagtggactccacgacgtactcagcgccagcatcgccccacttgattttggagggatctcgcctatgggggtgggggggagatggggacaggaccatattgagggacacaaggttaccatatacccaagggagccacaccatcctagttgcctccccaaagcacatttcttccattctgtcttccactcactcctggaagatggtgatgggatttccattgatgacaagcttcccgttctcagccttgacggtgccatggaatttgccatgggtggaatcatattggaacatgtaaacctgggggaatacgtgagggtatgaaggggctgcccatcagccaggtggctcctcccacaccagctttggggctcaccatgtagcactcaccatgtagttgaggtcaatgaaggggtcattgatggcaacaatatccactttaccagagttaaaagcagccctggtgaccaggcgcccaatacgaccaaatctaagagacaagaggcaagaaggcatgaggaggggaggctcctccagaatatgtgagcagccctaggccacctccccattaagagggcgaatgcagcatctccttacccccaggagggcccaagaggttgaattttatctcccttgagcttccctgccaggctggcctggcttaaggcatggctgcaactgaaggctccagggctgcccaacacccccagtcatacgaagcccttccaggagaagcggccatgtggggcactgccacccacagtctgggcacaagctttgtacatggtattcaccaccccactatgccaccccaggaatgcttgctgctgcctagctcagctgcaccctttagggagaaaacgcttgtacactcagcatcatcaaactcaaagggcaggagtaaaggtcagaaattaactggacagggcaagcccaccccttctctaagtccctcctacaaaagggacagagactggggcgggtgggaagaggggaagctgtattttaaccccctagtcccagggctttgatttgccaagttgcctgtccttcctagctcttttccagaaatcaggagtgggagcacaggtaagtgcatgtgtgtggggagaagggatgggagagagccccagcccaggcccccagctacagaaaggtcagcagctatatttaacctcagaccagggtgcggtgggagatctggtttccggaagacggaatggggagaagggcaggttccccgaggcgcccagacacccaatcctcccggtgacatttacagcctggcctttggggtcgggtcaacgctaggctggcaggggaagggcggggccgtgaggtgagccggcgctgcaggaaggggccaccaccagaggggccattttgcggtggaaatgtccttttccaactacccatgactcagcttctcccggcttggcaccatgccacagccaccacacctctgcggggaggggacacaagaggacctccataaacccacttctttgatttaccagagaataatctaggaaaagcatcacccggaggagaaatcgggccagctagcctcgctccacctgacttccccgccacacgcgactccacccatcgaggcaggagcgcagggttagtcaccggcaggctttcctaacggctgcccattcatttccttcccggttgcaacatggcggccgctctaccgcaggcgcagcatccggacagggatgcacccgctgcgcactagcatcccggggcctgcggtgccggaggccgtgggggaggggctcctctgcgacacgtgaccccgcagagcgcgaaaggaaagaaagcgtcccccacctaggggtccgggtcgggatctcgggcgggagtagggacctcctgtttctggggactaggggaaggaggctccgggcagatggcgccgcaagggcggagctgcacagggcgccacagcctgggtgcggggctccgccaggtccgagcgctgaccttgagctctccttgcggggaacagctaccctgcccccatacgactgcaaagacccggagcccgcaaggctcgtagacgcggttcgggggcggtcgcagcccagggccccccagccacccgcgaactcacccgttgactccgaccttcaccttccccatggtgtctgagcgatgtggctcggctgcgcggagggagagaacagtgagcgcctagtggccccggccgacacacacgcctcccctcccctcccccaccaggcctccatgcccagcccgcgccgcatcacgtcctccgcccgcccctgcaatgcggaggccgcccgggcccaccccgcagcggcgcgaacacatccggcctgcgcccgcccctgccgccttcaggccgtccctagcctcccgggtttctctccgcccgtcttcacctggcgacgcaaaagaagatgcggctgactgtcgaacaggaggagcagagagcgaagcgggaggctgcgggctcaatttatagaaaccgggggcgcggcggcaggcggtgactcggaccccgcctcccgccaggctcagccagtcccagcccaaggtcttgaggcctgagctacgtgcgcccgtaaaaccgctagtagccgggccctactttctccccgcttttttttttccgcagccgcctggttcaactgggcacgcaccgagcgtgtgggccccgacgtaggggggaagggactgagattggcccgatgggaggtgatcggtgctggttcccaggactggactgtgggcagcaggacactagggagtcaaggacggggacccttacacgcttggatgaaacaggaggactttgggaacgactgagatggggaattggagccggagcccagcaccgctcgcggctgcacgcggcctgccccctcccctttctttctttcaaaggctgagaggcgggaaagttggggaacttctcctcgaggctctgcggtagtgacaccggactgctcaggcaaaggcctaggaggggcccatgggcctcgggcgggggcccgtggttccttcccagcccccacttccccctccccatctcctggctcctggcatctctgggaccgaggcctgggctgggcactgggcactgggcactgggggcctggagaggaaggaggctcgggaggcggcttgagggggagggggaggtttctgcacggaaggtcacgatgtcctgcagccctgtagcctggacctgataattagggcagacaatcccggccctgtgtgcaccagcggctctctccgggctggggccccaggcggaggacaggatggctggtgggggcccagaggcctcccacaaaggcactcctggaaacctgtgggctgtgctgcctagggagagagacagtgtgcctttcattccatccagcctggggcgaagagcgggacgtgagggcggaagtccctccccgccctgggacg

SEQ ID NO: 97851 - DNA, 29862 bp, Homo sapiens
cctcagcctcccgagtagctgggactacaggcgcccgccaccacgcccggctaattttttgtattttttagtagagacagggtttcactgtggtctcgaactcctgaccttgtgatcggcccgcctcggcctcccaaagtgctgggattacaagcgtgagccaccacgcctggccaggggacagtcttttacctgcctagccagatgtgttagcatctgttaagttgccactggaaggccgggcgcggtggctcacacctgtaatcccagcactttgggaggctgaggcgggtggatcacctgaggtcaggagtttgagaccagcctggccaacaaggtgaaaccccgtctctactaaaaatacaaaaattagccgggcatggtggcgtgtgcctgtaatcacagatactagcggggctgaggcaggaggatcgcttgtacccgggaggcggaggttgtggtgagccgagatcatgccactgcactccagcctgggcaacagagcgagactccgtctcaaaaaaaaaaaaaaaaaaaaaagttgtcactggagcccttgggaatactgggagatggtctggatgacctgttggattcatcccatccattcgaaatctgtcctgtccccgtcccaacctcctaggcctctagaatccctaatttttctgtgccttgggggaaactgtatagggaatggaaagaatataggtagtggttaagagttaaggttctggggccaaataacctggatttatttgaaccttgacttgtggagttactgctggtgaactttcttacttctctctggaaataataacagaatctagctcatggtagtgtgaggcttaaatgaaatatatataaaatgcttagatgacatgataccaatgaaagtatagtaagtattattaagagaattccattcctctgtgttcctagaagatggcctctcctcccagacctggggataaccccaacagcatccccgccacacttccctcaggaacagccctccacctctgccctgaatgtcttttctttccctcctcctccttgcccatccctcctgcttgtactataatctcactgtattctgtccccagccttggagctggtgaaggaagccatcgacaaggctggctacacggaaaagatcgttattggcatggatgttgctgcctcagagttttatcgtgatggcaaatatgacttggacttcaagtctcccactgatccttcccgatacatcactggggaccagctgggggcactctaccaggactttgtcagggactatcctggtgagaggaagtggtgtgagggggaggtctgggggcaggcagggacgtgtcccagcaactctggaccttatggggtgctgactcaggcaccaggtgggggtgtcctaagaagaacctgagaaccagggagagggtgcaggagccacctgcaaagactgggctttgtatgtagtgtaaaaatgcaggtacccgtgaccaatctgttctgtctcagatcctgattaaagtcatgggttctgaaaactactggggtcatggggaaggctctggaaggaaccagggatgatatgagtgtgactggatctagcagagaactagaacatttcagtatctttgattgatgaaattgtggatgctgaatggagctgggactgatgtgtgagtagaaagaaggctgagggggactgaattagcttctgcaagtctgcccagggcctttatctcaggatggaggcagttggtcgccatcttcctgacacagagcgaaagaaaatcaacataattgcagaattaaggatttggattagcaatgaggaagggcttgctggcagtgagaacaggaaaatgcaaagctaggttgtgaacccttgttactggaagattttttttggggggggggtggggttgttttttttgttttgttttttttttttgagacagagtttgactcttcttgcccaggctggagtgcaatggcgccatctcggctcaccacaacctccacctcccggattcaagcgattcttctgcctcagcctcccgaatagctgggattacaggcatgtgccaccatgcctggctaattttgtatttttagtagagacaggggtttctccatgttggtcaggctggtctccaactcctgacctcaggtaatctatccaccttggtctcccaaagtgctgggattacaggcgtgagccaccacgcctggctggtttgcttttaattaactttttttttttttttttttttttgtagagacagggtttagccatgttgctcatggctggtctcaaactactgggctcaagtgatctgcatgcctcggcctcccaaagtgctgggattacaggcatgagccactgtgcccagcctatggaagtggcgtgagatctctgctcactgcacgattctcttagcctcccaagtagctgggattacaggcgtgcaccaccatgcctggctaatttttgtatttttagtagagatggggttttactatgttagccagggaactcctatcctcaagtgatccgttcacctcagtatcccaaagtgctgggattacaggcatgagccactgtgcctggcctctccatgtaaggttttatgaaataagaatcaggagccaggcgtggtggctcatgcctgtaatcccattactttgggaagccgaggcaggaggactgcttgaatccaggagttcgagactggcctggcaatacagtgagacctcatctctacaaaaattttaaaaattagctgagtgtggtgccacacacctaaagtccctgctactcaggaggctgaggtggcaggatcacttgattggggaggtggaggttgcagtgagctgagattgtgccactgcactccagcctggatgacagaatgaggctctgtcaaaaaaaaaaaaaaagttaagaatcagttagggcaggcttacactggggggatttgtcttagcaaggatgagcaggtgtagttaaccaagggcctgtccatttcagggaataaaggggcatgttcctgcctgatgtagagacccagggaagatgaacacctcccccctccccaccatgctctctctgcagtggtctccattgaggacccatttgaccaggatgattgggctgcctggtccaagttcacagccaatgtagggatccagattgtgggtgatgacctgacagtgaccaacccaaaacgtattgagcgggcagtggaagaaaaggcctgcaactgtctgctgctcaaggtcaaccagatcggctcggtcactgaagccatccaagcgtgagtgacttctggccctctcctgtgtggtcctcgtttctataagactccttttgcaagtgctccagcctaattctacccaggggtgccaaagagagcggggaacctggaatcatcctcacagttctctcacctctgcccctccacccctgattctctgctcccctcccagatagctttcccctagatgtttcctgacatagaccaaggttggggctgggaagagagtgcccagtgtgagagctggagaatcagtgctgtgtgtggatacaggtgcaagctggcccaggagaatggctggggggtcatggtgagtcatcgctcaggagagactgaggacacattcattgctgacctggtggtggggctgtgcacaggccaggtgagtgaggcagcctggtgagtgaagagaactctctgtgggattggtatttctagctcacccacctggtctctccttccaggtgtttgagggtgtcaggggagtttcaggagagcagaagtttcctttcaggggtgagagggcagtcactgagctgcaaatcctttgaaatgtttcagatcaagactggtgccccgtgccgttctgaacgtctggctaaatacaaccagctcatgaggtgagggtccctggggtgggagcccctggcccagatggctaaaggccccatttgcctgccagaccatctgtagcaccaagggcctggataacagtccatttcctggataacagtccaacagataatattggtttttgcttcctgggtttattgatggcctgattgacaaatcccagagatcacatgggaaagccagggaatgctaagccttggggcaggacacaaaagcaggtggtgtgggggtggttggagtctgggggacccctagagagagaagcaggatcctcctgcatccctgaccacttcctttgtggttcatctctctcagaattgaggaagagctgggggatgaagctcgctttgccggacataacttccgtaatcccagtgtgctgtgattcctctgcttgcctggagacgtggaacctctgtctcatcctcctggaaccttgctgtcctgatctgtgatagttcaccccctgagatcccctgagccccagggtgcccagaacttccctgattgacctgctccgctgctccttggcttacctgacctcttgctgtctctgctcgccctcctttctgtgccctactcattggggttccgcactttccacttcttcctttctctttctctcttccctcagaaactagaaatgtgaatgaggattattataaaagggggtccgtggaagaatgatcagcatctgtgatgggagcgtcagggttggtgtgctgaggtgttagagagggaccatgtgtcacttgtgctttgctcttgtcccacgtgtcttccactttgcatatgagccgtgaactgtgcatagtgctgggatggaggggagtgttgggcatgtgatcacgcctggctaataaggctttagtgtatttatttatttatttattttatttgtttttcattcatcccattaatcatttccccataactcaatggcctaaaactggcctgacttgggggaacgatgtgtctgtatttcatgtggctgtagatcccaagatgactggggtgggaggtcttgctagaatgggaagggtcatagaaagggccttgacatcagttcctttgtgtgtactcactgaagcctgcgttggtccagagcggaggctgtgtgcctgggggagttttcctctatacatctctccccaaccctaggttccctgttcttcctccagctgcaccagagcaacctctcactccccatgccacgttccacagttgccaccacctctgtggcattgaaatgagcacctccattaaagtctgaatcagtgcactgttgtgtctaaggagtcttactctagtccctatgaggggagagaagatggagcacctggaagctggtgaaactggatagcagagctgggggggcacaaaaagaggaagacaaactgaacaaatatggccgagatgatggcactgcctaccccattctggctaggtggggtgcatgtggcccctgctttcttagcagaaggcttggctcccagacgcaggtgaattaaggggttcaagagcccctaaaagcataaaatattttgtgtgtgtgtgtgtgtgcacgcgcattttgggggaaagggggtctaaggtgttttcatatccaaagggcttgtggactggagcagctcctgtactgggcctctgccaacaaaaccctggctggttctcgaatggaacaggacttcatggccatcacccactgcaagatggggaaatgggaaggaagaatggttccgggggtagtatacggaaggacctaaggaaacagagtcctcaataaactgaagattcaggaacaaaagtgcttaacagaaccctggctgggtcagactaacagtaggtttccaatatgtggctagagacgtactactccttagctataactcgttaactcttatggggcctcagcgttgagatgctcattctaggtacccccgagggggacaaatcccttcctagtggctcggatgcaaggttgcgtcccacagatagggtttgcacatgggagatctaaccactagagggagtcagagttttgcaggacgccatactggacgccaagtgggaggaacttcaaggctgtcccctgcgggcctcccgctctgcttctgcgaaggtctggtcctggctccctctgccatcctgcccagctccaaggctaaaataggttctagttctgtatgggtagggcccatttcttttcttgccctccttcccgggtccctgacacctcagccaytttcagttcaaagagcctcatgccccctttccatttctgtgccttttagtttcagtgtgggcatctcatctttcccttttctcctggcgaccctttatgcctcccttggggtttcctgtactttcctctgtgcctctcagttttctctggggtccctgatacccatcttaccttagtaactcccagactgaccaggactatcctagtttgagcctagttcctagcctctgtcctttctttcatccctcctcaccaggtcgccttctctgacagtctggccccccaacccccaaagtatcggggttggattgggttacagctagctctgcctgggcctcccaggcccttctctccactttccctttgtgccgttgcctggagaccaatgggttgtggggggctgagccagagagggagctggggtgagggatggctggggctgtgtgtgtgcgtgtgcgtgtgtgtgtgtgtgtgtgtgtgtgtgtgagagagagagagagagatgtcccctgcagctggactataagcctggccctcaggtaggggaggaatgggagagggtagacaatggtttcttttgtgactctcaccatcccctatccccacatatgcctaaatttttcttttagtatccattgtagmccattccttagtgattaaaaaacaagggagaagagctcagcctggaagggatttggaaagggcttgagccaaggcccagtgggagactgaactgagtggtacagaaagagaggaaatgccatggggagagagggtgagagggaaagggggagccctggaacaaagtcaggggtggggaggagcagcagctaccctagagcaagaggaagggagtcggggtgcacagggagacagggagctggcctggtctcagggaggccctgggaggaaggtgtgcttggagtggtaaagtgagtgccaaccaattcaagggacttcagagtgatgactcattcccaggccaaggaagtgttcctgttcctgcgcccagttccccagtgctctggaatcttgtttagagcttttgagtattcccagaactttgttgaatctggcccaaggaattgtgagacaaaaatctactgagctgctccagagctaacctccttycttccctgaaggcaggtgggatcttgccaattcagggcccacccttagcctccagcaagactggccccacaagtacccgacccccaccccaaatctggagctctactgagggctcctaatccacactccagctccagctcttccggcttgccagcctgcctccctcccattctctggccttcccaatttctgctgccaaaaatcaccctgtgtcctttgtcctgggagatgttgccgcttggtggagggccaggagggagcccaggagaaggaactggtggtgggctggcggaggtgctggcttcacggccrggagcagactgactgccagaggctacctggagagcaggggagggagaggaagggttgggaggagcctgcagtctgtggtggggactgtctccaccttagaacaagtgggattgagcaacaaggatacccagggatttgggtccacattaagcccagtcttcacccgactgcttccctgtgacccaggggatctttagtgatgactttcaacagatttgagaaggaaaatggagatgccactagatggaaggcctgaggatggtgtctcactcctccaagctgtatcccttacctatctacccatgagcttgccagcaacctccccccgctcccacatctgtcatttcctttaactgccctcgtttcccatctccattttttctttttttttttgagacggcgtctcgctctgtctcccaggctggagtgcagtggcgcgatctctgcttgctgaaacctttgcctcccaggttcaaggattctcctgcctcagcctctgagtagctgggattacaggcatgcgccaccacacccggctaatttttgtatttttagtagagacggggtttcgccatgttggccaggctggtcttgaactcctgacaagtgacccacccgactcagcctccgaaagtgctgagattacaggcgtgagcccccgcaccggccccatctccattttcttttcccatccatgatctttcctcttccatactgccgccagccataggccttgttcagcttacatttccttccaatcttcttatccccctcttccccattctgcccgcccaagtaaaccctcctcggctctactgggagcccccacccccaggatccagccagcccggtgtctcccacccttctttcccatccagagccctcctttctcacccagaacctattttccctagaattggcacctgggcccacctcgttcatcccttcttaaggttcctcacgcgttccctcctctctctcctcactgacgtttcctctggacttctctctctccagcattccttcatccccccacccccaattcttatatttatgactcttttgtcaacactaatcacccccaaaagctttactttttccagaagccccatctttctatatatgtcatcttttcaatttttctctctccttatgaccccaaacttccatcccattctctctgataatagcccccaaacccgtctggctccatctctgccacagatccctcaccccaagcttctctcacttctcaccaggcacccacaaagcccccaggcagctccatctttccaatccaatcccattatcccaatctctaccccaggatcccccaaactcctcccacttcacctctgccacagacccgctcgcccccaaacttcagcctcccctcatctgccctcaccacccacagcccctcctacctagccctctcccgcgccgggcccgcgggctccccacattccgccacggctagccctccccgcgccccggccccctcggcctcggcctcggccaactcgcgctgcgcctccccctctccggctccccctctctcccccctcgcggcttgcctcgcgctccctccctcgcgtctccctcctggcccctctctcctccgttcctccgcgctccctccttctccctcttcctcccttctcccatccccctctcccaggctccctcccttcgccgtccgctttcctgtgcgagtcgccggacgcaccgcccagcccgtccgcagccccgcgccgggtcggggcctcgggccgggccatttcggagggaccgcggcttcggggaggggctaggaggggggagagggagccgactgccggggaaggggcgggggccgcgggcgaggcggccgaggggcccgggatcgcgcgggtgcgggctgcgctaggcgggcgcgggcggcggcgggtcggaaccgcgccgagggccgggcgggccgcggggccgggcggcgcggcgggggcgggcggcgcggcccggggcattccgggcggccagggggaggcggcgagcccggggaggtggggagcagagcggggatcggggtttgctccgggggccggcgggcgattggggccaggcggggaaaaggggggatgggggccgccctccgggggggtcggggccgccgccgccgtcgtcgcggcggcgactgaggccgagaagaggagaggggggcgggggagctgccgccgccgccccccagaggcgccggagcccggaatcccgctcggagccagccagccgtcccgagctaccagcaggtaaggtctgcggccgcctgggccccgggcccgcggggttctgtcccgcccgggctccggcctgcggctccccacccccacccctcccagttccccctcctgccgccgccgcctccatttgttattttcccaatcccgtccccccactgcgggctctgcctggcctgagggccgggggctcagggggtggggcccgccgaggagagtcgggggccagggtttcgggaggatcgggaaggtggggaaggagggagggtctccggaggaggcctgtggggccagagggtatccgggacccgcagactcaaaagaggaggaacatcgaggccggggttggcggaggaaaacgggggatgctgtgagtggggttccgggcgaaggcagaatggataggagagatggcagcgaggtggggcatgaagcctccaggaaaaagctccaaaggaccagaacacgggttccggagcctggggttgggggctttaggaatagacgggaagtgggaaacgggaaaggggtgtggtaggtggaaagagggattgtggctgatgaacctgggggagacggaggcttgggcaaagagaggtccatttttgagaagagccggaggttttccagcgtggaagagggaaggccatgtctttgtgacggttttcattcccctactgcaggtcacctctgaccctgttttccctatcccagacatagttatttcttggagagggcactggggcccagtagtgtgggttatcccaaaactagtgaggaggaaaacaggaacacagaagggggagttgggaagaaaggggttctgggaggatggaaatggagaattgagcaaccttacaggcactccaggcaagttgcgacctccaccctccaccctccaatttccggagcgtccgctgcccctggagctgtgatctatatagggaggccttagttactgctttgagctcaaagatctccctttgtgcatgggcttattttgactagggtaggtaccttcaagctcccttacctgaggtgctataggagggtaggagttgctttggcaactggggtagggggtagctgccagatggacacctgggatggtctcttgaggggcaccttttgccactgtgttgctatggtagtgatccagtgggatgtcagattggttgggggggcttcgaatgtttattggacctcagcctgtggctgtccttgggactctrggctgggttttggaggttgtttctggatctgttggtggttgggagtttccccacggtgtgcaccctttcatgttgaagtctgttggaacaggtagatacgttccttgcagatcataggtgtttctccaagtctctccacctgggcatgatgggaggatgaaaacgcttctgttcaggttacaccatcttttggcagttggttctgacctctacctcccttattatgttattttttgtagagttgtctttttgcttctttgcactttctttcattttctaaaacttgaattcctctttgagcctcccttcttgagtaacccttttcctctttccctcaactaacctttggccttcttccctgaccttgtagaaatggctgggctcccaggcccatcccaggtgagggtggcccaggacagagggctgtgaaacagcttcatgcaggggaaatactatagaacaggagccaggagacctgtgtctagacctggctgtgcctctgtgaccttgggcaagtcacttctctttgagcctgggcttcattgttaagatgaaggggctatagatgagatgatctctgaggcctctctgaaggtcccggattctcagaaggcttaggccagtgcatcgttatctgctggtctgggctgcattgttatctaggagtcactttggactggtttgttagtctggcaggtccagaatgatgttgggggctgggccaatgatcctgaaatttagcctgcgagcccctcccagagagcttgtgactccactgtattccttctgacatcccatatttctctcttaatttcttttcctgttcttacttaggggctctttttctagttctcactttcctcccaacccagtctggtcttaatcattttctttttaaagtaaggtaatggcagtgcgcagtggctcacgcctgtaatcccagcactttgggaggctgaggcgggcggatcacgaggtcaggcgatygagaccatcctggctaacacggtgaaaccccgtctctagtaaaaatacaaaaaaattagccgggcgtggtggcgggcgcctgtagtcccagctactcaggaggctgaggcaggagaatggcgtgaacccgggaggtggagcttgcagtgagcckagccgagatcgcggcacggcactccagcctgggtgacagagtgagactccgtctcaataaataaataaataaataaataaataaaataaagcaaggtaatgaaggtgaatgtgcttagtatgtggccagatacagagtaggtgctctgtaatattagttacagtgattgcctgctaggagtgtaggctggtgctaaaacatgacccaggtctagaaagacacacaatccacccctaactcctttcctcgtctgccactccttatccccaggattacttgttcttttatgactgcttttctccttcaaagcttctcattgctagtttttatcagatttcaggtgattaaaaaagaagggcatactatgattgctgtgttcctcaggtacattcctgtgtttctctgaccttttggatcccctaacctaactgacttggtgaacaggttctgtgatggggaagggagatggacacccttctctaggagggctggcaaaaatacaccaatcacaaatagtcatctttgttgtgctttttgtttaagattgttttcctcttttgctatggtgggtgttgttcttcggatttttttttttttttggttgatagtattttaaaaccagtctacataacaactaaaaaatgtgggaaaatagctgtagttgaaaaaaaaaaaaaaaaaaaaaaggccgggcatggtggctcacgcctgtaatcccaacactttaggaggctgaggcaggtggatcatctgaggtcaggagttcgagaccagcctggtcaacatggtgaaactccgtctctactaaaaatacaaaaattagccaggtgtggtggtgtgcgcttgtaatcccagctacttgggaggctgaggcaggagaatcgcttgaacctgggaggcggaggtggcagtgagctgagatcatgccatagcacctccagcctggggaacaagagcaaagatccatctcaaaaaaaaaaaaaaggaaaaaaaaagaaaactagttggccgggcacagtggctcacgcctgtaatcccagcacttgggaaggccgaggcaggcagatcacctgaggtcagtagttcgagaccaccctgactaacatggtgaaaccctgtctctactaaaaatacaaaaaattagccgggtgtggtggtgcatgcctgtaatcccagctattcaggaggctgaggcaggagaatcgcttgaacctgggaggcagaggttgcagtgagtgagatcacgccactgcactccagcctgggcaacaagagtgaaactctgtctcaaaaaaaaaaaaaaaaaaaaaaaaaaagacaagtctactgggcagagcatcagttgaaagttcagaagataggctctgtcccagcaattttgtgattctaagtaaattgtgaagtttcctggaaaggttagactcaccccttactgcctgcatcagtatggttccgtggaggtgagtgagaattactgtgtttcttgggaaaaaatacactacagaatatggacatgccgtttacctagcaggcctccaactcagaatagaatacatgggtaagcttagtctgttcccactggagctagcagcacttaattcaggaagaaagacctactgatgttagtgggtttaaaggtcaatcacaagaagagcgcacacacatcagtggaaaggaagaaaacagtaagaaaataccatttttgctctcaaaagatcttacaatcagtaatttggagggacttgacacttagcaagaaatacaaacaagtgcaaatgaatacagctggctatagggatttggataaagatagatacctgctgatagacagatacggatggattggctgtgagaaacygtgtaacccagtctacaccaagtaggaggataggcttaaaaactggtacatctgtgttgtttgctcacggatattttgagtctttaatcattcatgtgaaaaccctgacttttcctctagccttagggagctcaagtactagagaatgggtcctttatggggctctcaaaaatgaagttctacaatttggggctacctaggtttagtcttgggattggtagggctgtgttcctttgtattatagaatgggacattcttcttctacctactctgatgtgagaaaagattcttttcatatctctgtgactgatctaggccttctgagaattctccccagcaacttctgaggagaatacagcaaagtatagaagaaagagcatgggctttgaagtcaccgacatgggtttgattctggctctgtcactggttcctcactgtgtgaggttgggctagtcacaatcacaatctttgagcctcagttccctcacctatataatgagggtaataatgcttaccattcagggttggttgtaaatattaaatgaaatcatgtatgtgaagggcttgatataaagaaggtattcaataaattcatacttcaatgtyatttcttttttctttttttttttttgagacagagtcttactctgtcacccaggctggagtgcagtggcatgatctcggctcactgcaacctctgcctcccaggttcaagtgatttgcttgcctcagcctcctgagtagctgggattacaggcacgtgccaccacgcctggctgggtttcaccatgttggctaggctggtcttgaactcctgaccttgtggtccatccacctaggcctcccaaagtgctggaattatagrcatgagccaccatgccccgctccatttctttatgttcctttgtaaggctccgtggaatgtgtgtgttcacaaatatcctttagggatcatgaagggtaaactgtgtgatctcctggattggggcttgtaggtacatccgaattttctgccctctacagagatgaaagagattatacttcgagcagaatctgcctcccttttagatagctaaggtagcccatggggcatgccagcaatgtcttgtggtatctgtacctcttggcccaaaggcttagggttgggccgcttgctcagttctctgacaagcagaatagtattcctttgtgactctgttctccaagttggagactctgatggtttccttctaacaggtttcattgaaaacagatcctgcaaaagttccaggtgcccacactggaaacttggagatcctgcttcccagaccacagctgtggggaacttggggtggagcagagaagtttctgtattcagctgcccaggcagaggagaatggggtctccacagcctgaagaatgaagacacgacagaataaagactcggtgagttaaaatgagagacatgaaagatgaggggcggggcaggcaagctaggaggaagggtctagagaagaagaacaaataatgtgcaccataaagttaggtgcaatgtaaagaacagtgttacctacctccttcctcctcctgtagatgtcaatgaggagtggacggaagaaagaggcccctgggccccgggaagaactgagatcgaggggccgggcctcccctggaggggtcagcacgtccagcagtgatggcaaagctgagaagtccaggcagacagccaaggtattctgtyctcaggtcctcccacaggatgcccaaggcactggggctgagggtgtgtgtgtgttgtgggggaacttcctgtttggcagagggtaacggtggagctcgggaggtagggaaaagacaggaattttctctttctctctaacagaaggcccgagtagaggaagcctccaccccaaaggtcaacaagcagggtcggagtgaggagatctcagagagtgaaagtgaggagaccaatgcaccaaaaaagaccaaaactgaggtgggaaacccttgtcgccatcctgacccatcttgtgaccattcttttctcagacttgcttatgctcactattcttagctggatctctcctgggacataagagaaaggccagatcatagtgcttatgagagcagttctgtctataatatgccagagagattcttagagctttgacagaccaccagatgaccaggcagggccaaaggggaccagaagagttgggggattctagtctctgggtgagaagtcttagtcggaggaacaaataaatcttaaggaaaatgcagaagtggtctttcttttttattgtttttktttgtttgtttgtttttgagacagtttcgctctgtcacccaggctggagtacagtggcacaatctcagctcattgcaacctccgcctcctgggttcaaacaattgtgcctcagcctcccgagtggctgggattataggcatgagccaccatgcccggctaatttttgtatttttggtagagacagtgtttcaccatgttggccaggctggtttggaactcctggcatcaagtgatccgcccgcttcagcttcccaaagtgctgggattacaggtgtaagcctctgtgcccggccagaagtggtataaaaaccaagggcttgggggatggaggatggttaaagtggtggttatgagatggtggaagacagggagttggagtcagctgtgggtagagacaaggtgcttgagatggatccttgaggaaggaatagggttttacaggcgggaaacaagactggctgctagggagcagccaagaatgtgaggaaagtgagaaatccccagatggtaagaggtgggcttgagcaagagtactcaccacatcacagtacaacagtgtgctgtgaggggaaatgattttatgcaagagaggccccaaatctcagggaagcaggaaaggaaaagagaaaaaatgagtcttcccttttctacagcaggaactccctcggccacagtctccctccgatctggatagcttggacgggcggagccttaatgatgatggcagcagcgaccctagggatatcgaccaggacaaccgaagcacgtcccccagtatctacagccctggaagtgtggagaatgactctgactcatcttctggcctgtcccagggcccagcccgcccctaccacccacctccactctttcctccttcccctcaaccgccagacagcacccctcgacagccagaggctagctttgaaccccatccttctgtgacacccactggatatcatgctcccatggagccccccacatctcgaatgttccaggctcctcctggggcccctccccctcacccacagctctatcctgggggcactggtggagttttgtctggacccccaatgggtcccaaggggggaggggctgcctcatcagtggggggccctaatgggggtaagcagcaccccccacccactactcccatttcagtatcaagctctggggctagtggtgctcccccaacaaagccgcctaccactccagtgggtggtgggaacctaccttctgctccaccaccagccaacttcccccatgtgacaccgaacctgcctcccccacctgccctgagacccctcaacaatgcatcagcctctccccctggcctgggggcccaaccactacctggtcatctgccctctccccacgccatgggacagggtatsggtggacttcctcctggcccagagaagggcccaactctggctccttcaccccactctctgcctcctgcttcctcttctgctccagcgccccccatgaggtttccttattcatcctctagtagtagctctgcagcagcctcctcttccagttcttcctcctcttcctctgcctcccccttcccagcttcccaggcattgcccagctacccccactctttccctcccccaacaagcctctctgtctccaatcagccccccaagtatactcagccttctctcccatcccaggctgtgtggagccagggtcccccaccacctcctccctatggccgcctcttagccaacagcaatgcccatccaggccccttccctccctctactggggcccagtccaccgcccacccaccagtctcaacacatcaccatcaccaccagcaacagcaacagcagcagcagcagcagcagcagcagcagcagcagcagcagcagcatcacggaaactctgggccccctcctcctggagcatttccccacccactggagggcggtagctcccaccacgcacacccttacgccatgtctccctccctggggtctctgaggccctacccaccagggccagcacacctgcccccacctcacagccaggtgtcctacagccaagcaggccccaatggccctccagtctcttcctcttccaactcttcctcttccacttctcaagggtcctacccatgttcacacccctccccttcccagggccctcaaggggcgccctaccctttcccaccggtgcctacggtcaccacctcttcggctaccctttccacggtcattgccaccgtggcttcctcgccagcaggctacaaaacggcctccccacctgggcccccaccgtacggaaagagagccccgtccccgggggcctacaagacagccaccccacccggatacaaacccgggtcgcctccctccttccgaacggggaccccaccgggctatcgaggaacctcgccacctgcaggcccagggaccttcaagccgggctcgcccaccgtgggacctgggcccctgccacctgcggggccctcaggcctgccatcgctgccaccaccacctgcggcccctgcctcagggccgcccctgagcgccacgcagatcaaacaggagccggctgaggagtatgagacccccgagagcccggtgcccccagcccgcagcccctcgccccctcccaaggtggtagatgtacccagccatgccagtcagtctgccaggtgagcggccaggtggggcgsaggtgggcctggaaaggggacgacgacaaggcggcgacgagagagggagtagcagggaggggccttgcgctggtgtagtgttttagaaaagcacgcccctctcctccgtccaggcctagtggccagtgaggcccgcagcagctcacagcctgcaggggtggttttgaggcgggggctacaagcactcgccggggccgcggcgctgcgggctccatcgggcagctcgcaccgcctgagcgcccgctgcttccacgcccggcaggttcaacaaacacctggatcgcggcttcaactcgtgcgcgcgcagcgacctgtacttcgtgccactggagggctccaagctggccaagaagcgggccgacctggtggagaaggtgcggcgcgaggccgagcagcgmgcgcgcgaagaaaaggagcgcgagcgcgagcgggaacgcgagaaagagcgcgagcgcgagaaggagcgcgagcttgaacgcagcgtggtgagtgcgtcactgcctgcgccaccgccttctttccctctttccttccttccctctgcgctgcgctgcgctacgctacgctgcggggctgtggctgggtgggcgggcgagtcacgtcgccacctgtcggaggggaggtaccactgcagcccaggaaatggagcccaaaaggttttcagcgagagccatctgcattcctgggttgggaaaaggcatgctcagatgggactacctgtggatcccaagaagggcaaatattcgggagcgggggccgcagttaagttccaggtgggcagagtttcaatgagttgaggcattttggcattcggctgtcgaaacaaatgggcagcttaaaaccagccacctcttttcataactgccgctttgactccacttttccctgtatcccacagaagttggctcaggagggccgtgctccggtggaatgcccatctctgggcccagtgccccatcgccctccatttgaaccgggcagtgcggtggctacagtgcccccctacctgggtcctgacactccagccttgcgcactctcagtgaatatgcccggcctcatgtcatgtctcctggcaatcgcaaccatccattctacgtgcccctgggggcagtggacccggggctcctgggttacaatgtcccggccctgtacagcagtgatccagctgcccgggagagggaacgggaagcccgtgaacgagacctccgtgaccgcctcaagcctggctttgaggtgaagcctagtgagctggaacccctacatggggtccctgggccgggcttggatccctttccccgacatgggggcctggctctgcagcctggcccacctggcctgcaccctttcccctttcatccgagcctggggcccctggagcgagaacgtctagcgctggcagctgggccagccctgcggcctgacatgtcctatgctgagcggctggcagctgagaggcagcacgcagaaagggtggcggccctgggcaatgacccactggcccggctgcagatgctcaatgtgactccccatcaccaccagcactcccacatccactcgcacctgcacctgcaccagcaagatgctatccatgcaggtgagacccctccttccttgccctggccctttggggccaccttccccctatcatgactgggctctttcattcctatggccaagactttcctcccctggcctggcatgaacctttcctgagattgctgccctgaactttgcctccctgacgttctctcagccttgtcttctcatggccttccctggccacaaagcctgtatgccccacagcccagttctctccatagtctagtatccttcccatgacagaggcccacacgggagcttttgaaggacacttttctattctcacagccccattctcccaagcccttcacaaacctgtcttcttatttatttttttgagacatggtctggctctgccacccaggctggagtgtagtggcgcaatcacagctcactgcagcctcgacttcccggtctcaagtgatcctcctacctcagcctctggagtagctgggattacaggcgtgtgtcaccatacctggctactttttgtatttttggtagagacggggtttcgccatgttggccatggctggtctcaaattcctgagctcaaagcgatccacccacctcggcctcccaaagtcctgagattacaggcgtgagccaccgtgcccaacccacaaacctatcttctgatttctctggattcaactcattttttgccattttctcctcttctccctctgcgaggtctttcatgtttttccccatctctagatctgtaactttctagaaagggccctgtagctttgggtttgggtgtcataggcgataatgagctttacttactatcctttcaccattttttggtttttgagacggagtctcgccctgtcaccaagctggagtgcagtggcgcgatctcggcttactgcaacctccgcctctggggttcaagtgattcttctgcctcagcaggcactgcctgcccgagtagctgggactgcaggcgtgtgccaccaagtacagctaatttttgtatttttagtagacacggggtttcaccatgttggccaggatagtcttgatctcttgaccttgtgatccacccgccttggcctcccaaagtgctggaattacaagcgtgagccaccgcacccggcttcctttttttcttttgcccagactggagtgcagtggcgcgatctcggctcactgcagcttccacctcccaggttcaagcgattctcctgcctcagcctcccgaggagctgggactataggcgtgtgccaccctgcctggctaatttttttgtattttttgtagaaacagggtttcaccatcttggccaggctggtcttgaactcctcacctcaggtgagctgcctgcctcagcctcccaaagtgctgagattataggcttgagccactgtgcccggcctcttcttgtcttattttctaaacttctatcatcttccaccttcttcacgcagtctacctctctctgtccttcccctcagacccttctgatgactgtaatctcctgtcctgtgtcatccatatgtccctcctccagtagggctcagcctgtccacccctgccaggcctctagttcttccactctgcctttgttccactttggacctccttgtgtttgtctgactcagttcccaggcttggatcccttcacccaaatgcatggtttgcccyaaacctgccttctggtgacaccttcctcttctctgccctccagcctctgcctcggtgcaccctctcattgaccccctggcctcagggtctcaccttacccggatcccctacccagctggaactctccctaaccccctgcttcctcaccctctgcacgagaacgaagttcttcgtcaccagctctttggtaaggatggaagttggggtaggcagctccaatgagaaaagggcagaaaggaggtatttgggtggggggatgggcctagttgggcttggggagggatgaggaggtgcctagaggagctgggcatgggaataggagagctggagctctgcccaagagaagcacgagttttagtgtcagcctaagaggttcgaatcccaattccaccctaccactggcaacttacagaactgggtgtgttacctcactttttagttcattacctttgtatgtaaaggagctggctatcccctggtccagagcaggtacttgttatccgttggtcatatgccccttgcccttcctgctcacagctgccccttaccgggacctgccggcctccctttctgccccgatgtcagcagctcatcagctgcaggccatgcacgcacagtcagctgagctgcagcgcttggcgctggaacagcagcagtggctgcatgcccatcacccgctgcacagtgtgccgctgcctgcccaggaggactactacaggtaccctagggtgccccagcccaggggacatgggctcagcgagcctgggaggagctgtgggcatggtacggctgggcaccgtgctcctgggggagggaacccctcctctcccaaccccttcggtaagagggggcaaggtcagagttggtctcaagtctcttacctctctgctatgcactgccccttccctagtcacctgaagaaggaaagcgacaagccactgtagaacctgcgatcaagagagcaccatggctcctacattggaccttggagcacccccaccctccccccaccgtgcccttggcctgccacccagagccaagagggtgctgctcagttgcagggcctccgcagctggacagagagtgggggagggagggacagacagaaggccaaggcccgatgtggtgtgcagaggtggggaggtggcgaggatggggacagaaagcgcacagaatcttggaccaggtctctcttccttgtcccccctgcttttctcctcccccatgcccaacccctgtggccgccgcccctcccctgccccgttggtgtgattatttcatctgttagatgtggctgttttgcgtagcatcgtgtgccacccctgcccctccccgatccctgtgtgcgcgccccctctgcaatgtatgccccttgccccttccccacamtaataatttatatatataaatatctatatgacgctcttaaaaaaacatcccaaccaaaaccaaccaaacaaaaacatcctcacaactccccaggaacatggctgtgactattctttgcgggatatgggggtgaggctgggtctcagtgcagcggtgcttagagagaactgcagccagggcctggcagggaagcgggaagagaccagaccttcttaaggaacggggtgtgggggctgggaagaattggagaggggatccctgaagagcccagagccttgactcagctggaggcggtaccatgggtgctggtgccccctcctgccccaaggctgggcaggaccgctgcgcgccagtggaggcctcggtctgggctctgtggcttatgcctgtgagacgcgggtggattgcttgagcccaggagttggaaaccagcttgggcaacatagagaaaccccatcttaagacaaaatcagctgggggttgtggtgcacttgtggtcccagctactcaggaggctgaggtgggaggatcacttgggggtcgaggctacagtgagtcatgatcgcaccactgcactctagcctgggtgacagagcaaggccctatctcaaaacaaacaaacaaaagacaccccaaccaaccaaacactagaggcctgggacaggcccacctctgacgtggtcagttctaggaatctattcagacgggtctcactgctaggagccaccagagtcctccggaacaagggcttcagagtcctgaaacctttccgtggaatactttaagaaacggttatgaggccaggcgcgacggctcacgctggtaatcccaggactttgggaggccgaggcgggcggatcacgaggtcaggagttccagaccagcttggccaacatggcaaaaccctgtctctactaaaaacaaaacattagctgggcatggtggcgcgcgcctgtcgtcccagcgacttgggaggttgaggcaggagaatcgcttgaacccgggaggtggaggttatggtgagccaagatcccccccagctgcactccagcttggcgacagagcaagactccgtctcaaaaacaaaaaacaaagccggttatgaagcgggggtggggtgggctagttttaataggtccaggcgattagtacctggcatccttaaccacctacagtttgagaagggagtgggtgataaaagcctggaagggaagggaaatcgggccgggcattaggctccatcgctcatcaatagacaaggcctttaggaaactgcgacaacggcttttgctctgggcctttactgccgaatccaggtctccgggcttaacaacaacgaaggggctgtgactggctgctttctcaaccaatcagcaccgaactcatttgcatgggctgagaacaaatgttcgcgaactctagaaatgaatgacttaagtaagttccttagaatattatttttcctactgaaagttaccacatgcgtcgttgtttatacagtaataggaacaagaaaaaagtcacctaagctcaccctcatcaattgtggagttcctttatatcccatcttctctccaaacacatacgcagcagtgttacagctcttttagaatttgtctagtaggctttctggctttttaccggaaagcccctcttatgatgtttgttgccaatgatagattgttttcactgtgcaaaaattatgggtagttttggtggtcttgatgcagttgtaagcttggggtatgaaggtttgggccacgcctgggcgcttccggctgcgccggatgctgtttcctttccgctcccaggggcgttgggaacggttgtaggacgtggctctttattcgtgagttttccatttacctccgctgaacctagagcttcagacgccctatggcgtccgcctcgacccaaccggcggccttgagcgctgagcaagcaaagggtgagaatcgtcctagtcaaggcatgggctgctggcctggggtagtcaaggcatgggctgctggtctggggaggatgcgggcggaggatgtggggcgacaaacctggctacgtccgccgggaaaatggggtaggggacgccgggtaccgtccttctaagtggggcgcttgcccccaagacttgggatcttattgggttacctacagcctcaatccactaattccttgcgctctccgctgggcccgctgtctgttctccgacgcctacccgggacgcctccctgggatgcttctggcgcgcagtggtcctcgcggaggtgatccaggcgttctccgccccggagaatgcagtgcgcatggacgaggctcgggataacgcctgcaacgacatgggtaagatgctgcaattcgtgctgcccgtggccacgcagatccagcaggaggttatcaaagcctatggcttcagctgcgacggggaaggtgggtcagacgcgggaaggcgggtcagacgcgggaaggcgggagttgggtcgggagagggcgccggatctgtgggcccatgagcggttgtcccctttctcgccacacggcggcagccacaatctgactaacattcttggcactcagagcccagggtctaccctgagcttgtgcgtccgagttgcgttttgtacagtagaggttctgtatcccttacccgaaatggttgggaccggaagtgtttcgggttttttcagatttcggaatatttacatatacatggatatcttgggggatgggacctaaatctgaacacgaaattgttttgtttcatatacacgcaccttatgcacatagcctgagggtaattttatataatagtctgaataattttgtgcatgagacaaagttttgactgcgttttgactacagtctcccccaccccccactatgaagtcaggtgtggaattttccattttcggcctcacactggcactcataatttcagattttggattttctaattaaggatggccaacctgtactgttaatcacattattattccattttgtgatgaggaagcaaactctaatggtgcagactctcgagtagcagagctggacttaaatgctgttgtgccaccttttagtgacatgtctgcatgacagcagtggctgcagtctctccagggtgtttcagctaatttttgtttggggggggttggtggttaaatttttggtgagatcctggtgttccccaaaggtgttgactgattcagctctgctgcctcatagccttcctgagttccagctacagacctggggtctcgtgttcattcttggggttccagtgactaaactgctaaaatggttcacctgagagcaagaagcacactgccttgggacattttcattcactgcatcccatctagttgtgcccagtgtagaccaaatgtcatcatccaaaccacacgggacagaggcctgcatgcgtcctgtttggcaaacagctgcccagccagtgggggagcagttcatgcttaaactaccaccccctccaggtgtcttaggcacgctggtccttaggagaagggttgaccttccactccctcttgcaggtgtccttaagtttgctcgcttggtcaagtcctacgaagcccaggatcctgagatcgccagcctgtcaggcaagctgaaggcgctgtttctgccgcccatgaccctgccaccccatgggcctgctgctggtggcagcgtggccgcctcctgagagttggccctcccttgtgccactgccaggggaggaaaggccttgatgttccagacaataataaatgcgcctgtgacttagccttggtgtcagtctcttgcggacctgacaacccccatctctccttccctgattccctctgcctttccaggccccatccccctgaacagctcctccctatggtcctggctgggcctaaccctgccccagggcctaaccctacctgaggctcctccccttcccccggggcaggttgagaggctggagtgggtccctcagcgccctgggtgggtgggcctgcacagggggtacctccttctctgaggaactgggctgttagggattttccttaggccctttggtttccgcctacggagaggtttcccccattggttgctcttcctcagccagggttacttcctggtctgttcccctacccaataccccgccgctctgtcagcttgagctccaggtggagctccaggtggctcctcctctcccgggggaaggcggccctggaccagcaggcgggcctgctgtactcccgctttggggctgcagggaagctggccgctgtgggcggtctcgggccagccccgccccacctgtccttttcctggagactattagtccagggtttgtccctgcagtgccattggcctggcaggcaggatcgaggaggaagtggctgattactgagcggttcttcctcacctggcttgggccactgtgcacagctgtgccgctggctcagccccgccccctgcggccctccgccgtggcttccccctccctacagagagatgctgtcccgtgggtaagtcccgggcaccatcggggtcccagtctcctgttagttttggagggagggagggctttgttgatgctcactccgacgtgtgtgaacgtgagtgcgatctgccgctgccctgcgcctgtttccggtccctatgaacttccccttcccgcaaggtgtgaggacccccggctcactcatgctcctctgccccctctttaacattttcccctggacaagtgtgtatctgttctctccattgcatttctacttccagcctctgggctcctgcttctgcctcctgcttaggacctgtccccctgggtagctcacaacacctcaaacatagcagtcagaggccacccgcgaaggccctcccacgtccagccaacttctccgcacttcccaacatcagactttggtcccatcttctttgtttcctttcacttccctttcccctgcatcattcattcaacaggtacgtgttgagcatctattatgcaccaggtgctgtttaagatgctggtaatactggagtgaacaagacagacatggtctctgctctcacggagcttacattccagtgggaggttacagaccgaacaaataacccaataaattggatcattgcagattctcagaagtattacgcagaaaatagacagccttggccgggtgtagtggttcacacctgtgatcccagcactgtgggaggctgaggcgagaggattgcttgagcccaggagtttgagaccagcctggccaatatagtgagaccctgtctctacaaaaaataagaaattagctgggtgtggtggcacacgtcctgtggttccagctatggagaggctaaggtgagaggcttgcttgagcctgggaggtcaaggctgcagtcagcgatgattgcaccactgcacaccagcctgggcgacagagtgagaccttgtctcaaaaaaaaaaaaaaaaaaagaaaatgaaccagcttcatatgctagcaagtgactgggtgtgcaggtgacattactagctggagggatcagggaggccttcccgaggaggtgacatttgagctgagacccggatgaggaggaagaggagctggccatgtgacgtagtgatcaagagtcaagcatctctgggcagaggagatggtgagcacaaagccctaatgtgggaacaaacaaaaaaaggacagtgtgcccgtggcagaggaccctagtggagcggaggcagggccacagcaggttagaccatgttggagctaggatgttgaaagtgaaaacctgacgagatgaggtggcgcacgtctgtgatcccagcactttgggaggccgaagggggaagattgcttgagctcaggagtttaaaaccagcctgggcaacatagagagaccccatctctattaaaaaaaaatactgggtatgatggcccaagcatgtggtagtcctagcagtttgggaggctgaggtgggaggatcacttgagcccaagagttcaagaccaccctgggcaacatagggagagacctcatctctactacgactacgactactattactactaataaatagctggatgtagtggcatgcacctgtggtct

SEQ ID NO: 97852 - DNA, 17932 bp, Homo sapiens
ctcccacatagctgggattacaggtgtgcaccaccatgcccagctaatttttttgtatttttagtagagacggggtctcaccatattggccaggctggtctcaaactcctgacctcgtgatccgcccaccttggcctcccaaggtgctgggattacaggcatgagccaccgtgcccagccccacctgcagttaatttaaaagtcaggccctgcttttccaaacctgcttctcctccacagtctactgactcagtgaatggcagcatcatccacttagctgcacaagccgcacaaggtggcatccccgagctccttctcccttaccttccacctctcaagtccagtccagcacaaaacgctgttgattttgcctcccaaatctccctggaacttgtcatctctgtctccatcgccctcctggcacatgctgcctccatcttgcctggactcctgcagtggtctcccagctgtcacccagatctgcctctgctcctctctgggttgttttccgccctgcaaccacagttatctttaaaacacacaaatctgaccctaatccttcatttcaaatccagcagtgacttttcattaatcttaaaatgaagaacaaaatccttctggccaaggttggcccccacatacctctccagcgtcctcccccacccgcttgctttcctctgtgggccactggccttctttcagattcacccaatgggccacagtacttcctgccacgtggccttcgtggcatgctgttccctcacctggaacaatgttccctgcagtctgtgccttattaactcctgcttgtccttcagcagtctttcctgacttccccaaccaggtcaaattccctactgataatctcagaggacatgaatctcttctttgtggcacttactacgtgtgtaattttacatatctttttatacctgcccctcccaccaaactataagttgcacaagggcaaaatcttggaacacagggctcaatattggttgaaagaaagaattgtagcaaatatctgatagactaacatagattctacgtagttacagaactagaactaggattaataagtgaaagttacaataatgatgataatatattactgagcacccactatataccaggtattgaaattacgacatattatatcttacttaatacaacaatatatgaagtagttaaaattactttgcacagagaagaaaattctgttaggttaagcagcttgcccaaagtagcagtcagtcaacagtaaagcctgtgggaagtgggtctgtgggctcctggctctctgttcctttttttttttttttttttttttgagacaaagtcttgctctgtcacccaggctggagttcagtggcactatctccgctcactgcaacctccgccttctgggttgaagcgattctcctgcctcagcctcctgagtagctgggattacaggcacctgccaccatgcccggctaatttttgtatttttagtagagactgggtttcaccatgttggccaggctggtcttgaactcctgatgtcttgatccaccctcctcggtctcccaaagtgctgggattacaggtgtgagccaccacgcctggccctggctctctgttctttctctccaggatgctgcctgagaggaggaggtcatgagctccctatcacaggaattttcttttttgaactaccatgcccactaacatgctggccaacacggtgaaaccctgtctgtactaaaaatacaaaaaaaaattagccaggcatggtggttcacgcctgtaatcccaactactcggaaggctgaggcacaagaatcgcttgaatctgggagacagagattgcagtgagccaagattgtgccactgcatttgacctgggtgacactgtaagactctgtcccctcaccccctccaaaagaggtgtgcctatttcaatttttttttttttttttttttttttttttttttttaatttgagacagactctcattttgttgcccagtctggagtgcaatggtgtgatctcagctcactgcaacctccacctccagggctcaaacaaccctcctgcctcagcctctcaagtagctgggcctacaggcatgcaccctcatgcccagctaatttttttattttttgtagagacagggtttcaccatgttgcccaggctggtctcaaacttcggggctcaagtgatctgcctggcttggcctcccttcaaagtgctgagattacaggcgtgagctactggacccggcctcaattttcagcaaaagtgtatgagtatgctcctataccctggtcaacattgaggttgtcaatccttaatttcttttttgctgaacttttatattttaattttatttatgtatttattttgagatagagtcttgctctgttgcccaggctggagtgcagtggtgtgatctcggcttactgcaacctcagcctactgggttcaagtgattctcctgcctcagcctcccaagtagctgggattacaggcgcccgccaccatgtctggctaatttttgtattttcagtagagacggggtttcacccgctcaggctagtctcgaacttctgacctcaagtgatccacccgcctcagcctcccaaagtgttgagattataggtgtgagccactgcctccggccgatttatttatttttatttttatttatttatttattttgagatggagtttcactcttgcccaggctggagtgcaatggtgtggtctcagctcactgcaacctctgcctcccgggttcaagtgattctcctgcctcagcctcccaagtagctgggattacaggcgcccgtcaccatgccagctaatttttgtgtttttagtagagacaaggtttctactaaaatgttgaccaggctagtctggaactcctgacctcaggtgatccacccaccttgacctcccaaagtgctggcattacaggtgtgagccatggcgcctggcctatatatttatttttaagagacagtctaattctgcggccaggctggagtgcagtggtgtaactgtagctcactacagccttgaactgctggactcaaccgatcttcctacctcagcctcctgagtagctaggacttcaggtgtgtgcataccgagctaatttctttttctcttttcttttcttttcttttttttttttttttttttgagacagggtctcactgtatagctcaggctggagtgcagtggcatgatcacagctcagtgtagccttgacctcctgggtccaaacaatcctcctgcctcagcctcctgagtagctgggaccacagaaccaggcctggctaattttttgaatttttttttttttttttttgagacaaagtctcgctcttgtcccccaggctggagtgcaatggtacgatctcagctcactacaaactccacctcccgggttcaagcgattctcctgcctcagcctcccgagtagctgggcttataggcgcctgccaccacgcccggctaatttttgtatttttaggagagacgggtttcaccatgttggccaggctggtctcgaactcctgatctcgggtgatccacccacctcggcctcccaaagtgtcgggattacaggcgtgagccaccgtgcccagccaattttttgatttttgaaacatttctgatattctgtttaactttctttttgctttggccaatctttctttctctttccttctttccccctccctaaccctcccttcctctcccctccccaattctcccctctccagttctcccctgtcctctcctctcttcccctctccttttgggacagggtctcacactgttgctcaggctggagtgcagtggtgctatcattgctcactgcagcctcaatctcctgggcccaagtgatccttctacctcagcctctcgagcagctgggaccgcaggagagcacaccactacacctagctaatttttgttttgttttgtttttgtagcgatagagtttctgtataatgcccaggctggtctggaactcctgagctaaaatgatccaccttctttggcctcccaaagtgttgggattacaggcctgagccaccccgccaggcctctttcttttctttttcttttcttcttctttttttttttttttaagctgctccttgctgagcagggctaactagtaagcagtggtctgtcccaatccttctattatgtttctttttcttattgctttgtaacagctttttgtattttgtttatttcatcaaccatttcttcctagattgtaaattgtctttcaaccttacctaaagtttgccataaagaagctctgtcaatttttagctgttctttgaagattttaaaacattaattgctaaaaagacagggacaacagaaaacatgggtgggctacaaagtataaaaagtcttgcatagtcattaccattttgatccctggttgcttgcaaatgtgcttcaaatcccagcttgggcacttcctgtctgattgtagggattttttttttaatttttttttttttagagatgggcatctcaggttgggctcagtggctcatgcctgtaatcccaacactttgggaagctgaggcaggtgggtcacctgaggtcaggagtttgagactagcctggccaacatgttgaaaccctatctctactaaaaataccagaattagccgggcgtggtggcacacacctgtagtcccagctacttgggaggctgaggtaagagaatcgcttgaacccgggaggctgaggttgccgtgagctgagatcatgcaactgcactccagcctgggtgacagagtgagagactccgtttcaaaaaaaaaaaaaaaaagagagagagagagaaatgggggtctccctctgtcacccaggctggtgcgatcatagctcactgtagcctcaaactcctagtctcaagcgatcctcctgcctcagcctcccaagtagctgggggtcacagctctgagccacctcgccaggctgcaggcaaatttcttaatcttgccgggctccagtcttccagtctataaggtgggaataacaaaatttgcatataggaatttggggaaacgtgtagttctgggtttgggtgaagacctccacttttgtagtaggttcataaatcaaatcagagcaaatagttggtgtcttaaaaactgtatttatctgggtcttctaagtaaacggtttgaggagtggtggaggcagaaattaagatttactgagtacttagggtcaagtaaggtgcactggatcgtgttaatcgttaactcgtggaaaccgcccagagtgtgtacgctttctttcttttctttccttttctttttttttgagacggagtttcactcttgtcgcccaggctggcgtgtaatggcatggtcctggctcactgcaactccgcctccagggttcaagcgattcacctgcctcagcctccagagtagctgggattacaggtgcccaccaccacgcccggctaatttttgtatttttagtaaagacgggggtttcaccatgttggccaggatggtctcgaactcctgacctcgggtgattcgccgcctcggcctcccaaagtgctaggattacaggcgtgagtcaccgcgcccggcctggagtgtgtattatcccaattttacggggagtaattgtgctcactcggctcaccaccaagtcgccatagcgcgcctccgcaaggaagccctccaggcacttctactttcccggacccgcctcccgctccagccggttacacgcgccgttagcagcgtgggcggagttggttctgccttcgcggaaccaactggtccagcttctggtgtctcccctcgctcaattaaaagccagctcctctcctttcggcttccccacggtgcctttcgggatttgtagtcagacgcgcttcagccggctctaaggagagcaaaggcaagactccaattcccagcatcccccgcgcccggagagtgcagcgtctattctcatcctcttcacttttccactcctccccttacctcccttctcttctgaattctccattctgggctcttkcctgtgaaatctttctttgctttccccatcttttcctcgcattttttcaccatctttccctcaatctccaggagccaatgcgagactttggctccgattaagcgacggcccgagactyggggtgcgcgaggaggatcgacagagtggtgaggggacctaggagggcgggagtggcagaggtatgagagagagagaggtgagtgrgaggcgaagagtgagaggaaggcagggagaagctaggagatcggaaggcgtgggtcagggtgaatgacgtgaagtagacttgggaagggaaaagaggtggctttagatttgggaagcatggaggggagaggttaccgccgtacttagcagaagtgggctaagagatagaagataggaaggacgggcagatttggagcttrtagactggtctgaccaggatgggatggaagagagaggtgtgggctcaattttctttgtccctgtttagccaaagatgagacaagtcattgaaatacaaaatgatcttgcaaacactggacagttaacaattctgtcacttggtaattgagggaagactggagttgaagggcagaaatagggtgaggaggcaagaaagggagggagattggtcaggtttgggagaaaccagaggagatgagtgacatgggaaaggagaccacagaaaaggtggggttattgtggggactgatggatctggaatcagttagaaaggtcaggggtgacactggcatggatrgtgaggttgcacttctgacgtttgcattcctcaggtgatggagagcaccccttcaaggggactgaaccgagtacacctacaatgcaggaatctgcaggaattcttagggggcctgagccctggggtattggaccgattgtatgggcaccctgccacatgtctggctgtcttcaggtgagaagccccttcatggcagggaaatgtaatggggtctgcggmstggaataaaatatcataggtaaaagtgtagcagcctggagtcggggtggggactgggrgcaagggttggaaattgctctaaagtgtggaggccaaaacagcaggactggtaaagttgtgctggagtgagatgagatgtttgagaggtaattgagggcagagatgcagatacaatgcagcttctgatactaacctttgacctctgtycctgtacagggagctcccatccttggctaaraactgggtgatgcggatgctctttytggagcagcctttgccacaggctgctgtagctctgtgggtaaagaaggaattcagcaagtaagtctcagccagatacaaatttctcaacagctacatttcccaaactgctgttccttggagcacttccaggaagtgttaatagatatatcacaaaacttaaaaataaatacatttgggaaactctgcatattgccttttcccttttatttatttcccagctgagatcttgctttcaaatgtatcttccctcttaaagagttatgtgtgatatctgtaatgaggctctgataagtaatgcagtaaagaatttgtcttaggaagatactaatttcactctgtggaacagtgttccaagggtcagcaagttcagaacaggcagagatggtggcttttatgggcctcctttttgttttccaaataccctactcacctctctgcttctgttccagggctcaggaggaaagtacagggctgctgagcggcctccggatctggcacacmcagctgctcccaggcgggctccagggcctcatcctcaaccccattttccgccagaacctccgcattgcccttctgggtgggtatgtcacttctctctcttcctaagctagggcaggggaactgctgcttattaaaccactaattaaactttgggagggggagctcctgggggcctccccagaaccttgtggtctccacgttgggaactcctttaggagtaagttggaccagatgtagtgtgtggtgtaggaaatgtcccccactcatggcccctgaggataagggtggaaagatggcagagggcagcaaggaacacagacagggttccttactctttttttgttgttctgttttgtttgtttttgagacagagtctcactctgtcaccaaggccagagtgcagtggtgtaatcttgactcacggcagcctctacctcctgggttcaagtgattctcctgcctcagcctcctgagtagctgggattacaggcacccacyacgacgccaggctaattttttgtatttttagtagagatggggtttcgycatgttggccaggctggtcttgaactcctgacctcaagtgatccgcccatctcggcctcccaaagtacagggattacaggtgtgagccactgcgcctggccagggttccttactcttggcccatcctggccgtagggggaaggcctggtctgatgacacaagtcagctgggaccagacaagcatgcccgggacgttccctcccttgacaagtacgccgaggagcgatgggaggtaagcacttgggagtgtgtgtgtctctgcttgtgcttctwcttcccatggcccttggggcatggtctccctgttctcttctgttcttcaggtggtcttgcacttcatggtgggctccsccagtgcagctgtcagccaggacttggctcagctcctcagccaggctgggctcatgaagaggtgaggaagccggaggtacagcagctctctgctgtgccatctccttgggtycctaagaaatggtatctggggctagtcaagatcagaggacattagctggaaaaggcaagctgagtagaatatagccagagataccaaraaaaaacgtgagtggacaagtggggatagtagtctttctctgcatatcaccatcattgtccyggtctttgtctctagtactgaacctggagagccgccctgcattacttscgctggcttccagttcctgttgctggacaccccggctcagctctggtactttatgttgcagtatttgcagacagcccaggtgaggaggcagggccacttaaccagcatgctctgctcctctcaggtctcactgagagactcctgcctacagactgttccctgattttctcttctctgtccctttcttcccattgtctccctcccatccctcctcctttgtctctgcctctttctccctagagccggggcatggacctggtagagattctctccttcctcttccagctcagcttctctactctgggcaaggtaagcagggggctgaaaggtatagagatgggaaggggaaagcaagttgtggggcagtagagtagactgagaagataagaatgaaaacagaacgaacagagatggagaaagaaagaatgaatgtatggggttgggggtgggtgggttgtgttttggaccccagctggaaacctctgttcctcaggattactctgtggaaggtatgagtgattctctgttgaacttcctgcaacatctgcgtgagtttgggcttgttttccagaggaaggtatgagcgcctagataagtggcttccagggaagaaacagggtggtgtgttgcctttgcctttaaaaaggagtggggtcttggggcagtagyaggaagcagttgccagaactgaatacttgggtctctcgggggagagaagttgggggttgaggttctgcatcttgggagggatctgatatttcaggcaggaagatgtaaggcagtgacttctgagacaaggcatctgcctttctattcttttcagaggaaatctcggcgttactaccccacacgcctggccatcaatctctcatcaggtgtctctggagctgggggcactgtgcatcagccaggtttcattgtcgtggaaaccaattaccgactgtatgcctacacgggtgaggcgggacagagggcccctggaagaggaggttgggggtgagggaatgccagtttatgttygtgtttacctggcagtctacagagctctctgacatttctcatgacacttgaaagaagggcttgagrgagtctgggtgtgggggtggcctcctcatcctctttctatcccyggctcagagtcggagctgcagattgccctcattgccctcttctctgagatgctctatcrgttccccaacatggtggtggcgcaggtgacccgggagagtgtgcagcaggcaatcgccagtggcatcacagcccagcaggtattcccacttgggagaggtggagcaggaagacaggctgcacttgggctgcgggggacaggggtcacattatggaaggctagctctgagtctgttataayaggtggtggtgagttgtctgtgtttgaagagaaatgaaggctttgggtgtgagaataggtagacccttgaggggaaaaaaacatggagggaggaggtatagatctggatttgtgcctcggcactgccacatcctaactgcgtaaactagacatagttgttttgcctctgtgagcctcagtttcctcatctagtaaatgacagttcttacctcagggttgccgggataattcattggaagaataggggcaaagcattgagctcagcacctgtcatgcaataaatgctaaaaaaagaaaatagtagctgctgctattttaaagaaagaaaaacaaaacattactggaaagggcgaatgtgccagaaaaggaatatcccacgttgctgggagcagcaacgtgggataacagctgaactgggatrggtggagttgatgacaggagttatgagtttttagaataagctgatgttccagtgacattaggtgacagctcagatggctttcctgccttcttgctggagccctcatgccattcttgtctgttttcctagataatccatttcctaaggacaagagcccacccagtgatgctcaaacaggtatagacaggctccaagatgtcagaggctggcagctggtgatgacatgatggaaaagaaaaaggggcatccaaatctggggaagaracagagggcygggttgtctggggcagtattctgagtccctacagtcaacccttgctccttgcagacacctgtgctgcccccmaccatcaccgaccagatccggctctgggagctggaaagggacagactccggttcactgagggtgagtagcttctggtggccaagtcttggtcattggccagagaaagggcagacagttcagtctgcattttattttttacttcatggactaggagagaaaagctggcaagacagttttttgttgttttggggtgagtcggtagtaaacaaatcgtcccaaatcaatgcactttggatttggctaggtgagggaataattcacagtaatttgtattaggcctttctgaatatggctggatcacactggtgttaagatgaacccctgagcagacaagcatagagaattagtttgtaaaattgcggtgggggcaagcccagaccgcgtccagggctgccaccaaggagctggggggattcccaataggagctccgagcttcactttctcgtcttctccccgcgcccctcccgtcctgccgaccccaggtgtcctgtataaccagttcctgtcgcaagtggactttgagctgctgctggcccacgcgcgggagctgggcgtgctcgtgttcgagaactcggccaagcggctcatggtggtgaccccggccgggcacagcgacgtcaagcgcttttggaagcggcagaaacatagctcctgagagcgcgggacttggacacggacctcggcgggcgggactgggcggggcggggcatcagaactcaggtgttttttatttacgcgtcagggcttttcttgtttaataaagttatgatagctagcagtgcggtcccgggcgcctccccgtggggtttgccttcgcggcggactcgctcctctggtctacagcctttggaccggtagggagagggtggggccaaagccagctgctgcgcatgcgccggccggggccccgcccccatgcgccgcgcggctccagggccacgttccagggtcgggtttggtggattcctcagtccctgccgccgcggggcgccctgggatagcggcggggcctcctggtgagcgcgcgccggggcggcctccgggaagtgggagacgctgcgggtcctgggcccaggccttgggatgggcgggaaggcctggccgcgccgggctgtgggcactgcaggaggcccctgtgcaggtggagatcgccgcggccctggcgggactccttgctggctcttgggcgcgctgatgcccatcatctccctgagtttctgagccctatctctcatgtgtcagtggtcaccgccgaatccagacactccggccctgttccggaagagccctgatatccgtggctccatggcgctgtctgtcgataccatgcactctagctctcaaggaggaaaggttttgtggaagggaatagagacttggaataacagacctgtgctaattagagacaggaaagatggaacaaggggagtgacccttctccacccccatatcctaatgtgctctctctctatccagaacagatctcggcccctttccaaacactcctgatgcctcatttgcctctcgcctcttttcgaccaccattttgggggctgaggcactcacggggcctccccaggtttcactccgtttctacacagtcggagccccatggatctcccatctcccggaggaaccgtgaagccaaacagaagcgcctgcgagagaagcaggcgactctggaggctgagatagcaggggagagcaaggttaggggtcagacagcttgtccttgggtttctgagacttgagaggggctggaggagaccggctgaaatgcagtctggggtatactggatcccagcctcttctgctttctcttctcagtcacctgcagaatccattaaggcctggaggcctaaggagttagtattgtatgaaatccctacgaaacccggtgaaaagaaaggtaagtagaataagtaagaaggccttttctttcacatatgtgttgcccatttggcctgccgaaatgcagcctgggaacaagttcagtggttagtggagctctcctctgccttcacagatgtctctgggcccctgcctcctgcatacagcccccgatatgttgaggctgcctggtacccgtggtgggtacgagagggcttcttcaaaccagaatatcaggttagtatctggcagggaggggtcctaaattgtctccaggacagagtggcccttgaatacaactggacctcagagttgagctcacattgtagaccttgtcttctttctggctctggtgtctccaaagatttctcttggcaggttccccctggccaattccctcctctccactctcctcttatttgcaggacagttcttccttgaagttctttctgttctggagacagtagagggtgctctttccccaatccaattctctcttgcccctttgactttttttcttcctctaggcccggctgccccaagctacaggggagaccttttccatgtgtatcccacctcccaatgtcactggctccctgcacattggccacgcactcacggtggccatacaggatgccctcgtgcgctggtgagaggggagtgggggctgcttgagttcttggaagggaaataggaagggcaggaatgagtgaggataaacatttaagctcaggggctcacaggagggcatttttgttgcaggcaccggatgcgtggggatcaagtgctgtgggtccctggttcagatcatgcaggaattgctacacaagtatgtcttttgttacctgttccttttcttgggcaaaagcaatttcttcccccaaagcaacctgactctgttcatttgccctgaatccaactgcaggctgtggtggagaaacaactgtggaaggaacggggagtgaggagacatgagctgagccgggaggccttccttagggaggtgtggcagtggaaggaggcgtgagtatgatgggcaggactcggggggcccagatggcagatttggtttcttgcctcccaccactatcactcctgacttgtaatccttggctcttcccgacacagctctgacttcctcagagatggaagctctggagcctgttaacatttggtggagtttctaagccttatgtgtgtggatattatatatgcattagaatattcgtgtgtgtgtgtgtgtgtgtgtatttttatatatatatatatattttctttctctttacttaccccaatttctcttgtctaaatctcaccttcttccactcgcccattcccacctttcaattcccatggaattaccctcattcttctgggtctgttatctcatgccatctctgtgaagcatccttggatttcccacaatatggctatccctcctctcttcctatagaatcttttgcctcttttaatatcttagaaaaccccatactgggtttgtaagtccatttctattagcctctagaggctagatcaatgccatcctcacttgattttcctccaacacctggcattgctgggggcatcgctgggcctggtacataggaagtgcttgggaagtgtttgctgacaaggatctctctgggcacaggaaaggtggagagatctgtgagcagctgcgagctctgggtgcctccctggactgggatcgagagtgttttaccatggatgttgtgagtgttctgtgccttggtccctgtgagtgatgggcgatgtttagggatctgtgtggggcagggaggaagcaatgcctgggtccctgagcagggtgatgggctgagaagtggctcttagaggtggacactcaggtcattccagggctcctcagtggctgtgactgaagcttttgtgcggctctacaaggcggggttgctgtaccggaaccatcagcttgtcaactggtcatgtgctttaagatcagccatctcggacattgaggtgaggcggagagagggaagcaggtttgtgagagctctgaggcagagtggtcaatgattaagagctcagactctggagccagggtgcctggattcaaatctgatgcctgcctgttacagctgtgtggcttttggcaggccgtttagtctctttaagcctcagcttcctcagtctgtaaattagagatgatggaatgcttgcatcgtgggggtgttgtaaaaattaaatgagaattcacataggtgcttggcaagatacctggccatggcttaagtgctcagtgaatatttattagaagtgtgactgcacgagcattgggtgagggcagagggaggtagctcccgaatcctccaaatggcttttagatggattgcagggaggctgggcagatggatgagtggcagagtgaagcctgggcatgagccttgcagaaaggctgccctctgacccagctttctcggtgcctccaggtggagaaccggcccctgcctggccacacacagcttcgactgcctggctgccccacccccgtgtcttttggcctcctattttctgttgccttccccgtggatggagagcctggtgagcatagtactctgcagggtcacccgtttacctccatttttcctgttttctgaagcccatgttgggctgctaggaacccatcagtccatctctcacatgtaccttggtagtgttcacctcagcgtgggcacttacccagggtcttctgggggatgtacaaaaagtgcatgtggtcactgccctttgagagtgtggtgtgattcttcaggagtgcgctacccaggaaagagatcagttctaaggtatgttttgttttgtttgtttgtttgtttgttttgagacagagtctcactctgtcacccaggctgcagtgcaatggcacgatctcggctcctgcaacctctgcttcccaggttcaagcgattctcctgtctcagcctcctgagtagctgggattacaggcgcgtgccaccaggcctggctaatttttgtatttttagtagagacggggtttcaccatgttggtcaggttggtctcgaactcctgacctcgtgatctgcccgccttggcctcccaaagtgctgggattacgggcgtgagccactgcacctggcctctaaggtgtggtttttacggtaaatgttctgaagagctcagagaaagggaagacagatgagctggaattgtcagtggaagcttcttgtaggagctggtgctccccctgaggaatgtacagcatttgtgattaggacactgagaatccccagtgtcctctgggcacccagcaagaattctattatagttgctttaattaatgctgcccccatttcttccatgcaaattatcagggaattctttagcaccagagaccctctcagacctctggtcatcagcttatgggaaaccctgggttcctataaacactgctcctacttttttctagtcactcctgggggcctcttccaccttgactactccctgccccttcccctttccagttctactgcctttagctatgttggcagtgagaggtgaggatgatgaccagctgtaagtgtttaaatgtttatcttcagatgcagaggttgtggtaggaaccacaaggccagagacgctgcctggagatgtggctgtggccgttcatccagacgactcgcgatacacagtaatacccagtgcgctcctgcactctggcccgccccgccaatggccttctcttctcttgggttttaaatggtggctctttctctcttgcttctacttccttttcctgagacttctctcagtggttctgattggactccctcctcctcttatagtttttctgtagctcaggggttgacaaactggcccatggtcctaatccagcttgcggcctttttttttgagacagagtctcgctctgtcaccaaggctggagggcagtggtgtgatcttggctcactgcaacctccacctcctgggttcaagcaattctcctgcctcagcctcctgagtagctgggagcgtggcaccatgcccggcacgtgccaccacacccagctaattttttgtatttttacaaaaattagtaattaattttttttaagtaatgtaatttttaagtaatgttatttagtagagacggagtgtcactgtgttagccaggatagtctcgatctcctgacctcgtgatctgcccacctcggcctcccaaagtgctgggattacaggcgtgagccgccgcgcctggctgcttgcagcctttatattatctatggctgctattatataccctctccagctctgctgcagtggcataatagagtaattgtgctgagaatgaatttgtctctaggcccaaaagcctaaaatatctacattctggccccttaagagtttgctgaccttgctctagcttgctaccttccactttctaccttcttattcctggggttctcacgccccagcccagacccttccaaccctcacaggtgcctgtccttgatccctctcccttcccttcagcatctacacgggcgacagcttcgtcaccccttgatggggcagcctcttcccctcatcacagactatgctgttcagccacatgtgggcacgggtgagtggaagtcaggggagggagagaaagttgggggtcctggaggagaggggagggaaccaggaggaagaggaaggtgggagtgggagatcctcatatagggtggtctgagtggggaatgggagggaggcacagacagagaaagtcgcaggggctggggcggtgcaggtgatggggcggtgcaggtgatgatgatacatctggaaaagcaaaagccaaggtcaggttcagtactcaccatggctgtgctccccaaggggcagtgaagg

SEQ ID NO: 97853 - DNA, 14420 bp, Homo sapiens
  misc_feature (1)...(14420): n = A,T,C or G
tcctaggaatcgactttagctggcatatcttagaacagtatttggcagcagaagctctgagttccaaattctctgcttattacctgtgaaactttgggcacattatataacctttctgaacctcagttttttccatctatataaaatagataacttgtattgaccttccaggactgcatgtgaaaattgaaataatttaggccgggcacggtggctcatgcctgcaatcccagcactttgggaggccagggcaggcggatgacctgaggtcaggagttcaagagcagcctgaccaatatggtgaaaccccgtctctactaaaaatacaaaaattagctgggcatggtgccgggcacctgtagtcccagctacttgggaggctgagacaggagaattgcttcaacctgggaggcagaggttgcagtgagctgagatcgtgccactgcatccagcctggacgacagagtgagactccagctcaaaaaaaaaaaaaaaaaaaagaatttatataatttattagcccctggcatgtaagcatactgtttttacctcaaaccaaatgacatgttattagtgtgcaaaggggtttctattagccagtcaaggcgttttttgtttgtttgtttgtttttttgagatggagtcttgctctgttgcccaggctggagtgcagtgacgtgatctcggctcactgcaacctctgctccccaggttcaagcaattcttctgtctcagcctcccgaacagctaggactacaggagtgcgccaccatgcccggctaatttttgtatttttagtagagaaggagtttcaccatattggtcaggctggtctcgaactcctggcctcaggtgatccacctgcctcagcctcccaaagtgctgggattacaggcgtgaaacaccacgcccagccttgttttgtattttttaagacggagtctcactctgtcgcccaggctggagtgcagtggctccatcttggctgactgcaacctctgccgtcctggttcaaccgattctcctgcttcagcctcccgagtagctgggattacaggcgcctgccaccttgcctggctaattttgtatttttagtacagatggggtttcaccatcttggccaggctggtcttcaactcctgaccccatgatccacccacctcagcttcccaaagtgctggaattacaggtgtgagccaccgcgcccagtctacctttttttttttttttttgagatggagtcttgctctgtcgcccaggctggagtgcagtggcgtgatctcagctcactgcaacctccgcctcctgatttcaagcaattctcctgcctcagccttcagagtagccgggattacaggcatgcaccaccatgcccggcaaatttttgtattttttaagtagaaacagggtttcgccatgttggccaggctggtctcgaactcctgacctaaagtgatctgcctgcctcggcctcccaaaatgctgggattacaggagtgagccattatgcccggccaagtcagggcttttatagctaagatgcctactacctaaaacatttaagcaacttggcctcctgcaaagaaggatggtgagaagaatggccattatgccatcaactaggtggtgacccaagagtacaccattaatattcacaagtgtatccatggagtgggcttcaagaagtgtgcccctcaggctcttaaagagaccggaaatttgcaatgaaggagatagaaaactccagatatgtgtattgataccaggctcaacaaagctgtctgggccaaagtagtaaggaatgtccatactgtgtccatgtgcagtggatggtccagaaaacataatgaggttagaaattcaccaaataagctctatactttggttatatacttgttaccactttcacaaatctacagtcagtgtggatgggaactaactgctgatcatcaaatacatcaaatgaagttataaaaactacaaaaaaataaaaaataaaaggtttaatacttgtcttcactttacattctgtgtgttcaaagcattaaagtcctacagatgtcacattaaaatgattaatgggaattattaacccaaactggtttccaaatttatgaaaaacagtacagatcactgaatacgaggttgagatgctagctactggatccaaattcctcatcttttttcacgaccttttcccttattaatgatggttatatttctttgtatttaccctctagataacttggggaaattctgatgactctgtgcttctagtccctcctttcctagagatattaataaagaacactgggaccgggcatggtggctcatgcctgtaatcccagcactttgggaggccaaggtgggcagatcacctgaggtcgggagtttgagaccagcctgaccaacatggagaaaccctgtctctactaaaaatacaaaattagctgggcgtggtggcgtgcacctgtaatcccagctacttgggaggctgaggcaggagaatcgcttgaacctgggaggcagaggttgtggtgagctgagatcgcgccattgcactccagcctgggcaacgtgagcaaaactctgtctctaaaaaaaaaaaaattcattaaacatttactgtggccgggcacggcagctcaaggctgtattcccagcactttgggaggctgaggcaggcagatcacctgaggtcaggagttcaagacgagccttgccaacatggtgaaacccctctctactaaaaatacaaaaattaaccaggcatggtggtgcatgcctgtaatcccgggtgctcgggaagctgaggcaagagaatctcaaacccaggaggcagaggttgcagtgagccgagatcacgccactgcctccagcgtgggcaacagagtgagactccatctcaaaaaaacaaaacaaaacaaaacaaaacacatttactgaatactcagtgccaaccactgagaacatgataaggaaaaacagacatgctgtggaaggtgggtgagcaggagaggggcagagactcaacacatcccttaaatagatgtataaacgcatgtataaatcagcccttttggatatcacgagagccacaggtagagaacctaagtatagccaggcacagtggctcacgcctgtaatcagcacctttgggaggctgaggtgggcagatcacgaggtcaggagatcgagaccatcttggctacggtgaaacctcatctctactaaaaatacaaaaaattagccaggcgtggtagtgggcacttgtagacccagctacttgggaggctgaggcaggagaatggcatgaacccaggaggcggaacttgcagtgagccaagatcacgccactgcactccagcctcagcgacagagcgagactcttgtctcaattaaaaaaaaaaaaaaagaacctaagtataaaagaatgaagacttgtggctcacgcctataatcccagcactttgggaggccgaggcgggtggactgtgaggtcatgagttcgagaccagcctggccaacatggtgaaaccccgtctctattaaaaatacaaaaattagctgggcgtggtggcgggcgcctgtagtcccagctactcgggaggctgaggcaagagaatcacttgaaaccggaaggtggaggttgcagtgagctgagattgcaccactgtactccagcctgggtggaagagtgaaactccgtctcaaaaaaaaaaaaaaaaaaaaaggaatggacttttttggccagtgcagtgactcatacctgtaatcccagcactttgggaggcgaagatgggcggatcacttgaggccaggggttcgagaccagcctggtcaacatggtgaaaccctgtctctactaaaaatgcaaaaactagctgagtgtggtggcgggtgcctgtaatcccagctactccggaggctgaggcacaaaaatcacttgaacctggagggtggaggttgcagtgagccaagatcatgccactgcactccagcctgggtgatggggcaggactccacctcaaaaaaaaaaaaaaaactttcttgaggaagtgggaggctgaggcaggaggattgcttgagaccaggagtttgagaccatatggggcaacatggcaagaccccgtttctacaaaaattttaagtattagccaggtgtggtggtgcacacctatagtcccagctatttgggaggctgaggcaggaggatctcttgagtctagaagtttgcgaccagcctgggcaacatagtgagaccccgtcccaaaggaaaaagaaaattgcaaagtagagaagacatttgaaagaatcaaacacggccaggtgctgtggctcatgcctgtaatcccagtactttaggaggctgagatgggtggatcacctttgctcaggagtccagacaagcctggggaacatggcaaaatcccgtctctatcaaaaatacaaaaaattagccaggccaagtggcacgcgcctgtggtcctgtacttgggaggctgagatgggaggctctcttgagtctgggaggtggacattacaatgagctgagatcatgccactgcactctaacctgggtgatagagtgagactccatctcaaaaacaaataaaataaaaattcaaggcaggaataaaacagtaactacataatgagctcacattttaataaaagagatataacaaatgaacaaaagtccattaaaatgttagggaaaaaacccaataggatgagttactaactagaaggggagaagggatttggagtggttaggagagccctttctgagaagataagctgagacctgtgccaagagggaggcagccatgcaaatactgagaggaaggaaaaaaacgaagggccagtgcagagatctagagaggaaaagaacttgtcttgctggagaagcagtcaaggtagccaaggagagtactgagaagagtacgttggagtgagtaggtagggactctatggagtagggccttaaaggcgatgattaggccaggcgcggtggctcacacctgtaatcccagcactttgggaggccgaggcgggtggatcacggtcaggagttcaagaccaacctggccaagatggtgaaaccacgtctctactaaaaatacaaaaaaaataagccgggcctggtggcagtcgcctgtaatcccagctactcgggaggctgaggcagagaattgcttgaacacgggaggcggaggttgcagtgagccgagatcgagccactgcactccagcctaggcaacacagcgagactccgtctcaaaaaaaaaaaaacaaaacaaacaaacaaaaaaaaaaacaaaggcagtgattagcagttcgggttttgtttccacttacactagcgagagcatcagtaatgaacaaggggaagagtgaagccactgactcgcgaggtgactgtgggcaagttcctgaatcttgctaacactctttaaccccctggaaaactgttcgctaatcgtcacattaaacggctgcgaacgggccacggtcaaggcttcggggctgcagccgcgagtttacctgtcctccaggaccgattccatgggctccaccccgtctgtgtccacggcgcgtagccggtcggcgaaggcgatagctttctccagtcgcgccactgcctcgcggctgccgaagtccacaagcgctagacgctccaggtgctcgatcaccgcagccgtgatccggccactgccctggaggagggatgaggcggggagtgtgggtcaccggcgctccgaagtgcctcccggcttgctccgccacccgcctagatggccctggcctttacctgaggatccgccttggaggtgaagccctggcgcccgcccagaggggcccgaaggcccagccacaccaaccgcgaccacatttcttccttccttggcccccgcagtgcgcccgcgcgtaacgccgagcgacgcgcctgagagtgatgacatcagagtgcgccgtcgtcgccgccgccaccactgtcgccatgaacagtgtgggggaggcatgcacggacatgaagcgcgagtacgaccagtgcttcaatcgctggttcgccgagaaatttctcaagggggacagctccggggacccgtgcaccgacctcttcaagcgctaccagcagtgtgttcaggtgagccctcccgcctctgttcccaggccctgcattctcggcgctgtgtcccaccacactcatcgtattttacggggattgggactggactggaagggtggagaaaagtcgcagtgaggccagtggcaggagctcgctcccctaccatcaccaccgaggccacttgggtgtctctccgaatgacaaatattggggcagtgcttttcaagaagcacagtcacatcctttggttcatttggtgttcaccctaaactcgcaaggtgggcatagttactcatattttatacataaaaaactaacacccagaaataggaagtgattaatccgagttcactagcatcaggtttccttggttctttcgcaggtggtgcacttttccactattactgctggggtctgggcgggattatacttcagaattcagactggagggtcacatttttttgttgttataaacccttcgttagcctgtttctctctcttgaccagtccccgcaactgcagccaggaaatgtttattctggcccaatggatgtggaactgctttgaattgttaagaacagcaccgggcaaagcacttccaataagttaacccaacacatcctcacagcaattccccgaggtagttgctgtcttcatcccatttacagttagtcacatagccagtaagtcctggaacccagatttgaacctaagtctttcactaacacaaagtgatgattatttttcaaatttcacttaattttaacggttccctcacaactccttttccagtctccctcaggtcttayacttgatttattcattatggtacttctggtttttatttatttttgaggcagagtctcactctgtctcccagcctggagtgcaatggcacaatctcagctcactgcaacctccgcctcccaggttcaagctattctcatgcctcagccacccgagtagctgggcttacakgcatgcgccaccatgcccagctaatttttgtatttttagtataaacagggtctcgccatgttggccaggttggtctctaacttctggcctcaagtgatccacctgccttggtctcccaaaatgctgcgattataggcgtgagccaccacacctgaccggtacttgttttttaaaaagtatgtggtttgaatcatggttataagtctttataatcagcttgattttacttttgtactgtcatattttatttacaaagcttgcaacttaagcttcatgtaggtctttataatgtgttttctcctcctaccagaaagcaataaaggagaaagagattcctattgaaggactggagttcatgggccatggcaaagaaaagcctgaaaattcttcttgaccttgacagtcaccttgaaggatttcgcaagtccagaaattgaggactctggatttttgtcaactaactctgtgaacatagccatcagatttgatgaggaacttaggagagaggagttttatttcctccttcgatgttttcctctcagttgtaaaagatgaactctttgagatgatttctcacctgctgtggtatcttgcaggaactgtgtgctaaaattgaacaatttttttgagattatggttgcaatacttggcgtggaatcagctttacataaatataccttgtatgcaaacgatgataaactagtcaggatgagcagagctgcctgacctcttgatttctgctgcaaaagacatatacactgtactggggtcactatttatgaaagcaattggttaggacctctttttttcctctcagggaactaatgctctgaaaagggatctgggcacaamagtttcagtgagtgcttttgagcacacttttatttttatatagtaactaatggttaagattgatggtggcctggattagcaaagaggaagacagcttttaacacagttccctgccttcacaagaggtgtcagattaagatgtgaaagctgcaagaatgttgcagtgaacaccatttcagagctctcagtgtgcagttcaggaattaagatacttggaatagctgtggaggaagaacctaaattgcaaagatctgctattgccagctctcaacccaagtcagtgaattgtcaacctgcatwtcctaaaaatgtcaaaatgctgcatctggttaaatgtcggggtaggggggaagctgaaggtgctcgcttcatttgccttktttactcatcctgccctgtaatgtctgtaatcctgaagatggaataaattgtaacatttagtttctatcattatttgcctctggaactcagtgcattttatggaactattaccctgttaccctacaaacctcatatatacagtggggagagttttgtgttttgtaacttaaaggtgaagaaaaagtgacttgtcttaagctaggtggtacagtatggcaatcagaaacctcacattttttttttttgagacagtctggttctgtcacccaggctggagtgcagtggcgcaatcttgtcttactgcaaactccacctcctgggttccaatgattctcctgcctcagtctcccaagtagctgggattacaggcatgcatcaccatgcccagctagtttttgtatttttagtagagatggggtttcaccatgttggctggtcttgaactcttgacctcccgaagtgctgggattacaggcatgagccaccgcacccagccaaaacctcactgatttctaaaatttccacaataggctatacaaatacactatggtaccaaaaaaggatcaggagagcacttacttacctcagaatgtcacgtaatccccacaattaattgagtaatttggttttattagatacccaaagtagtatgaaacttgaattacaggccgggtatggtggctcatgcctgtagtcttaacactttgggaagctgggatgggcggatcacttgagctcaggaatttgagaccagcctgggcaacatagcgaaaccctgtctctacaaaaaaattagctgggtatggtggtgtgtgcctgtagtcccagctactctaaaggctgaggtgggagaattacctgagcctgagaggtggagactgcagtgagctgtgattgtaccactgcactccaggctgggtgacacagcaagaccctgtctgaaaaataaaccaagaaacttgatttatagaaggccctaattctattgtcttttctccactttaccaattgctacatcatatttaatgtgacttgtccttaatgtcatttcaaaacattcttcatttatattttatgactggctagggtccattatccaaggattataaaagatgtttggaacccagccaagggaggccaggcagcaagctgaagtataatgcatctgtcctaaactcagactggccacaaccaaaacagctctatagggactcagaagtgcaggctgttatattacaaaatggcaaagacaatgagattctctattccgttaattattacaaaatggcaaagacaatgagattctctattccgtactgtatatgccttacttttgcgttaccagtttaatgtaatataatatgaaataccttgttgcctcttgaaccttaccacgaaagtgttcctttgagccttaagaataaaccagctggctgggcgcggtggctcacgccagtaatcccagcactttgggagactgaggtgggcagatcacctgaggttgggagtttgagactagcctgaccaacatggagaaaccccatctctacttaaaatacaaaaaattagccaggtgtggtggcacatgcctgtaatcacagctactcaggagggtgaggcaggagaattgcttgaacctgggaggtggaggttgtggtgagccaagatcatgccattgcactccagcctgggcaacaaaagcgaaactctgtctcaaaaaataaaataaaataaaataaaccagctctggccaggcacagtggctcagacctgtaatcctagcactttgggaggctgaggtgggcagatcacctgaggttaggagttcaagaccagcctggccaacatgtgaaaccttgtctctactaaaaacacaaaaaattagcccagcgtggtggcacgtgcctgtagtcccagctattcgggaggctgaggcaggagaatcgcttcaacctgggagaaggttgcagtgaactgagatcatgccactgcactgtaccctgggcaacagagtgagactccatctcaaaaaaaaataaaaaagtttttttttttttttgagacggagtctcctctgtcaccaggctggagtgcagtggagcgatctgagctcactgcaacctccgcctcctgggactacaggtgcgtgccaccacgcccagctaatttttgtactttcagtagagatgaggtttcaccatgttgnnnnnnnnnnnnnnnnnnnnnnnnnnnnnnnnnnnnnnnnnnnnnnnnnnnnnnnnnnnnnnnnnnnnnnnnnnnnnnnnnnnnnnnnnnnnnnnnnnnnnnnnnnnnnnnnnnnnnnnnnnnnnnnnnnnnnnnnnnnnnnnnnnnntaaaatacaaaaaattagccaggtgtggtggcacatgcctgtaatcacagctactcaggagggtgaggcaggagaattgcttgaacctgggaggtggaggttgtggtgagccaagatcatgccattgcactccagcctgggcaacaaaagcgaaactctgtctcaaaaaataaaataaaataaaataaaccattttgattgcaaataattgccctctcggccgggcgcggtggctcacgcctgtaatcccagcactttgggaggccgaggcgggcggatcacgaggtcaggagatcaagaccagcccggccaacatgtgaaaccttgtctctactaaaaatacaaaaaagtagccgggcgtagtggcgggcgcctgtagtcccagctacttgggaggctgaggcaggagaatggcgtgaacccgggaggcggagcttgcagtgagccgaggtcccgccactgcactccagcctgggcgacagagcgagactccgtctcaaaaaaaaaaaaaaaataaataataataataataataataataataattgccctctcagagtggttttgtaactactactactaccatttactatccattaaagcaggatagttttaattccacagaaaagccaataagcagaaatgtgtcacgctccctttgtttctcttaagatttctgaccctaccagccctgaaggagattacctcaaagtaagaacttgacacattcgaggccaggcacggtggctcacgcctgtaatcccagcactttgggaggctgaggcgggtggatcacgaggtcaggagatcgagaccatcctggctaacatggtgaaaccctgtgtctactgaaaatacaaaaaattagctgggtgtggtggcgggtgcctatagtcccagctactcgggaggctgaggcaggagaatggcttgaacctgggaggcagagcttgcagtgagtggagatcgtgccactgcactctagcctgggcaacagagagagactccgtctcaaaaaaaaagaaaaaaaagaacttgacatgttcaagaaaattatgactacagggaagattctgcagtaaatgctagtggaatgggacaggaaaaagatgagacccagatcaagcacttcctcttgagaaatacagatacctctttcaggtgtaaattgcaggcattctgctagccattcaatgtctttgatatctcaggcccgtcaaggaccaatcttttgttttttgagacagagtctcactctgttgcccaggctggagtgcagtggcacgatcttggctcactgcaacctccacctcccgggttcaagcctctacacccagctataggagtgcgccaccacacccaactaatttttgtatttttagtagagacaggatttcatcatgttggcccggctgatctccaactcctgacctcaggtgatctgccagcctcagcctcccaaagtgctgggattacaggcatgagccaccgcacctgaccaaggactaatcttgatgcttaattagcaccactccacttggtccctttatccacatcaggcacaataaaccaagaggggctgttataaacacttattcaatgggctgaattggacctgtaacactaaacagcagcctagaccttcactgtggaaacagaaataactaatgccaatttcttttcaacttggacactgacttgaagctcaaatgctaatttctgcgaaaaaacacaaccaaagaaagtaactctcagctcatgaccaatctaaatttaagttatttatttaagccatctcctgccacaagcaaagggatgggagaccagtataccagtcatcatttgatacaagtaaagaaggtgagcttaaggtcccatatactttttctggtccatgtgcagagtaacggtccaaaccagtgctgtggtccctggtgcccgggtagtggtccagattctctttattcatcttcgtagccagttggaagtggattcacatgagggttatggaatagagtatggttaccatctccccagggaaacggctgtggagtgaagatgtcagttagataattccagaaaataatttagaaagaacaccgtcatgaactgcttataacggggtgacagatcatatataaaaacaaaatggaaattagtcctttatctactggtgtagttcaaccttcccattatttaaggagctcttataactaccaggggagcccttaaagttatcctggctacaggacagttttaattccagaaacaaatatggatggcagaaaatgcaagctcaagttagttactcatcatcctctccctagtaactagtatatccagtgctgtgtttatgaaagtgtaatcctcaaatcacctatatcaaaatggtggcagtattaggggagggagatgcttaattaaatgcagatttctggcaccatcccagacttcaaacaatatctgggctgggaaactgcagcccaccctgaattatcttgcctattacctttgaaaagcattactttagggcaacggtctccaacccagggtgattttgccccttcagggcacactgggtagtatcgggagacactgtgatgggggcgggggagggggaagcgggagtggggttgcgcaggtactactgccacctagtgggtacaggccaaggatatggctaaacatttcacaatgcacaagatagccccccaacaagaattacccagccccaaatgtcaacagtgctgaggctgagaaacctttactgtttggcttctaattgcattgtacaaggatgggagtgccgctcaaagactcaacaaattcaagagtctaggttaagtttctacaaggccagtcctatatgggctaggtgatgtaataataataataataataataacttttttcatcacttctcggccttttggctaagatcaagtatattattactatttttttttgagacggagtttcactcctgttgcccaggctgcagtgcaatggctggatcttggctcactgcaacctcctcctcctgggttcaacctcctagattctcccaccgcagcctcccgagtagctgggattacaggcgcccgccaccacgcccggctactttttgtacttttagtagagatagtgtttcgccatgttgacgaggctggtcttgaactcctgacctccggcgatccacccaccttggcctcccaaagtgctgggattacaggcgtgagccaccgcgcatggccagtattgaagaatcagaataagcccttgttaaagatacagcaaacaacagaggacacaacattgtaatatatctacatcaacaaccaatgataaaacagtcgagaaaaggtattggtggggaatagagaaagctgtcagtctcttcattatgcaactagtagctgccagatgcccatgttttgttgttgctgttttgttttgttttgagaccagagtctcgctctgttgcccaggccggagtgcagtggcacgatctcagctccctgcaaactccgcctcctaggttcaagggattctcctgcttcagcctcccatgtagctgctgggttcgcttacgcgaaccaccttcagactttgccactctaattggatttcccaaacctccaggctttacacaacggacacctgtttcagaactgtctcagaagtaaaaaaaaaaaaaaaaaaaaaaaaaagaactgtctcaga

SEQ ID NO: 97854 - DNA, 22832 bp, Homo sapiens
tatttagctgtgtcacacggacagatggtgtaaggccaccagtcaaggcacaggacagtccatcacttgtaaggctccctcctgctgcccttttttccccacactcaaaccatcccaccctgtcctcctatctgacagccatgaacttgttctctagctccatcattttgtcatgtaaagaatattacataaatggatttacagagtacacaaacttttgaagtaggctttttttttttcactcagtggaattcccttaagagccatccatgttgttttgtttcgagataaattagttggttccttttttttttttttttttttgctgatggtgttccacgttccacagtgtggatgcaccacagtttggccattcacccgctaaaggacatttggggtgtgtgtttcctgtttggggctattataaataaagctgctatggacgttagtgagcagtattgtgtgtgaacctgcgctttcatttctctgggacaaatgccaggagtgcaattgctggggcagacagtaagtgcatgctcagccctttgggctgtctgccagctcattctacctgcacttgtgctatcaaaattccaaaattctcctttcatttactttgctgccttcaaactttaatataatttagttttcttccatgctgcgctactgaaactgccctcttgtgaagtctttaaaagaatctttggttatttgaaaatcatgtaataagtagccattattacactttgaaaatacatattttatatatatttttcaggcctttctggctatctcctcgtcaggtgatggtcatccctgtggggccaacttgtgaaaaatatgcacttcaggtaaaatcagaggtgtttaaagtacataataatcttgcatgtattctgtgtaggtcatcgatttggagtgtccttcatgctttaaaatattgcagaactgacacattagcttaaaccgtgttttcagcaggtgggagtaacacacgaatcatgtctctgcagctgtctcagaactatttcattcttaatgttttttgagaaattagtattttaaaacatatcataattattcatttctacacagctctattagggaagaatattatctgttgctgtgtcacaagtgaccccaaaacttagcagctttaaacaacaaacattgatgatctcacagttcctacgagtcagggtctgggagcagctcagctggtggattctggcgcagagcgtctcctggggctgcagtcaggctgtcagccagggctgcggagctcggggctcgctcacagttggtggatgcagctcctcatcacctgggtgcttgcttgcctgaatgtcctcactgcatggtggctggtttcccccagagcaagtgatctgagagagatgggagctgcagccttttataaactagtctcagaaacgatgcgccgacacttccgcacttctttatggtcacgcagacccgctctggtatagtgagcagggaactatacaaaggtgtgaataccaagagtggggaacaacggggtcttcttggaggctaggtaccataatgtaacagtaaaggtgtttcattttcttctaggtatccagtgaattttttgaagaaggatttatggctgacgttgacttggatcacagttgtacactaaataagaaaatacgaaatgcacagctggctcagtataattttattttgggtaatttaagtttgtatatatttttccaaatgcttttttttcccacttcaattccaaaagaccaaataagaaatatggttcaactacttgattatcatgatttgtctatttaatacttacacaaaaggaagagtccatagcattcctagcttagctgttcctaggtactctttgttgtttgctggaagaagagttgtaaagtttcacctgaatcccctgggatagttttactagcaatagttcatattgcaagcaaacaacgaaaacaactctgaaaatgatcccatcagtagaattatatactttatatttcagcctcacaggcctgtaatattttccctcacttttctggcttattaggaaactttgggattaaactaacagaaagaaaagatcccaaatttaaaatgatctaaaggaaaagatttagatgaaaagtaaaatgtccttttagcatatgactaattagatgcagaatctaaaatttaggctttaaaaatgattccaaaattaagagaaactaacactgatataactgcaggcacagtattgctatttcttgtaagttgagagtctgtagaaggcgaaataaatatgcatagcattgttctattgacagtgtttcaatgataatgtttgacaccagagtaggtattgtgctgtttcagtcaggcttcttatggtggcagaaatctcaacttggtttagacaaagacagcatttgttggaagggtcttggagtatcccatgacatgaaaggtagaattaaatagccaaaccactagaagagcaatcaggagctcaaccctcaccaggagtatttctccccatttctcgttcctgtcttgctctggttctttatgcttctcttgaatatctaccttattccacttatctgcagaccggtttcttccttctgtgtggcaagaagcatggctgtagattcctgcatcatctcacaatatgggtcactagagagaacaaactttttacccacattccagaaagttctggctggctcgcatgggtctggtgtccactccttggctcatcaggtatgccaggtggagtcagcgtgagcctgtaagagctccccgctctcatctgcaccctagtgccaggtggggtcagtgtgagcctgtaagagctccccactctcatctgcaccctagtgccaggtggggtcagtgtgagcctgtaagagctccccgctctcatttgcaccctagtgccaggtggagtcactgtgagtctgtaagagctccccgctctcatttgcgccctagtgccaggtggagtcactgtgagcctgtaagagctccccgctctcatttgcgccctagtgccaggtggagtcactgtgagtctgtaagagctccccgctctcatttgcgccctagtgccaggtggggtcagtgtgagcctgtaagagctccccgctctcatttgcgccctagtgccaggtggagtcactgtgagcctgtaagagctccccgctctcatttgcgccctagtgccaggtggagtcactgtgagcctgtaagagctcccccctctcatttgcaccctagtgccaggtggggtcagtgtgagcctgtaagagctcccccctctcatctgcgccctagtgccaggtggagtcactgtgagcctgtaagagctcccccctctcatttgcaccctagtgccaggtggggtcagtgtgagcctgtaagagctccccgctctcatttgcgccctagtgccaggtggagtcagtgtgagcctgtaagagctccccgctctcatttgcaccctagtgccaggtggggtcagtgtgagcctgtaagagctccccgctctcatttgcgccctagtgccaggtggggtcactgtgagcctgtaagagctccccgctctcatttgcgccctagtgccaggtgcagtcagtgtgagtctgtaagagctcccccctctcatctgcaccccaggaccacaagagctgttctctcaggtggacaatagagagatgggatcagaagtcattgcttccctcaagaaacttaactatcagaggatgaaccaaatgctcattagatgatatttaatattagtgaagaaaaacttgataaaaacatgtcatgggactgctgacttaatgtttggtaaattgctgatttaaaatacatttctttacctttcttttctgcagtggttggagaaaaggaaaagatagataatgctgtaaacgtgcgaacaagagacaacaaaattcatggagagattttagtaacttctgccattgataaactgaagaatctcaggaagacacggacactcaatgctgaggaggccttttgaagtccttccctgatatttgcttctgtgtaactttgttttgacccttaaaaatgtatttttcttaacatgttagtacttctacgactttggagccactgatgggtccactcatggcctcagctgagaaaggagacgatgaacgtgtagctgacatgcacgaagtttaatttactcatgtccacgggggacgtttagagggcacgtgggaaattttccagcaatcaatgccttgagaaacttaaatggggaaatattattcatcgagaaagtgaaacaaaacactaggaaatgattatgaaatgttagtgattttcaaaagatgggcttcaaataaaagtctgcagagttttttttaaataggagggaaaatcttattttctaatatgtctcaggtatttttatgacttctactaaaattcacactgaaactttatcttctaaactggaatcattacttaattttaactaaccaacaaccacaaaagcagcagctactgctaaatattggattactgacaaaggaattcagttttgtggaatctggtgtttgcactataggttaagagttgccatttaaatgtttcttattcataattaggttttgttccgctttagaaaaaaataaattcccaaatgaattgcatcagtgtttccagcgtttcagctgtgggcttctaccaccactaagccgctcacctagagttgttacttttttgatgggatgacattccatggatttatgtactgaaatggatttcagattttaaagagaggaatgctctacgtgctcagaactgaattaaaatggcattatgtcaatagagaattcagctaccaaacaagaagtattgtttattttgcgatatgctgtgaaattcaaaagaaatgtaagaaataatctcttttcaatatactgatcatttagttaacttcctgagggatgtgaacagtgaaacagttggcaaacaaaacaatatatatcaggcttgtgtagtagtataaggtgcagattgtgtgatatgatttttattatttattttttgagacggagtctcgctctgtcacccaggctggagtgcagtggcgcgatctcggctcactacaacctccgcttcccgggtttaggcgattctcctgcctcagcttccccagtagctgggaccacaggcgcgtgcctccacgcctggctaatttttttgtatttttagtagagacagggtttcaccgtgttgttagccaggatggtttcgatttcctaacctcgtgatccgcccgcctgggcctcccaaagtgctgggattacagacgtgattcaccgcccccggccgtgatacgatttttaaagctaacattcagggcttatgtgccggcacttttccatgtattttttaaaaagtcattcagcaaacatgcacgtgagggggtggtagtcagaagaccgcggaatgaacgatcccgaagcacgtgggtgggaggagagcacctgtcaccagcgctttctcccaggtgtgctgtgacagaaaccggcaagggtctccgcaagctggggcctgagcgcggctccccagacggccgcgaccttccccaggcagggctgggctctggaccctcccctcacttcccagcgcctcgggccatcctgcttctccaggcctgagaggaactttctggaagtgctgcgtatcttcaagaggccggccagaagtgaaagccgcggcaggcctgagcgccggccccaggggaggggtccctcgggccctcgtcgtcccggggccgcttccccgactgtaaataagtgtctttaggatgaaacgccacgcgatagtgtcctcggaaccttcgcacgagatccagcacacaacatccgaccacacactggggcggccagcctcccgcgttcgcccgcctctgctcttggttgcttcgggcgcgcatttcggtccacggatgacctttaacaggtctcctgcagtggaaccaggggtgagggcctcgtccaagggcgtgaggggcgcgtggaaatggaacaacctcccaggctcgcatmctcctcggggacctcccagaaggctcaaccggaagaaaacccgcgaccmgcgcgaggacagcgaaagcgcaaacgccggccgccaggagtcgcagcgcgcctgcgtccagttcacgctccggctcccaggcgcgccccgccccccggcccggaagtgcgcaggcgctggcaagatggcgggaggggtgckcccgctgmggggcctccgcgccttgtgtcgcgtgctgctcttcctytcgcagttctgcattctgtcgggcggtggtgagtcaaaggctgggttcagcgccgggtggggctgagtggcagcagggccccgrgagctgcgaggaggccgggcccacgggcggacgctgacgcggggaggaggccgagtgccgggctccgggccgcttgtcgctgcatctggagtctggcgccctggccgcccggcccgaggccgcccctccgctccggcgacaccgagcccgccatcgcggytgcggagccctggcacggagatggagcgcttgggggctgggccggggaggcggaactggagcgcgatgtcatccttcggtccctcgttgccggctgacctgaactgatgtctactctgttgacgtttcgtccctaagctttgtgttttctggctgaccagccgtgaggttttcatgagcagcttattggcctggtgtagacccgccgtgttaaccacacaaaayaaggttttcttgtcccgggwtaacgtgtttctctaattgtacgatccttaaatttagagcaatcgcaggcgctggctcagtcaataaaggatccgggcccaacacgcacattcacagtagttcccagggcagcaggtactagacgttttctattctagtaaatayatgtagttatctctagtagtttctctttgtttttataaaaattccctttagtatacgaagtcactttccatttttgaatatttattgtattttagattatgtgaattaagggtagatacacagccatttycagtagatagtcttcgtatttataccttttgacgtttctgcctcctstctttttccaatcccacgctcatttgtcaccttatttctattatttttccacttcatccatcaaaataaccttcagtccgtgcttctttcccttcagcaaatttcctctactgctaaaaccctgttcctgatgttggaatattaaaggctccctcaggactgtggaaatggaaggattacagcgggactgatggagacttgaaatctagatctggttttgctactgggatcttgaacaaattatttatcctctttggaccttggtcctcatctttaaagcggtggggttggtctgacgacctaaagtcatttctgctttgtgattctaagtgtccaccttccagccacatagtcacgggatcaaaaagagtattttgtagaattgttccttaatacagtgagtaaagtaggaccagttttaaacaagcattagtgtgttttgctaggtggaggctctgactataatttcatcactttaaagtgacattacttcagtgaattgaaactggcagagatattttactgattcttatttggatgtaaaaaacagcagtgcacttgaattttaaactcagattactttttagagaaagcacaagagttcttaactcttgcaggcttttgaaagcccttcttttcaggaatacttgcaattttgatcctttcagttggtaaaaatacattgcacactcattaggttggttggaaataagttgcagcttactgaagatgttattaaagtagagaactgttttgaactttggtagcgtaaaactgtaaatattatattagcaaatgtggcttatcgaagtaccagtgtgaaataatgacattttaaagttgatgccctgaggatgtcagtggcttcatttctgaattagtgaattcagatgaaaagaacacgggattggaaatggagagatttgggttctagttcyagttttgccacagacttcctctgtgattttgcaaaaccctactgtaagttttttttcaacttacaaaatgatagtcttttttttaagcccttaatgtatacccagaattttctrtacattatttgtatatgagcacctttagttttcacggccacgtgggaggcaggaatgaagtaatgttttacaagtgtggtgctcaccaggtcccacagctggccgtgggcagaattctgctttaattgcaggtgtctctgactccagtcccatgcttcttcccttccagtgcagtgtctacttgctaatgatcacgtctcttaaccttagaagattgttctctgttattcgaatcagtattataggagaataagcttytctcttgcctctcacagaaagtactgaaatcccaccttatgtgatgaagtgtccgagcaatggtttgtgtagcaggcttcctgcagactgtatagactgcacaacaaatttctcctgtacctatgggaagcctgtcacttttgactgtgcagtgaaaccatctgttacctgtgttgtaagtactgcagcttacttattctaaataaattcattgtaaactttaagttagaagaacaattcagacttgattattgggaagaaattctgaagaatttttatattcttttatgrtttcccttttgagtatgtaagcagaaataaattwaaaaacccaatagacctttccatatcagctcactactgttttagttataatgataactgtcaagccagttgatgtctgctggaaatgcacttgacagaaatgttgctttgtaggactggagaagatctcagtctactagcatatctgaagcaagtctaattcgttcagatggattctgtgttctcaatagtgacagctagtgtacagagggggtggcagtgtctttctgccatagatgagcttttgaagggccagtgcttatctgtggtgagaagatggattcagtaaatgccggaatgcctggtagctctctagaacaaaattaagtggaacgcctgtcttatccagaataaattccagatagtccaaagatgtaatgtgaaaaatgaaaccctgaagtaccacagaaaacaccagatagttgctgttataatcccaaaatggagaatatttttctaagtatgaaataaagtttagaagccataaaataaagaattgatacatttgactcctaaaaattggagatttctgcatgacctaaaaaaaaaagcataaaggcaaaagacatggcaaactaggaaaaagcgtttctagaatatgtgacaaataatmcagtaatatcagtaatatataaacacttcctaaaacccacacggaaaagatgacagtcttgtagaaaaacagtgttaggacatgagcagatggttcataggaaaggaaatacaaatagatatataacatgaaaaacatataagttttctcatagtatttaattaatacatttttaacccttagattggcaatttttttttaatttgattaactctgagtttgtgagagtataagggtcagatgctcatatcttattaataggtaatcaaattgatcaacctcttgtaggcgatttgccatatctgttaaacttacacatgcacacaatcgttgagctcgtagttgtacatgtaggaatttatgttatagatatcattatacatggatgcagataagtgtgcttattttttagctgcattgctcattaaagcaaaagattcaaaagaagtgaaatgtctaagaactgcttaatttatggtacacgtgtaatagaataaacaccttgtagccattaaaaagaactaggcagctctagaggtaatgtactgatagatgtccaaaattaagtgaaagtattggggaacattaaatgtaggtgacataaatgtgcctatgtgtagaatcagctctctctggaagcacagagcgtacttggcctggggagggcaggggctcccggcggctgggccagacgaggccggctcacttctcactctcctgttgtgtcttgacatgtgttccatgtacatgtgtcacctactttttaaaaaaccattaaaaaaagtgtgttttaagcacatcactgaaaataggcagatgtaaacgtattattttgcagatccaactgtttgcctaaatcaagtgatgccttacccatatttgaatgttttccataaaaartggtttttgcattgataagaaaatgaatagtacttgcttcatcagcgcatatgccaaagttggaaccatacagagagaattaggatggctcttctgcaaaaatgacatgcaaatttgtgaaatgttaaaaaaaataacaaacatgggccgggcgtggtggcctacacctgtaatcccagcactttggcaggccgaggcaggtgaatcacctgaggtcagaggttgagaccagcctggccaacatggtgaaaccccatctgtactaaaaatacaaaaattagctgggcgtggtggggtgcgtctctaatcccagctactcaggaggctgaggcaggagaatcgcttgaacctgggaggcggaggttgaagtgagccgagattgcaccaccgcattccagcctgggcgacagagcgagactccatctcaaaaaaagaaaaaaaaataatgtgtgtatgtgtatatatatgtatacatatatatacatgatgcttccagagatgtgtgaccacataaaaatgattttgaaaaatatgcactgcaatgtaatgtcaggtagagtaaaaagactacaaagtgctttcagtataattccattttagtaaatttataaatatacatgtagaagaaacggaaagaagattaaaagtggttagctctgaacacctataggtttttgtctataatcttcaaatatgtaacatacaaagaacattctacttttgtaagcagaatacaaaataatggcttttaaaattgaaatgaaaaattctctggccaccagtgaacactcactgagcctccacacaccatgtggtgcttctgagttgggctgcctctggattaaacatgccacatgccctggtggtaggagcagctgtaacaaccctgagttgccaggctgtgcaaggtaggggatgttagggaaggttggcaactcggaagcaaggcggtgtgttaaccattacagaagcatcaggctggagttcagggacctggattccactcctcacttgaagctcagtgaccttcaacaaatgcattcatcagttccttccagccatccgtgattgtgactttctaaaataaattttcctcttttctgcattataaaagtatacgtttactatgaaaaatttagctaagcaaaagttatgaaataattatatcaccctgaaataacctttgctattttgatgtgaatttatctagttttttcccttaagtacatatgtttgggtgtgtagttttatgattatgaggtcacatcataggcatttgttttacatacatattgttttggtaactgtttttctggcacttactcctaggtcctaaatacaagcatttacggaattttgtgccrtgtgactgtgtagtcttactgacatcttaacagactacaccattgtgattgatgagttttgtgtcatttgctacataggatcaagacttcaaatcccaaaagaacttcatcattaacatgacttgcagattttgctggcagcttcctgaaacagattacgagtgtaccaactccaccagctgcatgacggtgtcctgtcctcggcagcgctaccctgccaactgcacggtgcgggaccacgtccactgcttgggtaggtcagagttcaaggacatytgtcaacaaaatgtttttctccaagtttattgaagggactttaaccagaaatttgcgagtcaagttacttaattagaaacatttatcagcagctctttagatgtgccaagcatcatcaataaactcaacgtactaaagtaaagcatccagaaaattgcagttctttttaaatgtaatatttgataaaataagaaaaacatttgaagtataaagcataatacacagtaattgacctttacccaaaataacaatgaaagcagcaccaataccattgcggccgcctgagtgcctgagtgcctgagtgcctgagtgcctgagtgcctgagtgcctgagtgcctgagtgcttgccttcacctggttgcctttcctcctcttccaaggtaaccacccttttgaattttttatttcacttccttttaaattttttctgtagttttattgtctatatgtaataaaataatattcaataatgcatgttttagaaccgtgtaaaatgatttcaggctgtgtgctcttctgggacttgcttatttcctaaacattgtggctctaggattcatccacgtgacttctcttcttttttttacttctgtgtaataatctattgtaagattgtatcacagtttattctccaatatatttggttaagtgctgttttccgctgttgtgactgttcaaatttctttgccygtctcccaatggcacaggtgcaagagcttcttcagcatgtactttccagcgtgtgtcattctttaaatggctgtattgactggcattcccacccgcgctatgtaactgttcctgatgagccatattctctccaagagtggttattcttaaatttggtcktaaagttgtctagacttcttttatattttggatattacctgtgctgtccctgaaaccctctcccagattttgattttttttttttttgcattattgtatattttcatgaacagaactttaaaaatataattactggaagttattagagttagtccttttttgtggtggttttaagaaatctttttctaccccaggttaataaagacaatttgctacattttcttttgaaagttgtaagtataacatttcacatttaggtttagaatccacctggaattggtcctggtagatggtgtgaggtagattctactttaattgtccccccacatggatggccagttgtctcaactcttccctgttgatccgtgtgtgacctctgtcataacactcatacatgaagtgtttgtatatttctggttcttgactttctcttcttttcctattgggtgatttttatgcctcaagactacactgtcttatatactcgtaacttccccgtaggtcttgatatgtgggtgagcatttcatgttcctcacgttgtaatcctaacttagctgatttaaatattacatctatgtagatagatggtaagcgctttgtactcttcacttcaacatgtattaccgtaaagagagttgacttttcacattttaaattttgagcccatttgttacaattaagtctttctgagagtattttttataccctgtatttttctttcttttttttttttaaggtaaccgtacttttcccaaaatgctatattgcaattggactggaggctataagtggtctacggctctggctctaaggtaagccttgttactcgtaagtgtaaaaggccgtttgcatttctttgggattggtggaatcttcagacattgagctcagtccccttcattcttcactcagatcctaccacgtgtgttagactctagcaaacagctggaagagtttagatgatcagaccagtacctccgtggagttgactggcaggcatgttagcttttctcccaagatgcctgcacattacgtttaccattctgaatgtaccacgaatcagtaaaatgctgtggactatccaaaataggcagttttatgatgtatatctttaattttaagtaactattataaaaagtaatacatgatgaacactgaaaactggaaaaatgaaaatgacaaaaacattaaaaattacctataatttcatcagcagcagataattataggcttatatttcttacatagaaatgtgctgtttgttaaacttctcaacagtactttaagaaattatagcagttcttcccaccaaagggaagggcaggtaagaccctggttaactgattagtgaaaaggttacgctgcctacacttgaagttttgagttcgtgcctgagaccctgaggcctgcagcattgcagccatagggcaggatttctcagcctcatcactgctgacgttytgggctgaatgagtttttgtcttggggctgtgctgtgcatagcagggtgttgagcagcatcactggcctctacctactacttgtcagtagcaaaccccccatcccttgcagctgtgacagtgtgtctccagatgttgccaggtgtcccctaggggacaaaattgccccttgctgagaaccactgcattagaatttgagctgaggaaagaaggatcttgcctggcaggaaaagtgtaactgaaaagtaaaagagggtgccaggatagaaaatgagactaacaaaaataagatagggcgggcgcgatggctcacacctgtaatcccagcgctttgggaggccgaggctggcggattgcttgaggtcaggagttcaagaccagcctggccaacatggtgaaaccccatctctaccaaaaatacaaaagcctgccatcgtggtkcatgtctgtggttccagctgcgtggtaggctgcaatgggaagatcacttgagcccaggaggaggaggctgcagtgagctggcattgcaccactgcactccagcctcagtgacagagtgagattctgtctcaaaaaaaaagattagtaaccattgctgacaatggttcaaattaacaactggctttttaaaaaaataaataaatgtttgaaacttggaataattttaatttacagaaaagttgcaaagatagtagagttcttatatacccctaacctggtttccctacattgttaacctcttacagtactatactgtaacatactttcaacaattaaaacttctcagcactcaacatggtttttttttttttttgctttttttttttttttttttttttaacggagtctctctctgtcacccaggctggagtgcagtggctcaatctcggcttactgcaagctccacctcccaggttcacgccattctcctgcctcagcctcccgagcagctgggactacaggcgcccgccaccacgcctggctaattttttgtatttttaatagagacagggtttcaccgtgttagccaggatggtctggatctcctgaccttgtgatccgcctgcctcagcctcccagagtgctgggatgacaggcgtgagccaccgcgcccggcaacatggtttcttttaaaatcatcactgtaatgagatgatgcccaaggtttgcttcagggtactctggaggggaaagaggagggttttgatgaaacacagctggccaagtgttgattattggagctgagtcatgggtactgttctctttactttttattgttaggtgtttagaaattttccataatatwgtttcagtattaytagatcttagaatttaaaagatccttaaatcttttaaggatttattcctaacattaagattttagagatgaatgaaaaaatagactgaaaacatggatgacttgatccaggtcgtccaggtggtggtgagctcctcctgactccagccctgaccccgtgttagtgcacttcctgttagactgggtctttgctttattttgactaaaaagcaatgagattgataactttaaaaaaagaaaacattggttttttagtacagctaaaaattgtatgtttacttttgacatttaaactgtcttcctgcccgtaattatttggtggtgtcagtttgtgaaatagtcacttgtgttccagttaagggctacgatcaggggaagccctttctcaaatctgacataatgtggtgattaaaccgtgactggccacagctggggtggaggtggtctcatggaatcctgtctgtttgccatcgcagcatcaccctcggtgggtttggagcagaccgtttctacctgggccagtggcgggaaggcctcggcaagctcttcagcttcggtggcctgggaatatggacgctgatagacgtcctgctcattggagttggctatgttggaccagcagatggctctttgtacatttagctgtggtgtgtgcttcagaaaggagcagggcttagaaaaagcccttttgtccgtaggagttgatgtggtgtgagtgatatatttctatgtttttaatgtacagcatctgtactttgtttgccttgataaaggtaagataaatgaaacgctgaactatgctaatctggaatttgtttttatttgcctgaaatatatttttttctgtgaaaaaattaaaacgtacttaagccaggagaatgaattatacagtgattgaaaatccatttaattcctatgacttttgttttgtattgcccaagtcaaactacatcacttgtatctccagcccaaatgtagtctgccttgaaaagtctttcagctgtgactgcaggaagtgggagtgtttttattgttagctaattgctgtgactgcaggaagtgggagtgtttctgttgttggctaattgaagttattaggctcagcttcagtcatgtgtaagttttgcagtgtaatacataygtagtctggtctgtatatatgaaaatttgaattaaactgcagaatgtttatgtctagttatggtttaaattttcttagtagtatataaaaggtaagagtactgaaaaattaataaaattgcaagttaagaaatactgtgggcctgttttctatattaaatataatcttgaataatcattacaacttacctttattgttaagaataacatttttatctttcagggcattactccattctaacagagtcataattggctggtttattgacacagtggaaatatataaatgtttttgagtatagatctgttatagaccctttatcggggaaaaaaaactcagttattcaaaaagatttttactcaagcttgcttttgaaacatttaaaaacttagcattttttctttcaaatgtgggtatctgagttactgctttttaaacacttgtgtgtattatccagaagactgttaaccaccatatcatatctagaagctataaaatatctgcatatttcattcagcagatgatttattgatttcagtttacctgaaaggtttcagtgatcacttgctgctgtttaaagcacagtccttttcttagttgagtgacagttccatctctcgtcgctaggtggcgcatccccattacatttgcttccccattctagttccagaaacagaaaaaaaaactggttttgttttgttttgtttacgaggaacttgtcacagagcatgagcagttcttcaggatgggagtaacccggtttatgtggacctttctttctgagagcaaagacacactttttgtatccgttaaactgttgattgagcaggtgtttctttagaagacgatcttttcttcaagaagtagcccctttgctaactataataaaaatgtctcctgagtctccttatgtagctctgtgtagaagagaatctaatacttccctgttgagcaaccatgcaaggtggaaccagggagtcggtgggaagttagtaggaagtatgcattgcccttggtggaaataggtaacagcatccttgattaaccatttttgtggctctggggcctgaattagataatgaagctgcagtgtctgagagtaaagctcaaagattcagaatccatgaaaggaggcataaatgaacttgttcccaaatcctaaaaagtttgcacaagggcatagcccttggaacctgaaggatgtaagccagtcaggaatgcttcagatcaaggactttgatagagctgatggcctgagacagaactagcaggaaatacgaagagattttcaaatagtacaaacaaatttatgaacgatgaactcatacacagccccaaaaagaaactgcaaagtaaaactatactttcaaagggcactagggagtgtgggtgcaatctcttgtagcaaatcccatgggcctctgctggcagcaaaatgccatgttggagtctgaccttcaggttctattcctctgctgtcttagattttcaggattgctataacaataccataaacggcgtggcttaacaacagaaatttatttcttaagagttctggaagctagaaagtccaagatgaaggtgctggtaaatttggtatctggtgagggccttcttcctcataacatcttctcacatcctcacatggtagaggcagggaagatctctctggggcctcttctataagggcactaatcccaatcctgagagctccaccctcatgacctgatcacctcccaaaggtcccacctcctgataccatcattacagtggtgaggatttccacatgtgaatttggggtggaaaagacacaaatactcagtccatcatgtgtgagctatgggctctgacccagggatatgattagatagccatcctgttcacacaggttgggaaccatatcagtcaaccatcctctattgatagttctctagacactcagaatttatcactgcagcaggccatctgtcatgatttccccttaagaatctctaccttgctttgtcagctctcttccatttaccccagtaatgcctcacgggaaggtgctgggttatttatgtctaccccctccattgtccctagaacaatgccgtgcacacagaggctctcatttatttgctgagttaatgccacgggtgtcctcaaggttttgaagggactgtgtacaattccagggactggcagttgaggtggctgcaaggagataatatatagaaattggcttcaagtaaatatttgtctgtaacaccatgttgatctgatttctgcaaattgctgaggaacaactggtttatggtgcgtataaaaagattttttcaaagatcttatgcttcaagattttaaaatgtaaaaataccttctctatgccacacaacttcatttctctgtactttttttttaatgccttatgccagacttgcatttattttgggcatatatcatcagctacggaatatgcaaatgattttaattcatcctgtaagcaatgagtggaaaatgagctgtacctgatgcagcttctcaaatacaacattgaaaaagcctgaaaatgaaggcactacataagtagaatatgcataaaaaggaaaaaaaaaaacacccaggaaaaatggaggcagattcctccgctcctgctctaaagcttcccctctgttctgcccttttggtagagtatgaagtgtcacatgaatgttagggggtagacacattttttaaacttttattgtatatacatcgtatgcgtttctttcatggtaagagcacttaaaatctactcttagcaaatttataatatgataactgtagtcatgctatgcactagacctattggttaattttgtaacctaggcaaatttgatttaaattcttttaaatgtattgaaattgtcttccataaacacaacacttttatgcaaaatacgctttgatggagacacgtggacataatttactaaggctccacgaaggcagggctctggttctctgctgtagctcagctctgagagccctgccggccatgcagcaggtgcacagtgactaggagtttgatgaatgagtaaggaggaattgctgggagtaagctaaacacctaaaagtattgctgagaatttttaaagtggtagagtgcagctggattgcagcatctcccttctcaaatacttaaatgataaacacactgtaggaaaagccagcacctccttcctgcccaaaaccagcaaacaaatgaaaactccacagcgaacaagcaaaaggatacagccaaatgccaaaaacgtcaaaaaattgtgaatacagggaaaaaaaattattgctcaggtgtgtaagattactcccgcaaatggccctgctggcgcaacaaaactcagaaagtctcactggaggccagacgtggtggctcacacctgcaatcccagcactttgagagtccgaggcgggcagatcacctgaggctaggagttcgagaccagcctggccaacatggtgaaacccccgtctctactaaaaatacaaaacaattaggtgggcgtggtggcaggtgcctgtaatcccagctactcaggaggctgaggcaggagaattgcttgaacctgggaggcagaggctgctgtgagccgagatcataccattgcactccagcctgggcaacaagagcgaaactctgtctccaaaaaaaaaaaaggtgggggggtctcactggtgaggaaaaacaggttaattcggagaaagagaggtatctatatctttctcctgttactgctgggggaagtgaaaagggctgctgggaagagaccagtgagagagggctcgtgaacaaacaggagggactctgatgggttcaggggttccctgctgaaccagataaaggatccaaagcctggggtgacccccaggggtcattgcatcattccctggggaggaaactttgattcaggacatttagaaaatcctagtcaagaaaccagagaccagatattctagcaaagatatagtctcagctgagcttttccctgcctcactcctagctatcagggcacggaatgtagaatagaacacaaaatacaacttgcaaaatgctcgaagagaaaaccaagggaatttgttcacatattatgaagttgtccttttacatgagaacaaaatgaaatgactcaccacccactagaatgactataataaaaggcattcttaacctgcctgcgcaacgtagttacgcctgtctctaaaaaaaataaataaaaataagcaggtgtgcgcctgtggtcccagctacttgggaagctgaggtgggagcgatctttgagcccaggaggtggagttacagttagctactgaggactaaactctgaccttttttccctcttgcccaaattcctatctaaggggctggggagttgcaccttataaaatctcaaagcagttttatttaaccctatgtgatgtggcttactttccaacctgactctggcataacatcacatgacagataaatcaaaatattttaaccccaaatatgtttctttgccatatcttgaaatggccccgcatagctgtctcttggaaaaatctacattctgcaaagaatccccttccctttcaggtcttttccctgacacagcagagaatcagtcacaaatctggcacctttttcagtctaagaaacatttccaatctattctctctgaagctcgcaatctggaggcttcatctgcatgataagaaccttggtctccacaatcccttatcataacccagacactcccctctgttgattagaggtctttagacaataacactttcaaccaattgccaattagaaaatccttgaatctacccatgatctggaagcccctgcttcgagctgtcctgcctttccagatggaaccagtctgcatcttacatgtattgactggtgtcttatgtctccctaaaatgtataaattcaagctgtagccggaccacaccgggcacatgttcttaggacctcttgatactgtgcctcactcatatttggttcggaataaatctcttcaaatattttacagagttggactcttcatcgacactgtgaccacaccactgcactccagcctgagccacagagcgagacactgtctctaaaaaataaaagaaaaagaaaacacaataacaagtattgatgagaatgtggagaaattggaaccttcatatattgctggtggggatgtaaagtgatgtagctgcccaggaaaacagtctggcaatttgtgaaaatgttaaacatagagttaccatgtgacttggggaatcttctaggtatacacccaagagaagtggagatatgttgtgaaagttgtcagcaccaaaatggggtcacttaggtcaaaccctagcaaaatgaatccgggaggccctgaaggaggagtactcacgcacatgtacctatgataagaactattacaaggactccctggaaaccataaacactccatgttaagctgctgctgtgaagacatctccccagcaacagccagcgtgaccaatgaggagctatgagcttcaacagtcaagagtttttgtttcaaaccagcttacatgactttctcctttttgtctttataaaagtttgccttgaccccagcatctttgggtgtttcttggttcattgtggcatgggtatcttggattgcaatcccccaccaatcccagataaactcctttggagagcctatctgtctattgttattttaggttttaggacatacactaaaaaactcgtttacagcaccattattcatagtaaaaaagtggaaacaacccaaatgtcccactgatgaataatacataaacaaaatgtagttcattcatataatggaatactatttcatcacataaaggaatgaagtactgatacacaccataaggtgaataaacctcaaaaacacggtgctaagggaagaaagccagttacactttaagctggtaacctttacagcatataaattacttcttaataaagcggtcttaaaaaaaaagaaacggctcagtaaccacacatacatatgatagaaggggaacgagagaacccagatgaaaggaaagacaggaagaaacacagtctgcgaaagaaagatgaagagttcatcttg

SEQ ID NO: 97855 - DNA, 151541 bp, Homo sapiens
  misc_feature (1)...(151541): n = A,T,C or G
tcccatgtttggggcagtccacatttccttatgcagctaaaacaaatgcttctcaggtgaaacatgttatttctaaaatcagtctagtttatccagtaacttcagctcagccctttaattctggtgcttagttgtggatgatcaattcaattattttatcattgcatccttaacttaagtgttgaaccataatcctccacaaagctgaaaaaaagacactcaatgtttctttgaccatccactgacaaagtccagtgaagcccaggtatttcatggactctttgcatcaacaagtaatacctgtgatgcatcacactgtaaacatttgtatgtcaggactttttcctgcaactgtttagccttttttttctttctttttttttttttgagatggattattgctctgttgccctggctatagtgcagtggtgcaatctcggctcactgcagcctctccctctgcctcccgggttcaagcaattctcctgcgtcagcctcccgagtagctgggattacaggtgcccaccatcacaaccggctaatttttgtatttttagtagagacagggttttaccatgttggccaggctggtctcaaactcctgacctcgtgatctgcctgcctcggcctctcaaattgctgggattacaggcatgaaccaccgtgcccgggctgtctagcctcttttgacccctgtaagaaactgcggttgaagtgaagagataccagctgtggtagcgggaggagaaaagagtgtggtgtgtgagatgacgttccttcgccttccctgctcgcaggtcactaagaaagcaagctgatcatttatttctagatatctgtacagaattctagcatagcacctatcacaatgctaagtgtacttcttatattcatcttttaaacatctttatatcctttttaaaatttatttgagacagagtctccctctgtcgcccaggctggagtgcagtggctccatcttggctcactgcaacctccacctccccagttcaagcgattttcatgcctcaacctcccaagtagctgggacaggtgcgcaccaccacgcccggctaatttttttttttgtatttttagtagagacggggttttgccatgttagccaggctggtctcgaattcctggcctcaagtgatccaccaaccttggcctctcaaagtgctgggattacaggcatgagccacagcccctggccgtgtaaaatgtttgtatatcttatacctagcacaactcccggcacccactgtggaacaagagaagaatgattctgctacatatagaggaatagttttttcatcttttttgggtgatgagtctttctttcagaaagcttaagaagtccaaaattttaacctttgtcccaagaaactagatgtttgtcaaaatttccatataagtttaggaagattacagatgccttgaagcaaacccatggacctcagagttaaaactccctgaattaagagagagggtaatgagaaattgtacaatctttactaattcatactcttggtcaaactaatatcacagctgaggtggggttactatacataatagataccatgattacatggaggaaagagcattgtagcaaatgcaatgtggtggtctacacaatggtggtaggccagtgtgaataaggacttgcttgcagttttcatgtgtaacctgcctagtgatgatctggagacattatcttccttcctttcttgggttaaatgggatcaactatttctattttcccattaaaatttctcctccttaatttatccttcatactgctctggcactggctggttcacacctgtaatcccagcactttgggaggctgaggagggcggatcacttgatgtcaggagtttgagaccagcctggccactaacatggcaaaactctgtctctacttaaaaaaaaaaaaaaaaaaaaaaaaaagctctggtatttacctcctttctccctgctcactgagtccttcagattcaaaatgattgtgctgtttctcaggacttgcaattactctagatcttgagagacttaattggtctctataagactttagatgcaaactctgagaccaactcataaactaaagaagtatgccatcaaagtgaacaaagtgaattggatgtctgatgctaagatttgggcactttagaagatgccaggggtgagaatgtttgaaacctgatgctaaatagcatataaactaattttgccttcacaaatatttgtgaggctaggcaccgtggctcatacttgtaattccaacattttgggaggccgaggagggaggactgcttgaatctaggagtttgagaccagcctgggcaacatggtgagaccctgtctctacaaaaaaaaaaaaaaaaattaggcaggcatggtagcacacacctgtggtcacagctactcaggaggctgaggcaggaggatcacttgagcctaggaggttgaggctgtagtgagctgtgttcacaccacagcactgcagcctgggcaacagagtgagaccctgtctcaaagagaaaaaaaaaaggaaatatttgctagaacatgttatacgggtggaaattgacacttaaacatattcaaataggaatttgattacaattccagcacaaatgctgtcactactatatcccaccactatcaattctccattattattaaggagtgctcccatggtggggcaaaaataattgtggtctaaacttttttttggtctttgacttgaattactctggaaattttcctttcagattttgtgtttgtttagtaggttccttacaatatatgtgtgactaaaattattttaacagccttaattgtattacaatgacaaagatttgtagatcttgtgacagcaagattaaataaactctgttctgtatgagtttatttaattccttttcagtggctgatatttgaacctctttcatttagagtcaatccagctacacaattcacaaagtgcctaaacaagtccaggaggggttaaagtacacaccaccaatataaaaagtgccattctattgcataatctacagtcttgtagttgaatctgggttcttgtgaaattttaatcaagtgactagggaaggtaatatatgattgggaagtaatataaaggaattctataaactactaaatctgctgtatgttttgctccatggtcccattataattttcaataagaggaaatttccaaattttaccttttgttgtgtacagaggaagttttattttatttatatatatattttttgagacagggtctcacccttgctgcccaggctggagtcagtggtgtgatcttggctcactcaacctctgcctcctgggttccagcaattctcctgcctcagcctcccaagtacactacaggtgcgtgccaacatgcccagctaattttttttcttttttttgtatttttagtagatacagggtttcaccttgttggccaggctggtctcgaactcctgacctcaagtgatccgcctgcctcagcctcccaaagtgctgggattacaggtgcgagccactgcggccggccagaggaagtttcataaaggtatacagttgaaggggtagttttaaaaatatatcattagactatttcaaacatcaaagaaaaggggatgcaactgagatgtaaatgatcacagagggaaatatcattggaactaagaatggcatataatttactaatgacacagtgatcaggtacttatttctgataaccttgaatatcatgcaggtcacattttattttgtgattagagcagagcaaacactatttactaatgaatttatttgtgttttccgtcactgaaatttgaaagacaaaatgaaaatctaggtctctatgctgttgcaaagtatggccaagaaaactagccaactaagcagtttttcaaagaaggtgtcttgggccaggctcaatggctcatgcctctaatctccgcattttgggaggtcgaggaaggaggatcacttgaagccaggagtccaagaccagcctaggcaatatagcaaaatcatgtctctgcaaaaaaggagttcaagactagcctgggtaatatagtaagaccatgtctctacaaaaaaataaaaaataaaaataaataataaaatgaattagccgagtgtggtggcatgtgcctgtagtcccagctacttgggaggctgaggtgaaggatcactttgagcccgggaggagtttcagtctgcagctgcactgagctatgaagctgccactacactccagcctgggcaacagaacaagaccctgtctcaaaaaaataaacaaacaaaaaaacccgaaagaatagaaaagaaaaaaaagaaaagaaaagaatataggccaggtgccgtggctcatgcctgtaatcccagcactttgggaggccaaggcgggtggatcacctgaggtcaggagttcgacaccagcctggccaacatggtgaaaccccatctctactaaaaatacaaaaaattagccgggcatggtggtgggcgcctgtaaccccagctactcaggaggctgaagcagaagaatcacttgaaccagggaggcagaggttgcagtgagccgagattgcactgctgcactccagcctggacaacaagagtgaaattccatcttaaaaaaacaaacaaaaaagagaatatatctctgtaagaagacaggtgcagggggtgggagtggacactgatttttcaaatacctatttagatataatccgtgcttaatgcaggacctaatgaggtaagtgaggcctgagcccacagaatccctctcaggggaattcgcagtttaggtcaagccacactttggtgggcctctcttcactttgctcttacctaatcaggggaaatctgattaacatatacaacaaagcctcaacggggaataaaaaggtcacaaaagggcagagaaggattcacagaaaaaggaagaggccttgccagttcttgactagttaattagggtcagaaccgtactggggatttcctataccctaagtttgttaagtgattacatcggtctggggaaaagggatctgctcagagtgattcagtcaactttcttagtatcgggtggtgaatcgcatttcctctctgctaccctgtatactgactaatgggtggcgtatggggggtctccaagaggtgtgtttactccaattcagaagctataggatttcagtaggccttggcctgttgggcaatgtgaggtttcaatctttctctctcaaatgagtggggctcttatcagttatgaagggacttcccttgggacttgtcacgacaccatacagcagagatggcaatttgagggcagtttcttgttctgctttgccatcttggggtggctctgaaaagctttctgaacctccgacaaaagaaaaatgttcacaggattgattactacacacaattcagtgaagacaactgggcaacctgaatcaaatgttgagatgaaagataggtgagctctgatgacacacgtttaaattctaggtctacaggtaaaactttgtaaagggccttgcctcagcgacatctgtactgggccctcctttgctgagagcttcttaccccaaccctagcactccaagtcccgagaactgctcaatttcatgggaaaaagtctctataattatatatatatgtatatatgtgtgtatatatgtatgtatatatatgtgtgcatatatatacacatacacatattacaacagactgattttcatgagttgtaactatccttgtagataaaaaacgaaaccattcgaatagcttaaaaaccatgcccacgtggctactggcatcaatattccacacaagattaaaattacttcccaagatgcacaccctgcactccaggtaatatttcaataacttgattaaaaatttctcagaagtctattagaatcagaaaacgctctgcggtgtgggtgaggattttaaatttttgcaacggaaacttttggctccacgaacagaaaagcaagagcaaaaactcagttaaatgcgttcttcctccatctttgcctagtccaaaagraaaaaaaaagaaacagaaaaaagaaaaactgtttggaagagtagcgttgaggtttgctttttacctgtttttcctctagaacagccaggtggattcacatgatccaattttttaattgtcttctatgtcccactccgaataacccggatgccccagcacaatcagagagatcgttttttttwwaaaaaatttcagcctccaaaggtaggaggggagtgttaggggagaaagtactttaattaaaaatcaataactcgaggtttttgggatacggtttgccatttcctaattaagaaatgggtttgacagtccctttgtacacactgctatgcaaaccccaaagggttggcggctgtccgggcgatgacactccggtcccctgcgmgaccccgggccagccaggcccstccgccgccggcctctggggtccgtccccggctcgcgcagacctctcgcttctctcggctctgtctcctgcgctcagctctgctcggggccggccgcctcaggctcgccgccaccaggtcgttgcaaataccttttccctccccggggccccagcgcgcggccacctcccagcctccccccctcccaccctggcagcggggccctttcccggctcaggaacagcagcagcccgggccgcgccggcaggaagcgaggcccatgttgctgctgttccctggcgcgcctccccgccctccgggggccgccacggctcttccgcgctcccgggcacccccctccgcgcctgcgctgtgccccacgggggcggggctcagattcctgtcagcggcggcggcggtggcggcgaccgtcagttttcgctgaggagaaacacgaaacggaccctttggctctcccccttccccttccccgtcctgaacccctctcctggtcaccgagaatcagtccccgtggagttccccctccacctcgccatcgtttcctcggtcctcggcccagtggaagtcactaccctcgaggaggaggcagcggcagccgccctcgcgtcgccgcccccggttcggtgcccgcggtcccggagaggaggtgccgccgccaccgccgctccccccctcccgctgccctcgggccgggctgggtcgagctgcgatgccctcggacttcatctcattgctcagcgcggacctagacctggaatcgcccaagtccctctactcgcgaggtgagtcaggctgtggggggtggggcgtgggggcggggagacagggagacagggagacagggccaggggaggcgaggggtccccgtcccgccgggggcggctgagccgcgacccccatggcttctttggccggagcgggcagaggccgaagggatcggggtgacggtggagggggcgggcggagcagtggcggcccctcccccgcggagccgccggccgctcggggcccagattccgtcggcccccggggctctgcggcaccggtcgcttctagccgctctcagcccgtccggccccgccaggctccgcgagccgccggccccggcctcccgggctcggggatggccccagactgggccccgcgctggggccaccgcgatcggggcgccgcgtcttctcttaccgggaccctcctccccagcaaagttgcccccaagcgggcggcgtggcctggagccggttctgagtgcagggtcaccattttcctccctttccagcttgtttttgcgccgtcgttccaccccctctccctccggcctagtccactccctccccatgttgggacagcccccctcgaccaggcgttcttcctttcctcgtcatcttcttgctggaaagggcccgatggaaagggcccgaattttcttttctttttttttctcttcccacctccgtggcattctaattacttctcccttctcctttacaaagatgggggtgccctctctggattggttttattcctctcctctcccaggaggaccagcccaggcacagacgctgtcctttgagaattttctctgcttttccgttcaagggctggttgcagggagggagctcaggcagagacttttcatttaagaactcttttggctaaggcctgcaggggattcccagcatctgaaatattagcactggagctgatccctactcaggtgaaattcctttactggacaccacaagaatgtgtcagaacaggttccctgtgcaaggggcttcaaaaccaaaatattcccactgcgctctttacgctttttaaaccaccgggagggggcaaaagacataactgggttgttaactattcatttcaccgtgtaaaaaaaaatgtaggtgtttcttctgcttttggtttgatgtatccatccatttgcttattccaccccctccaaaaaagggacttcaccttcctactagtgtatctaaattgtttaagtgaatcagagtgagatggtttactctgaaaggtgctggactttacagactgaccattgattttgtacacagagtcctacttagtaattgtagccactgtctgttgctccaatgactttagttggcagccaccatcctgtaggatgtttttcgggcaacattacctgaggtactttagaaatattgtagttttgaatgtcaaaaaaaaaagagacatatcaagagatgattcttagagcagggctaatgtgttagaattgagtgctaaaaatagccaagacattaacaccatttggggagtaatcatcagataattttccatgaaacatatactttatgaaaatctaagtttagcttcgagaccaatgtagagacaattcagcctcttttgcggggaatatattcacaaatatgggctttagcgcttaaaaatacactgcagttggccgggcgcagtggctcacgcctgtattcccagtactgtgggaggccgaggcagttggatcacctgaggtcgggagtttgagaccagcctgaccaatttggagaaaccccgtcaccccgtcactactaaaaatacaaaattagccgggcgtggtggtgcatgcctgtaatcccagctactcgggaggctgaggcacgagaaccacttgaatccgggaggcggaggttgcggtgagccgagatcgcaccattgcactccagcctgggcaaaaagaacgaaactccgtttcaaaatgtatgtgtgtatatatatatatgtgtgtgtgtgtgtgtgtgtgtgtgtgtgtatatatatatatatatacacacacacacattgcagttatataagagatgtatgctatccttggcatttttttcctcattcagcataaaaagtacctaatgctttttgtgtttttcagattctctgaagttacacccatcacagaattttcatagagctggactattggaaggtcagcaaagtaccattttaaagcatattgtgttagtatgcaaaggctttctctgaaatggagtttaaatgggaaagtatgaaactttgcaaactcacacaatgtagttttctcctaaagagtctgatccttcttttagagcagctgaatgtttcaatgggttttgttgctgcgtttgatgtgcttgttggctgttctatctgctttgagaaacattgaaaaaaaaatcattttaaattatgtgttgagtgttctactttagaattccagaccttcattttagctttttatacacaaaatagaatgtgaaaaggcccaaacattaacatgaatataaaagagtgacaccaaacacataattagtttgaaaattcagaatttagaacatttatatgctgagcatttcaaaatatgttaattatttattgcaaaagcattgatgccattgttattgcattatacttaagggtaaggaaagccaagtaatagcgatgatgattgagctatgcttagaagaaaggggtttagaaagttctggaaatgttaatagagtctgtagattagtttaaacagcttacacttactttagaaaacttttggctttgtgtgtgtgtgtgttttaacattttaagacataaaatagtcttgtgtttttgtagattttgaagtgatttcacatatatcatctttaaatctttataattttggaattggacagcaaaggtactaatttccccattgtagagaagagaaactaaggctgaaattaagaaaccaaaaaaaaaaaaaagtcccacagtagaagaaataatactttctgcgtttcagttagtgctctttatgcaaagcggccaccgtgaaatacacatgtaaccagtaacaaacattttatggtctactttaaaaaggccctaaatatttaagtttgacttgagaagatttttgcctcccttggaggtagtccgggatagtggggggcaagtgggttttgtagttgagcttaaatttgaataccaacttagctccttattagttctgtgacttcgggcaagtgattttacctctctaaactttaatattcttcctgttaaaatgtagctgtctcttaaatttagtgagctaatgtgtattaaattgcctagcatagcgtctagcttaataaatgttagttttttcctttagtatcagctaaatttttttaacagtataatttagagcatataaaatgttctcaaataaataattggttaaatttgttttgtacgtgtaagaagcccatagatatacattagtatgaaaatcaaatatttttaaaactacaatttgaagtgagaaatttttagcagtgtttcttagtgaagcagatttctggtttttattcatattcaatttgtgaccatgttgtagagacatatttgtctgtacaaacccatctcatttcctggacaacaaaccatagagtgtcataatcatagagatgatcagggaggagaaagacatgaagaaaaaaatgagtgttaattatttaagcaaatatttttagtgagctgatggaaatacagacaaccatttagcatgtttatttacatgtttatgcctaaatactttcgttaatttttcattttagttaaggggattctcatttaaagtaaggctacccttttagaaattatatataaaatataacatgtataagtatcaattctgtcatgccctttaaaatgttttgagacagggtgtcttaaaaaagttgtttgcttctgtaatgaagtgtctaatctgtgccacctcattgctatttcttttttattattgacattttaaagaatacataaaagtagagagaataaaataagccccatatacccatcaccacagtttaaccagtatctaatcttgcttcttttatcccttcttctctctcaagctggattattttaaaacaaatatcaaacatcagatcacttcatacataagtatttctgtattacagtgactttcttatattaattattattgatataatttaattgttaatataattattgtattaatttttaattactctgtatagtttataaactatttcttggaatattctagtttatttcagcaaagtctcttgtgactctcctgccctcttttcaagacagagtgctgcaggaggctaccgcttctagtatatagtatatcctataacctatgttgaaattgtaggccatgctgctagattggagttcatattgttgctctgacatttacttgtatggccttagcctaataatttaatcttttttgcttcaattttctcatctttaaacgggagcaataatagtgcctcatcctaggtttttgtgaagattatttgaggcaaattcgtgtaaagcatttaatttagcacatgctaagtgctcagtaaatgttagctaaagttaaaaaatttttaaaaactaaatgctagctgtagagtgtttactgtgtgccaagaactttacaaataagaactcctgaggtgggcatatcacttgaggtcaggagtttgagaccagcctggctaacatggtgaaaccccatctctamwaaaaaaaaaaaaaaaaaaaaaaaaaaaagccaggcatggtggcatacacctgtaataccaactactcgcgatgctgaggcaggagaatcccttgaatctgggagacagaggttgtggtgagccaagatcactctactgaactccagcctgggtgacagagtgagactctgtctcaaaamaacaacaacaaacaaacaaacaaacaaaataagaactcagcgaattctcctgactaccctttgagatggttattattatcctactttagagatgagcaattgaaggcataactcacccagagtcacaagctagtaaaytgtagaaccagaattccaacccaggtagtctcactttagcctagcctcttgactactgtgctgtactaactcccaatggtatatactatcaagttctgtctagtaatatttatgtatgcatgttttacatcagtagtctagattttcatctataaatagtatttaaaaacttggcccagagtgaggggaatttaagtaattggtgtgatataatttaatttttttatagaacgtacgttttccaaatttaaatttttttttttkggggaaacaaggttggaaaacctgcacttgggtattattattattatttattattattatttttttgagatggagtctttgctctgtcgcccaggttggagtgcagtggcacgatctcggctcactgcaagctccacctcctgggttcacgccattctcctgcctcagcctcctgagtagctgggactacaggcgactgccaccacgcccggctaattttttttggattttttagtagaaacagggtttcaccatattagccaggatggtctcgatctcctgatctcgtgatccgcctgcgtcagcctcccaaagtgctgggattacaggcgtgagccaccgcacctggcctgcgcttgggtattattaaactttagaagtagattcaaaatgtctactattcaactgagtttgcatttaaccttcctatcaaaacagtgctagtctttcttgcaacctctttttaaatttaatacgatgattgcctgacaatgggaaaagggtcctggctaattaattaatgttataatacatggccattaaatgatgtttctggtaaccccataattaacatgtgacactcttaataaaataagtaaataaaaattatgctgttacaattatattcaaagtaacttgtgttacaaaaatcctgaacaaaagtatacatcactgattttctatttttcaattctatttttgtattttccatctttaaagaacatggtttatatattttttttaaataaaattgtttgccattagtaagttcaaattcgaaggctaggattcctttttgaagtgcctgggaaaaaaattcagctgcagagaaaaggcaccatttgttrtacattctataatgaaaactattcattttggcaaatgaaaaactaagatagaaatgaaactgaatgaatcattctagaaatagagaaatataagattatagaaaaatcatagataaaacaggaaaaataagagtataaacaaattggaaaaatagataaatataaacaatagatttaacaattttaatgattttaaaagcatgagttaagagattatatatcaaatgaaagaactggttaaataagagctaaatgctgatctgatataatctttgttatttatttatttatttatttatttttgatacagagtctcactctgttgccaggctggagtgcagtggcatgatctcagctcactgcaacctctgcctcctgggtttaagtgattgtcctgcctcagcctcctgagtagctgggactacaggcgcgtgccaccacacccagctaatttttgtatttttagtagagacagggtttcaccatgttggccagggtggcctcgatcccttgacctcatgatccaccctccatggcttcccaaaagtgctaggattacgggcatgtgccaccgcatccggccacaatctttgtttaaattaaacatttaagaccggaagatttttaaaagaaaatgtgaaatatgacaatgagttaagagaaaataaactatgattttttttttactactgctaatctatttgatatggtaccatccagaattatacttcatagtgcaaaaatggaaaatcctaaacatagtagcaatgttttattgactttatagaatatttctgatttatatttcttcctagggcccttgttatatcatagatcataaatgcctataatattttatgtacaaagatacctttttggaaaggattttttgaaaacatttaacatgaaaaataatctattgaattcttttcttgtttagtatctaataatctctgtggatccatgtctagtaaactaaaagtattatggaaataatgaagttcaaacatgtcaaaagtcatacctagttcatcccagcttcttgtctttagatccatctctttctgattgcttaccacctgtttttgtgtcccttcctaaactctgctttcattattttcactcaatactggaattctattgcttatttaaaataaaaggatataaattcatattctaatccagtggttcttggcctgattttaatttactcttgactctgattattccaggagtcccctaaaatttcaaagtggtagtacagaaaaacatttcccagtgtgattagtattatatataaaaaacagccactttttttttttttttttttttgagatagagtttcgctcttgttgcccaggctggagtgcaatggtgcaatctcagctcaccgcaacttcacctccaggttcaagcgatttccctgcctcagcctcccaagtagctgggattacaagggcgcaccaccacacctggctaatactgtatttttattagagatagggtttctccatgttggtcaggttggtctcgaactcgtgacctcaggtgatccacccacctcggccccccaaagtgctgggattacaggcgtgagccactgcgcccggccaaaacagacactttttatatgaaaaagttgactcctcagagtatattttatattaagagtaacaggtaactagaaaaaaataaagattattcagtggcataggatatagaccttttaactttagagaggtaaaagacatttttcaatagaaatgttgcttattaatttgtattattgtcttttcttgctgttgctaagattttatttcaagttacgcaaagaaggttgctgtgtcttctgtttgcttttgtgttaataaaagtcaagtttaaataaactaacagagtataagaccaatgataattatgtacttgagtgaaaaggtagagatttcctctatgagttaactacagataatggatctagctttcagaataaataaacttgatgtaataaaggatatatatatttaatcatttgaactaaacatttgttacatgagagttcagttacttttatttgttcttaatagcttttgaaaaatatatacttttctcttttttttttttggtttttgaaacggagtcgtgctctgtcacccaggctggagtgcagtggcacaatcttggcttattgcaacctctgtcacccaggttcaagcaattctcccaccagagcctcccaagtagctgggattacaggcacgcaccaccatgtccagctaattttttgtatttttttagtagagatggggtttcaccatgttggccaggatggtctcgaactcctgacctcgggtgatctgcctccctcagcctcccaaactgctgggattacaggcatgagccaccgtgcccagcccattctcttttatttttaacatttatgtggtaaataggtaatgatcattattgcttcccacccatgaatgtttatcacttctttttcattcaggaaacactgtgattagtcttttactgaatttggtatttagttttgaagatgagagaagaacagaaaagtttctaatagtgagctaagttgttgattatgcttatttatttatttatttatttagagacggagtctctctgttgcttaggctagagtgcagtggtgcgatctgggctcagtgcaacctccgtctcttgggttcaagcaattctcctgcctcagcctcatgagtagctgggactacaggtgcacaccaccatgcccagctaatttttgtgtttttagtagagacagggtttcaccttattggtcaggctggtcttgaattcctgacctcaggtgatccgcccgcctcagcctcccaaagtgctgggattacaggtgtgagccattgggcctggctgattatgcttatctttataaaattagttttacaggaggctgaggtgggaggatcatctgagcccaggacgtcaaggctgcattgagcctgcatgatcatgggatcatgccactgcactccagcctgggcaacagagcaagaccctgtcttaaaaaataataataataaaataaataaataaagcaagagaagaaaaaaatttagttttaataaaaaaaactgtacctgaggcaatctttgtaggacatgctagtcaaaagaataaattcagtgttagtaataattgaaaaccttttttgagcaatttatatgtcaagcagtttatgtttaacaccattttacatatatttttcacatttaactcttagaaaaatcctgcgatgtagtaccagtatccctatttcgtaaatgaacaaactgaggtacagagggatctactaattttcccaagggcacatatctcgtggatgaggctggaatttgaacttcaccagttttaccccagagctgtgagattatattgactgtcttaacagtcagtaagaacatttgaggccgggctcggtggctcacgcctgtaatcccagcactttgggaggccgaggtgggcggatcacgaggtcaggagatcragatcatcctggccaacatggtgaaaccccgtctctactaaaaaaatacaaaaaaattagctgggcgtggtgggcgggcacctgtagtcccctgaggcaggagaatggcttgaacccggaaggtggagctttcagggagcggagatggcgcctctgcactccagcctgggcgacagagtgagactcggtctcaaaaaaaaaaaaaaaaaaaagaacgtttgaaattggcatttatactttgggccctaataagattacaccattgttcagatggtataaaaagaatagtttgtgtaggattctttactaagcagcttccataaagtaatgagacaaattttataaactacatacaaaaattcataaagaatatgattatgactcttttggggaagattttaatactcaaaattagcaaatcattgcctggctttggtgagtgtctttaacatttagaggaagtgatggctgatcaaaacacctatgttggcctagctcagtggctcacgcctgtaatcccagcactttgggaggctgaggtgggcggatcgcttgaactcaggagttcgagatcagcctgggcaacgtagcaaaaccccctctctaccaaaattagccagggatggtgttacgcacctgtagtcccagctacttgggaggcaggctgaggtgagaggatcacatgagcccaggaggtcaagaaatacctctctcctggctgatgatgggactcagaagtgaaaagtaggagaaggctaagcagaagccaccacctaaggggaattactttagaaatgaaggtgccgtggggctcttgatttctttggcagtagttttatggaagcatggatgccattgttccctatttctgctagtatgtttcagagacaaagtaaattcaagaagagatgagcaacagaagaaatagtactaatgtgagctatgtgaatagtggtattttgcatagagcctttattaatttactttggttctttctgctttgtcttttttaatctgcccctttcaccccgtgtatccgttttctcacggtagtctatacattttgttgttctgctatggcatcttgtatcctttctctatttcccttcttctgaaaacaaacgtctataaaggaggtttgctattgtaaattgtagtttagaagttaaccctccccctgtggtttagtctcttctaataagctataagcaacatgggccagaacctatgtgtaaattcatcttgagtgaatgaataaataacactattatggctaagtaacctatacttgcacatatacatgaaaaatatatggttggctatattatggaataatataggaatctataaaagaacaaaaaatttattacctttatacccagttttaaaaatactgtgttcccttttagaaggttgtggtgcttgaacgacaacaaaaaggtaaagagtacgcactgtatagacccatttatgtgaagttctttaaaagacaaacctatggtaagaaaaagcagatcagtagttgcctggggctggagtgggcaggattaactacaaaggaccaaaagtagctttacggratgattgaaatgttctctgtcttgaccatgtgattacacaaacatacatrctttttaaaaaaactcatagaacatttaaaatgggtgcatttctatacttctataaaggacacgggttatatatattctgccactgcactccagcctgggcaacagaagaaacagtattaatgtaagctatatgaatagtgatattttgctattttgggaagctgaggtgggaggatcacttgaacccaggaggtagaggatgcagtgagcagagatcgtgccactgccctccagcctgggtgacagtgagaccctgtgtcaaaaaaaaatttttttttttacctgtactgaacatgtacagacttctttttcttgttgttattccctaagtgatgcagtgtaacagctatttatgtagcacttacattgtattaggtataagtaatctagagatgatttaaagtatataggaggatgtgcataggttatatgcaaatacaaaaccattttatattagggacttgagcatctggaaattttgcgggaagtcctgcaacccatctccaacagataccaagggacgactgtactccgatatatagtttctatagttaagcataaaggtgaaaacagaatatgagtttttggtcccttacaagtgagtactatcttgtgcttaactatgtatcataaatactaattttgagtaaaattcagatgtgcccatagtcatatatatactgtattctgatagctagtttgagatattaggcattaaaatgcttttattagcaattcaatagaacacttaaaatttgttggtagaagactgattacataactcaaattatttgtttgaattaaagttttcattacagtcatctaagtcaataaaactcgtgtttaagtgtgtcttatgacagtgaccataagccaaacacagacttaagccaacaaatagctatcctttacaatggagttgtgaatttgttaatgtttttcttttctccagtttataagtagcaacttgttggattgtcattctgaaacactgaaacaaagattttacttgaaaaaaaatactatggtaaaatggaatgaataataaattaattttcccaaatgtcaatattcaacttataaacaccttgataattgacatttgtaagaactttagaaacactataaaagttgcatctgaataagtttttttttttttttgagacggagtctggctctgtcacccaggctggagtgcagtggcgtaatctcggctcactgcaagctcctcctcccaggctcaagtgattctcctgcttcagcctcccaagtagctgggactacaggcctgcaccactacacctggctaactttttatatttttagtagagacggggtttcaccatattggccgggctggtctggaactcctgaccttgtgatccgcctgtctcagcctcccaaagtactgggattacaggcgccggccactgcgcctggccataagttttaataaaattatattgtgaactccaagacatttttctgtattcttttttgtgtctgttattaaattatattctctggaatattgggctaacgtagggtgaatggatgggaaaataaacacagatgtaattttataattatttttaaagaacttttcattttcttagtgaatttttgcctataatattgggtacaggatgagaatttatatgtaatatttgaattatagatactttggataaaatgacttcttaattccttaaaaaactaattattgcttttttttaaaactaggtaattaggtagttgaaagacagaatgtcattaagttaactaaattaccactgtattacagtaaatacaaacaacatacttacagtgtaaactatggtaaataaaaactaaaaaaacacttccttgaaagtattttttaaccaaacttcacaaggatggatagaattaacactataaattctgcacagaaaaaaaatagtgcatactaaattgagaacagatgcacagaagtgctatttttagaaattaaaaaatggtaaagatgataataggcagatcagaagtcccacatatttatcagggttgtaaataaaaacccagttcaaaaacatgcattactaactggctgtgtgatttttaggcaagttacttaacctttctgtgactgtttgttcttgtaaaataggaataatagacttatagaactgtaacgaggaatggatgagttaatatttctaaagcatttggaatagtgcttgacacatagtaagtgctatatgagtgcttcttaaataagcaaaataaaagtatgtacccagaggaaaattacttggcaaacatacttagaatgtagcaagaaaccaggattttattagcataagcttcagaacaactcaagtgttgctaaatttacattacattacatattaatgtaataactattttaatgtaatatgtattttaatatgtaatgtaattacatattaaatatgtatataattacttttaatatgtaatgtaatgtaactacattacatattaaaagtttagggctgggcatggtggctcctgcctgtattcccagcactttgggaggccaaggtgggtggatcacctgaggtcaggagttcaagaccagcctgggcaatacagtgaaactgcatctctactaaaaaatacaaaaaaattagccaggcttggtggcgtgtgcctgtagtcccagctactcaggaggctgaggaaggagaaatgcttgaacccaggaggtggaggttgtggtgagccaggctcttgccagtgcactctagcctgggcgacaagagcgaaactaaaaaaaaaaaaaaagtttaggcatttatagcactgtgttgcgcagggtttatcttcctaaaatacaaatccaaacttatcacttgcttaaataatcctttagtagtatccatgggttttaggatgaaatccaaattctttttatttttgagatggtgtctcgctctgtcacccaggctggtgtgcagtggcatgatctcggctcgctgcaagctctgcctcccaggttcacgccattctccggcctcagcctcccgagtagctgggactacaggtgcccgccaccacgcctggctaattttctgtgtttttagtagagacagggtttcaccatgttagccaggatggtctcgatctcctgaactcttgatccgcccacctcggcctcccggagagctgggattacaggcgtgagctgccgcacccggccgaaatccaaattcttaaaacctgggtcctcattatatttcttaaaaaaattgagaaaaaattcggttaacaaagttcattttgtttgtttgtttgttttgtttttgagacagggtctcactctatcacctaggctggaatgcagtggtgcgatcctggctcactgcaacctccgccttctgggttcaagtgattctcatgcctcaccacatgagtagctgggactacaggagtgtgccaccacgccaggctaattttttgtatttttagtagaggtggggttttgttatgttggccagggtggtctcgaactcccgagttcctttttattgcagaatagtattccattttatggatatatcacattttgtttatctattcattagttgatggatatttgtgtcatttccacattttgactgtcatgaacaatgctgctgtgaacattcatgtacaagtttttgtatagacagatgttttcatttctcttgggtctgtctatacataggagtggaattattgggtcatatggtaactctatatttaactttctaagaaactgccaaactgctttccatgatggctgcaccattttttcatttttaccagcagtgtatgaaggttcagattttttcaaatttttttgccagtacctatctgtctttttaataaagccatcctagtgggtatgaattggtatttcttgtgattttgagtaaatgtctctgatgactaatgacattgagcatcctttcatgtgattactagacagtagtattaatatatctttggagaaatgcctattcaaggcttttgtgaactttttatgatgaaaaaatcttaaaaattatatatttatcatgtacaacatgttgttttgaaatatgtatacattggctaatttgagcttattaatatatgcattaactttttttggtgagaacgcttaaaatctattttcttagtgattttcaagaatgtaatacattgttattaatttttctcactttaaaattgggttattaggccgggtgggcgcagtggctcatgcctgtaatcccagcactttgtgaggccgaggagggcggatcatttgaggtcaggagttcaggaccaggctgggcaacatggtgaaaccccgtctctgctaaaaatataaaaattagccaggtgtggtggtgcatgcttgtaatcccagctgctcaggaggctgaggcaggagaattgtttgaacctaggagggggatgttgcagtgagtcgagattgtgcatctgtactccagcctgagcaacagagtgagactctgtctcaaataaataagtaaataaataaaataaaataaaattgggttgtcgtcttattcttgaattgtaagggggtagtgtcatttgatgcacaaatattttaattttggtaaaagccaatttattttttctttgttgctcatgctttggtgtcatattttaaaaactattgcctagcccagggtcacagaggtatacctatgtttttttctaagaactttataatcttagctcttacatttaggtatttgatccattttgagctaaatttgtatattgtgtgaggtaagagcctaacagcttcattgttttgcrtgtgcatatctagttgcctgagcactatttgttgaaaagacttgtttcccccattgaatggtcttggcactcttgtcaaaaattaattgggcatagatgtatggctttttttttttttcttctggactctcagttctattccatttatctgtatgtctatcctgtgtcaataccatattgtgttattactgtagctttgtagaagttttgaaattaggaagcgtgagccttccaactttttttcttcttttgtaggattgtttcggctatttaatgtctcttgaatttttatataaattttaggaacagcttctcaatttctacaaagaagtcagctgtgattttagtaagaattatgttgaatctgtaggctaatctgaggagtattaccatcttaataatattaaatatttttgtccatgaacatgggatgtctttttattttttttagatctttatttcaacaattattttaaaaatttatttataagtattccattcttttttaatcattgttttttaagtgttaataaaattatggaaataatttgaagaaaggtttgtcaaaatttaggaaagctcttatttattaaatttctgttttatttatttaaatttatttattaaatttctgtttttaagggatggggtctcattctgtcaccctggctgctggagtgcagtggcatgagcatgaatcactgtagtcttgaactcctgggctaaagcaatcctcctgcctcagcctcctgagtagctgggactactcagtgtttacaggtgtataacaccatgcccagctaattaaaaaaaaaaaaaaattgtagggatggattcttctctgttgcccaggctgatcttgaactcttggcctcaagtgatcctcccatctcattcttccaaaatgctgggaatacaggtatgagcctcaaggcctagctgagcttttgtatttaaacacaagattatgcatgtgttaagggaaagaaacctagcatatgataaaatctgtaaaatattagaatcagtcatagatstaaagctgcagtaaacaataaagaacatctagtgaagtccagttttgcttaaatagttatactggatggtaagcttcttaagggcattgactataccttgcatttttgtaacacctggcacaaatgctttgtatttgaaaggttcttgatatttattgaatgaaagagtaaatgaatgaatcctacatccagaaaagaaggaaggaagggttttggaagtttgaggattgtgctctagttatatgtaacctacaagtagcaagtttcagttggaataataataattgcattaaaataactgcaaatggggaactaggcctttaaagagttggggccagttgcggtggctcacacctgtaatcctagcactttggaaggctgaggtgggcagatcacttgaggtcaggagcttaagaccagcctggccaacatgatgaaacctcatctctactaaaaatacaaaaaattagctgggcatggtggtgcgcacctttaatgccagctactcgggaggttgaggcaggggaatcgtttgaaccctggaggtggaagttgcagggagctgagatcgtgccactgcactccagcctgggagatacagcaagactctgtctcaaaaacaaaataataataattggaactatttaatctgtaaagataagaatttagataaataagatgaaaattgaggtgtatttgttctgtgtctcttttttttttttttgacagagtgttactctgtcatctggactgcaatgcagtgagtagggtgcagtggtgccatctcggctcactgcagcctccgcctcccaggttcaaatgattttcatgcctcagcctcctgagcagctgggactacaggtgcatggcaccacacctggctaattttttgattttttagtagagacagggtttcaccatgttggccaggctggtctcgaattcctgaccttaagtaatccacctgcctcggcctccctcggtcttgctatatatagcaagacaccatctctacaaaaaataaaaaaattagctgggcatggtggcatgtgcctgttgtcccaattactcaggagcctcaggcggaggatcccctgaggccaggatgtcgaggctgagtgagctatgattgtaccactgcactccagtctgggtgacagagtaagaccctgtctcaaaaataaaatttattttggtggtggatgcacagctgtgactctgctgaaagccactgaattgtgtgctttaagtaggtaaattgtatgatatgtgaattatatctcaataaaatatgtatatatatacatgtatatatattcacaaatataaatgtattggaagggtttaaacagatggcaagtgctgtcaaaacagagtagaatttatgtttttattttttattttttgaggtggagtctcrctctgtcgccatgctggagtgcagtggcatgatctcagttcactgcaacctctgcctcccgggttgaagcgattctcctgcctcagcctccctagtagctgggactacaggcagatgccaccacgcccagctaattattattatttttttktgtatttttagtagagatggggtttcaccatgttggccaggatggtcttgatcccctgacctcatgatccacctgcctcggcctcccaaagtgctgggattactggtgtgagccacggcgcccagcccaatttttttttttttaattgtgtggggctgtctctcataaaagtagttttcttcatgcattgctggtggtaatgtaaaatggtgcagctgttgtgaaaaacaggtggttcccccaaaaaagttaaacatagaattatatgatccagcaatttcacttataggtatatacccccaakaattgaaagcagggactcaaacagatactaatgcactaatgttcctagcagcattatttacaatagccaaaagaagatggagacaacccaggtgtctttcaacagatgaatggataaattccaaaatgtggtatataagtacaagggaatattattcacccttaagaaggaatgaagttctgttacatgccacagtatgaatgacccttgaaaacatacgcaaagtgaaataagccagacagaaaaggacaaatattgtatgattccatttacatcaggtaaccagacacatgagatacttaaaataggcagagaaagaaagtagaatattgtctagaaagtagaatattggttaccaggagctgggggttggggaggaatgggaaactatagttaaatgggtacagagtttgtttggagtaatgaaaaagttctggaaatgaataatggtaatggttgcacaatgtcgtgcatagatttaatgccactgaattgtgcacttaaaaatagttaaaatggtaaattttatgtataatttactgcaattaaaaatgctttcaaaaaacaagaaatttttaagagtaagatgcactacttttttttgtaaagtttgtgagacataattgtgtggtatgtggaaaggagaatattttcatttttgcatttaaaagaatatagtgttttagttgtctgtcatttatggttttcttccttctgttttcagagagtgtgaatttctgactttctatgtgggacccaaaatctttagctttagatgtaagtgagatgacctaaataccactgactatgttacatctttgataatcaaaaactaaattttgataagccagactagactacagatgactttgtgaaaaattcatgaggcgtagacatattaaccttgtttagattggaatttttttttttctttttagacggaatctcactctgtcacccaggctggaatgcagtggtgcaatcttggctcactgtaacctccacctcccaggttcaagcaattctcctgcctcagcctcccgagtagctgggattacaggtgcccaccaccatgcctggctaatttttgtagttttagtagagacgaggttttgctgtgtttgccaggctggtcttgaactcctgacctcaggtgatctgcccacctcagcctcccgaagtgctgagattacaggcatgagccaccatgcccggcctcgactggaaaattttttgacttttaatatgcttggttgattcattttgttgatttctggaaagcaaatgtttgtatttaatagtagcaataggattgcagttttctaataaatatcacagaattatggcagtgagccaagaagaagaaaagctgtattagtgaaataagacatacttctatagctatggaaactgtaaaccctactaagtctgataaaggtattctctttgtatttgtattattagacattggtaggggttcatgaaaacccaagataactgctatattaaatctaggtatgattgtattcatcaaaaggcctggttaaaaggcactgttaggtagtttagtatttgttttgtgtgaatattaaagtgcttttttttctttttttttgagacaaagtctcgctctgtagcccaggctagagtgcagtggcgcgatctcggctcactgcaacctctgcctccaggttcaattgattcttctgcctcagcctcctgagtagctggaattaccgcctggctaattttttgtattttttttttttagtagagacggagtttcaccatgttggccaggctggtcttgaactcccaaccctcaggtaatccacccacttcggcctcccaaggtgctaggattacaggtgtgagccaccatgcccggcctatttttcttcaatttctcttctttttttttgagatggagtctggctctgtcgcccaggctgtagtgcagtggtgtgatctcggcttactgtaacctccgcccccctgtgttcaatcagttctcctaccttagcctcctaagtagctgggactacaggcgccgccactatgccgggctaatttttatatttttagtagagatagggttttgtcatgttggccaggctggtcttgaactcctgaccttaagtgatctgcccacctccggctcctaaagtgttgggattataggcatgagccactgtgcccagcctaatttcacttcttatggtcctcaactactaaagcattttctatttgaaagaataatattagattattgccacagctgacaatttatttgagaataaatgagagaataggaatatgactctgtttattaaagttaaattaatcttaaccagtacatttgtttactggtaaaatgcatattagctgtgcacaagtagattttatgaataaattattttaggtataaattaggcactttggtaatttatagtgctttcttttttttttttttttttttttttttgggacagagtctcactctattgcccaggctggagtgcagtggtatgattccggcttactgcaacctctgcctcccaggttcaagcgattctcctgcctcagccccctgggtagctggaattacaggtgcacaccactatgcctggcccgtttttgtgtttttagtagacacaggtttcaccatgttggccaggctggtctccagttgctgacctcgtgatccacctgcctyggcctcccaaagtgctggaattacaggcctgagcctctgcacctggccgcatgattagtgctttcaccaagtaataatttcctgatagataacctgactagcatattagcttaatatcttttctaattataaaaaccaactaactcctgagaatacttaagacaaggtctgtaatcagggttgcctgtatttggtgaaattaatgggctgtttggggtgccaagcttcaaaagagagatgattgctaatcctaaaatataaaggtaacctagagccagaaagatagctactgagtaattgtgttctcaccacacttatttgtgtgtaaatttaaaagtgcatttcctctcaaatttagatatgtcttgttctgctatttttctgtactagaaagtacttcttcagattgctrggctacttaccagaatcatcaactactaactagtaaagaaacaaactgtgttttgggatctcccatatcaaatatatttagaagtgaaatttagcaatcatttattttatgagtaaaatgaaacagaaaaagtgaactatgaggggtagactcctttggaaaaatcattttaggttggaacctataatattgcctagaagagagaacccatccatgttgaaatgccagattagagggaagtttatraagaaaagaccatgtagaatgatttgaatgtttaccactgtctagttttggaaagaaagaccagggcattacatgcagggtccttcttggtgttggaccctccctcctcttttcctacttctttttttttttttttttttttttttttttttgagatggagttttgcttttgttgcccaggctggagtgcaatggcacaatcttggctcaccacaacctccacgtcctgggtacaagtgattctcctgcctcagcctcccgagtagctgggattacaggcatgtgccaccacgcccggctaattttgtatttttagtagagacagggtttctccatgttggtcaggctggtcttgaactcccaacctcaggtgatccacccactgcagcctcccaaagtgctgggattacaggcgtgagccaccacgcccagcctcctacttcttttttagtagcccgttgtttgtctaacttgtctatcagttggatgtttcagagatcatggatttcagtaaacatagctctttgtaacagaactggatggtgtgtcctatgagaaaaataccgttttagcaatcgaaatgtggatgtgctatataataagacagataatctttaaatgacaataaaacctcaactcagaaactcaaaggataaaatttgataaaaataagagggcaaaaaaaattttagcagttaaaacagctgggaatagacagagtagaaagcagtagccctaagttttatatttgactaaggttgaatagaaacttcaggttgcagtgtctacctcaggatgattcaaatcactttgagtctttaagatatggctcttgaattctcaacccaagaattttaaaaaaagagaaatcctcatttttttgctaagaaacaggaagttatttttcttgaaatataagttatttataattttgtttctcattatttcttctctgtatcttttttcttccatcatagatgactcattgacaccccacgcatctaaaaagttcttaagctggccacagtggctgacatctgtgatcccagcactttgggaggccagggtgggaggattgcttgagtccaggagtttgagaccagtttgggcaacatagcaagaccaacccccctccccaactgtctctacaaaaactttaaaaaaactagccaagtctggtggcacatgcctgtagtcttagctacttaggagactgataaaggagaattgcatgaccccaggagttcaaggttacagtgaactatgatcgcacgactgcactccagcttgggcgacagaatgagaccctgtctcaaataataaaaaaataaataaagctctgcattttggcagttgtgggtcgtctgagtacagacgttgagtcctgagtatcaggtgactaaaaactctagtattgtaaatagatttgtaaattgacaaatcttgttttagacaattttgctatggtatgcaacaaagttatttccaaatacttttaggtttggatatttaaagtgctatttaaaaaactgtattagtcaaagttcaggattttttgcgtaaatgtgatttaaagtataaggcagttctagttctttctttgtatttgtattgttaaaataagactcagttgaatttcagtttgaaaatactggaaaattgttattcatagctactttgtctcaggctagatgattataaggagaaaattaattctaaagtggtttaaaccaaatcatgttttaaatttagtgttatataaatttcaggttgtgttctatatctttttttggctttcccctccctcagcctaacagtttagttgttcaggatagggagatttgtcccatgtaattatttttcagttttgctgaacatatttttaaaatggctacctttcttgggtacagtgtcatgggattccccgccccatctggggtagagtgttgtgggattagagtgagataagagacaaaggagaatctttcaggtcttctaactcaaatcactagaaatttaggcacgatctggaccttaatgtgtgagaggctgtatcattttatttcccaaattgtattttcttttttcttgagactgagtctcactctgtcgcccaggttggagtgcagtggcgtaatctcggctcactgcaaccttcgtctcctgggttcaagcaattctcctgcctcagcctccctagtagctgagattacaggtacatgccaccatgcctggctaatttttctatttttagtagagatggggttttgccatgttgaccaggctggtctcaaacgcctgacctcaggtgatatgcctgctttggcctcccaaagtgctgggattacaggcatgagccactgtgcctggccacaaattgtattttctctaacttctagttggtatgaaaaaagtattaaagagtcccctccccaccccgccccagttttcttactccgaggatgaagatgaagtggaaagctttagatagttggtttttcagcctggccaccatggaaaaattatttactgttttatgaaacatgcaattcagttaatttggaggaagctgtttagtaaggggaaaaggacaggatttctagttaggaaacataatcaagtatctgttttaaactttgctagttttatttcttttcctctttttatcctcatttcctttttatctagcaagattatcgtgaagcttctatgaataattttctacattatgctagtgcctttaaacagtgtttgaatatgaatctctaacttgctctgaatatgttgagaaaaaaagttgatttttcaggataagtaattctttttgggtgttcaagatatttttaacaaaaaatttttcagaaattgaaagttggcttggcacagtagctcacacctgtaatttcagcacttcatggggccaaggcagatgacttaaggccaggagttcaagaccagcatgggcaacatagcaagaccccttcctacacagcccaggagtttgaggctgcagtgacctgtgattgtgccactgcatttcagcctgggtgacagaatgagaccctgtcttgatttaaaaaaaaattacaaaaagtctttccaaagctataaaaactttaagctttattctttctctttttccatgatacttattggctcttttaggtttagtggtaactcctaccaataattcttaaaaggaaaatgataattactttttcttttttttttttttttttgagaaggaatctcactctgtcacccaggctggagtgcagtggtgtgatctcggctcactgcaacctctgcctcctgagttcaagcaattttcctgcctcaacctcccaagtagctgagattacgggcacccaccamcacgcctggataatttttgtatttttagtagagacggggtttcaccatgttggccaggctggtctcgaactcatgacctcaagtgatccacccaccttggcctcccagagtgctgggattacaggcgtgagcaccatgctcaatggtaactactttttagggatgatacatggtacttagttgtcactgatttttttttgttgttgttcaaaaattattatagtatctaaaatcttgtgaacatgggaacagattgtgaggagaaaaataaataaaagcttgtgattatttcaaattcttatgatctcaagtcttgactaaaatgtgtgctttacagggattaagattaaagtgaagctgtttttttccctcataatgtttctaacttaaatttttaaggggcattaatacttatgaaattgatagttttctcatcttttgattactcccctcaattcatgcttctgaaaaatgcattctagctaaaaatataagaatgcttattaatcataaaatatattggtacttgtttagtgtagaactaagggatttagatatatcctttaaaggcaaataatacatttgatcattaaatggaataaattgctttcagagtagagtagggtttattcttgggagtttgaagttgagcacagaggcatggatataagaatggattcacatctatttcctgtctgggtgctttaggaatttaatcctttttaaaactggaactattgggaattttattttttttgtgtgaggaatcatgaaaatcccatgtttaagtacatatttttctaattagattagttgcgttagtgtcaaaaatgaataaactagttttaggtttcctacgtgttttgaatattttatgtatatacatactcttactaactatgaatacataaattagccaacaaatgttagtcagaattttattttgattggtcaacttttaaaactgtgacttttactgagtttctgtctttatctttctagatgttatagtgaaatgtctaaggagggaaactgaaatgaagtggtgtctgccaaatgaataactttacttgtggtattgcagcacagttacttcttttttaaaaaaaawtttttttaattttaagacagggtctcactctgtcacccaggctgtagcctccacctcctgggctcaagcagtgctcccacctcagccttccaagttgctgggaccacaggtgtgcaccaccaggcccagctaattttttttttttttttaactagagacagtgtctccctaggttgcccaggcgtgtctcaaacttctgggctcaagtgatcctcctgcctcagcctcccaaaatgctgggattataggcaggagccaccatgcccggcctagttacatttctaacaaagtaattttgagaacacaggtaaaagggatgtgatctgaaaactgtttggtgtgtagaatggggagagaaaaaaggaagcmaattaaattgaaggaggaaatatggtaaatttaatttttgagtttattattggaagaaaacacgccattttgtgcagtataagaatataagcttatcagaatttttaaatattaaggtttgtattttaacccattttcatattagagccatttttttccagatcctgttttcagctgtatctattaatggggtgaatttactccaggctccctggttgttcattaacctagtagggcttgactactttaataggttcaggaaaatgtgcttgttagttgaaactgctcatagctggaattggaacttttctgcagtccttccttgtctgtggggaatatgtcctaagaccctctagtggatgcccaaaactgagcatagtaccaaacactatatatacagtcgtgtgtaactttatgatggggtatgttctgagaaatgcgtcattaggtagttcgatcatgcatacatcatagggtgtacttacacaaacctatgtggtatagcctgctacatatctaggctgtatgatttagcctgttgctcctaggctacaaatctgtacgacatgttactgaactaaatactgtagacaattgtaayacaatagtaagtatttgtgtatctgaacagacgaggtaacacgtggcatgacatcactaggagataggaatttttagtctgcattataattttatgggaccagtgttgtatattaattataatttataagtctttatgtatcttttatatggaaacccaaatgtcccagcaccattgctgaatattatccattttccctacttgatctacaatgtcagtattaagtggcatatagcaggtttctgtatattctgtattatgatcttatggcaccactgtcatatatgtgatccatccttgactgaaacatatgtggcacatgactgtactatgttttttcctatacatacatacctgtgataaagtttaatttataaataaggcacagtaggagattaataataataactattgtattgtcagggttctctagagggacagaactaataggatagatgtatatatctacaggggagcttattaaggagtattgactcacacaatcacaaggtgaggtcccacaataggtcatctgcaagctgaggagcagggaagccagtccaagtcccaaagctgaagaacttggagtctgacattcgagggcaggaaacatcgagcaagggagagagatgtaggctgagagactaagccagtttagtcttttcacgttcttctgcctgcttttattatggttgtgctggcagctgattagattgtacccactcagattgagggtaggtctgcctttcccagtccactgactcaaatgttaatctcctttggcaacatcctcacagatacacccaggaacaatactttgcatccttcaatcaagttgacactcagtattaaccatcacaactattaataaatagaacaatacagcaacatactataataaaagttatgtgaatgtggtctctcaaaatagcttactgttctgtattcacccttcttataatgatgtaagatgatacagtgccgatgtgatgatattaagtgaggtgcatcacgtaggcattgtgacacagcattaggctactgttgaccttctgtattcccgaatctgtgtcagtcattttaggggatcccttgttgctcatgggtttctggtgcaacatattgctgtcagtggagggaaagggggtagctatgaaagattcggtaaaccatgttttctgttcatgtctttcacctacaaatttaatgccttttaaatcttaactaagcacttatcttgctctggctgtaacttttgctgtttgaggtgtggcagcaaaactagcatgaataatttctttttcattctttcgcagttttacagatagaagactcattcttaccgtagatcttagcagcctcagcatacgattttttctttccttattaagaagtttcactttttcacttaaatgaagcacattaaaacttcactttggcatatccaaattgccaaatgtcactactcttccactttggggccattgttaagtaaaataagggttacttgaacacaaacactgtgatactttgacagttaatctgataatccatatggttactaagtgactaaagggtagatagtgtgtatagcatggatacactgggtaaagggatgattcatgtcctggatgggatggagctggactcgcaggtcaacagaaaatttcatcatgctacttagaatggtgttgtatttaaaatatataagttatttaaattggaatttttcatttaatattttctgaacttggttgaccatgggtaactgaaaccatggaaagcaaaaccatggataagggaggactactgtatttaccagatgagttgatttcattttgagaaaagttacttgtaactttagtaggctgacttaacatgttatgataacaggattatttagattataagagactgggcaggcagatattacactagtcttgtactttgctcataattttatagagcactttgatgtatatttatttcatttaatgtttttgacatctgagaggtatatattctcatagataataaaacccaaacgtcccagatgattaagagacttgctcaatttgacactgttagtcattagaagagctagtcttaaaaaaagaaaagaaggccgggtgcagtggctcacgcctgtaatcccagcactttgggaggctgaggcgggcagatcacgaggtcaggagttcaagactatgctggccaacatggtgaaaccccatctctactaaaaatacaaaaattagccgggcgtggtggcacgtgcctgtaattgcagctactcaggaggctgacgcaggagaatcgcttgaacccgggaggcagaggttgcagtgagccgagatcgcgccattgcactctagcctgggcgacagagcaagactctatcttaaaaaaaaaaaaaaaaaaaagtattctgacttcaatccattttttttctctaactgcaaccaagataatttatttactgagtattttcagctattatgataaaagacataaatgtgatttcttccctaattgagcttacttcatagtttgagagtcagactagtaaataattaattaaaaagagtatgttaggtgctctgaaagggaaagtatagtttgatgaggtgggaaayaaagaggagtccctgtgtgccaggggatcaggaagggcttttgatgggaggtgaacttgctatcaaaatcagtcctgaagtcataaaaattagtcatgtaaagattaaagggctatgttggaggaagaatgttccaggcagaggggagaataccatgttagaagttttggaggtaaatgagagcttggtgtattgaagaattgaaagaaattcagtatggctggattatagagctagagaagagggaaggagagggaaaggaggtagctatgaaagattcggtaaaccaaaagctggatatgataaggtcctaaattagtgacaactaggaagagaaaaagagtactgcaggtatcacaggctaaataaatgtgttagaaatattttagccaacaagtgatattttatacagttattttacatatatatatatctcttgcgatttccttgcacggtaaagggcacattatcctaaaagttgaaaataggttaacagtgcactgttcatcatggtgaactctggagatcagttttggctatcagattcttttgctatcattcctagcatgatttctttactctcgcttgttgaggttaattttgctctaaagaattctaaggtgggtcttggacctaatgttttctttttttttttttttgagacagagtctcgttctgtcacccaggctggagtgcagtggcgcgatctcagctcaccgcaagctctgcctcctgggttcacaccattctccttcctcagcctcctgagtagctgggactacaggcgcccaccaccgcgcctgactaattttttgtatttttttagtagagacagggtttcaccatgttagccaggatggtctcggtctcctgacctcgtgatccacctgcctcrgcctcccaaagtgctgggattacaggcgtgagccaccacgcccagccggacctagtgtgaatagagggtagataactaagtgaggattacccttgctaggccttagtaactgttgtctagagaagaagatgttagggaaaagcaagggataaagtgggtatgaaggagtgtaaattatgacttgttgctatgatatttagttattggtttaatttttacatgtaagcttgtcattgatatactgaatattaaaatatttgggtgtggtggctcacacctgtaattccagcactttggaagcccgaggcgggaggatagcttgagcccaggagattgagaacagccttatgcaacataacgagaccctgtctataaataaaaaattagcctggcatggtggtgtgtgcctgcagtcacagctactcaggagcctgaagtaggtggatcacttgaggccaggaggttgaggctgcagtgagccatgattgcaccactgcacgccagcctgggtgacagagcgagaccctgtctctttaaaaaaaaaaaaaaaaaaaaaagatatttgggaaagtggccatttattcaatatacattttgtgcccagtgcttgaagtataaaaagactcaccattgttaatagggaagacgggcacacaatatcaacatagtaaaataattgtttcatgataaaaataaacagtagaagataataagttcagtttgggatatgttgaaattgagatgcttatgggatattgaacacctgctatgcaacaagcactaagctatatgctggggctacaaaaagtaaagaaaataaagtccttttcctcaccagttcatattctggtggttggaaacagacattaaagaaatgattataaaaatgtcagcgtaggccgggcacgatggctcacgcctgtaatcccagcactttgggaggctgaggtgggtgggtcacctgaagtcaggatttcgagatcagcctggccaacatgatgaaactaaaaatacaaaaattagccgggcgcgatggtgcgtgcctgtaattccagctactcaggagggtgaggcaggaaaatcacttgaacctgggaggtggargttgcagtgagctgaaatggcgccactgtactccagtctgggctctgggcgacagagtgagactctgtctcaaaaaaaaaaaaaaaaaaaagtcagggtatgggattgrcaagtccatagaaacagaaagtaaattagtggttgccagggattcaaggaatggaggttggagaatgactgctaatggggatggcttttcttttttgaggtgatgaaaatgttctggaattaggtagtagtaatgactacataactttgggcctatactaamaacactgaatcatgcactttaaaagggtggaactttatgttgtgtgaattatatctcaaaaaatgttgggagttggccaggctcagtggctcacacctgcaatcccagcacttcgggaggcygaggagggaggatcacctgaggtcaggagtttgagaccagcctggccaatatggtgaaaccctgtctctcctaaaaatacaataattagctgggcatggtggcgcgtgcctgtaatcccagctgctcgggaggcaggagaattgcttgaacccaggaggcgaatgttgcagtgagccaagattgtgccactgcactccagcctgggtgacagagcgagagtcagtctcaaaaagaataaaataatgttgggagtgaaaaaaataaagcarggttaggagggataagaaaatggtgggggcactattttgtagagcatgatcatagtgatttttgagcctcatttgaacagacatctaaaggaatcgaaggagtaagcaatggagataaatgtggagttttccaggtggaggaaaggcaagtacaaagacatcaaggctgtgaaagtgcttggcatgttcaagaagtagcaataaaggcagtatacctggagcagagtggaaaagcaggagaattgtaggagagaaagggagagagatattaaggtgctagatcatgtaaggactttgggttttatgctgagatgggtgctgaggagtgatgtcatctgaattaggtttttaatgaattattctggctacagtgtagataataaagtgtaagagtaaaagagaaaatcaattaggaggtaattgaagtagttcaggtgagatgattagatcaggattgtagtattggaggttgttaagaagtggtggaattctcgattagaaaagtgagaaagaaaaagacaggattcatttctctgggaaaaaaaaaaaaacaagatatttcagggacatgaagagaggagtagactaaagagaaggcaacaaaggaagaaaataaacaggaattcctgaaagcaggagtattcaattgtgtcagaaattggaaataaatcaattaggagtttattgataaccaagcaatttgaatggggagtggttggaacagaagccaagtagtagttggttgagtaataaatgtgaatagaggaagtggaggcagctaggaagacaactgtagtactaagtaaggatggttgtgaggggaaggagagagtggaaactagaaaggcatatataagaataggaatcttgtggaatgagggagttgaaaggacaggaattattaatagaggaaagttttggaggagcagtgaagaaaaagggatctagtgcacatggttgcttcttttcttgagcccaaagaggtaaggataatttttacctgggaaaggaagtatgggaaatttatgtcctatacatttgctgtggagaaataaacagtcatttgccaagaatgatagatacaggatagtagccttaagagaatcatcatgaggaactggggagtaaagctgataaggaatactttgaaaaaaaaaaaaaaaaaaaaggctcctgagctactttgaggaagatcttgaattcatagtggtactggtccacaattttgatttttctctatcamaacttagaagctgtggttcaggaatgttgaagatgagtgcttaggatcattcaggattgggtatgattaacaggatgaatatgatcaaaaaataatggggatggggtaaaggaattcttcaagacacaagctcaggcttcgtcttttccttgaaatggcccccattggtcttttctcttttaattttgtacttttctctgctattgctgccttatgtttagtccattagaatttacgcacacacacatacacacacacccttaagcacttaaacatttttttttaaatatggaaaacgacaaaacaagaacaaatcacatgcagtcctgccatatctagatatgaccactgttaatatgttggtgcttattctttcaggcgtctctatatatgtatacatatctacttatttatacatttctgcataagagggattatacatctgttttatttgcctactgatgttattaaatatagatacaatttgtgatagctgcaaagtattacgtggtaatttatttatttatttttgagacagagtctctctctgttgcccaggctggagtgcagtggcgcaatcacggctcactgtagcctcgacctcctgggctcaagtgattctccagcctaggcctttcaagtggctaggactataggtgtgcaccaccatgctcggctaatattttttaaaaatttttttgtagagacaggatctcgctatgttgccaaggccagtttcaaactcctgagttcaagtgatcctcctgccttggcctctcaaagttctaggattacaagtatgagctaccatgccaatcaatgtggtttaaataacaaaatttagttaattagccaatcctttggtgatggactattatttcattttattttttaactgttataagtcattgtaatgaacatagtacaaatgatttccccctgtactggtatgagtactgttctaagtacttaaatttgtcttttatttctaaatttcttctgctgtcatgtttcaaggtgaatccttcagacttgcattcttttagctttctcttgagaatggatccaaatgaataaggctacctgcatattattagataagaccacccccaaaccatcttgtaatctacagtgttgaggttaagtgcataggctttgragtcagaacagatttggattcacatctttgctctgcttcttcatttagttgtatagctttaaacttcagttttccagtctattaaataaagaacgttgaaagcataaggctttttttttcattgggagaactctataactgagatgaaataatcattatttaaaaattttctagctaattaaaatcctttgtggtacagtttaatgttattttccttttctagattaagggaaagtagataaatcttggttattatcttttttttttttttttgaaatggagtttcactcttgttgcccaggctggagtgcaagggtgcgatctcggctcactgcaactgcctcctgggttcaaatgattctsctgcctcagcctccctagtagctgcgattacaggcatgtgccaccacgcctggctaattttttgtatttttagtagaaatgaggtttctccatattgctcaggctggtcttgaactcctgacctcaggtgatccgccacctcagcctcccaaagtgctgggattacaggtatgagccaccgtgcccagactttttctttctttctttctttttttttttttttgagacagactctcactctcaaaatctataagaaaagattttccagcctaggctggagtgcagtggcacaatcttggctcactgcagcctcaaccttctgggctcaagcaatcctcctacttcagcctcccaagtagttgggactacaggcgtgcaacaccatgctcagctaatttttttgtttttttttttggtagagataaggttttgccacattgcccaggttagtctcgaactcctgagctcaagcaatccacccacctcagcctcacaaagtgctgggattacaggcatgcaccactgctcctggccttggttatcttttttttaaccttcataaatgaaatcctatgttcctattataaatcatgtttatgtattaaatatgtatgattataaatcatgttacatgtattcaaagaatatttaatgatagaaaatattcatgattgtatgttacattttttaaagaaacatatcaaattatgatcctagttttattttttaaaaaaacaggcctatagaaaatagactaaaatgttagaatggtgatctgtgggacttgggatttgaagtgactttttattttccgtcttacacttttaaaaaatttctgaatttttatgatatatcacctttatatctcccttaaatcctttatacatcctttttgtctatcacttttataacctaaagtgtgcaaatattaaaataggaatcttcatgtagtagaacattataactgaaacttttatgattatcttaattttttctcatggattttaatttgcagtgtttatatttatggcagccctctaaatcttcttcaagtttttcatttatatgatgcattgttggagttaaaatagaacatatcagccaggcacggtggctcatgcctgtaatcccagcactttgggaggtgggcagatcacttaaactcaagagtttgagaccagcctgggcaataaagtaagacctcatctctaaaaaaaatacaaaaattagccgggcatggtgatgtgtacctatgatcccagctactcaggaggctgaggtgggaggatggcttgagcctgggaggcagaggttgcagtgagctgagattacaccactgcactctagcctgggtgacaagtcagaccctatctcaaaacaaacacagaacatatttctgtattaaggtctgattctgtgatgtgtgtataattctaggattatcatttcctttgtagatatactaaatagaaaaacttgagatttgaacaatttccttgccagtattatcacatgcagcagcttttgatggtggagagacttaacagttaaaaatttccaacaacattaatttttagctatattatacttaattatataattaattttagtagctaatatttgttttaattctttctaatagcctwggtcagtggattcttggattattgcatttaatcctcagaacaaccatataaagtctagatagtatcattactcctattttacagagaggaaaacagactaaaagtaacttgtccaggggcacatagaagcaagcagcagagctgggatttaaatggaggcaatttggtaccaggacaacgtgcacacacacactccgtacttcctactgtgataaatttctctcttggttgggtgagatttgctgaaataatgtatatttaaaggatctagcactgctcttggtaccttgtaggtgctcaattgaattttcttttataatgggcagagtgatctcattgaattaggtggcatattccacctggtagtcaaataaggaatttttatataggtaaactcggatttgaggtttgttgtacagatagattatttcatcaccaaggtactagacctagtattcaatagttattttttcctgaccctctccctcctacccttgacctccaagtaggccccagtgtctgttcctctctttgtgtccatgagtaggagttcttttttaaaaattttttattgcggtgaactgcacaataaatcaatcattttaaagaaaaccctgttgtgcaaccactacctctatctatctgtctggttcaaagccatttttatcattcccagaaggaaaatcctgtgtccatcttcaatctcccctgcccgccatgagcccaacttatggcatccaccaatctgtgttctattgctatggatttgcctattctggatttacatgtgacctcttatgtttggcttctttccctcagtataatatttttgaggtttatccaccttgtagcatgtacttcatttattcttgtgggggaatactgttccattctatggataccacaatttgtgttacctattcatccactgatggacattcaggttatttccaccttctggccattgtgaatagtgttgctgttcacatcctataatagcatatgtgtacatgtatttgtttgactaccaatttttaattcttttaagtataagaagttttcttttttaaaggaaaatggcctttattggatgtttaaaaattctataaaaatattaattaaaaaagaaagtggaggccgggtgtggtggctcacgcctgtaatcccagcactttgggaggccaaggcaggtggatcacttgagttcaggagttcgagatctgcctggccaacatggtgaaaccccatctctactaaaaatacaaaaattagccaggcatggtggtgggcgcctgtaattctagctacttgggaggctgaggtaggagaatcgcttgaacccaggaggcggaggttgcagtgagccaagattgtaccactgcaccctagccagggcaacagagcgacagtgtctcaaaaagaaaatagaaaagtagtatacagtaaagagtactactgtatacatttgtatcatagcatcttacagggagcatggcttggcgctgggcaaatgtttgttaaattgaacttttggtttttgagaaacttctttctaattctgattttgctatcaactatctgattttggagaaatcctcagtttctgtgccctagtttttatttctgtaaagaaatagactaaactctttaagagtcttttaagttctgtgaaagtctgttcccttttttcttttttttttttgagacggagtctcgttctgtcgcccaggcaggactgcggactgcagtggcgcaatctcggctcactgcaagctccgcttcccgggttcacgccattctcctgcctcagcctcccaagtagctgggactacaggcgcccgccacygcacctggctaattttttgtatttttagtagagacggggtttcaccttgttagccaggatggtctcgatctcctgacctcatgatccacccgcctcggcctcccaaagtgctgggattacaggcatgagccaccgcgcccggcccccttttttcttttaataggaatgttttggtactgtatccttttaccctctggaagataggtacttaccagcccttggctattgtaggcagttctttctcattaaatttgcctctggaaagggctatatgatcaagaaagttgggaccactcactgttctcgtctttaacctcttgcaaggtttcttcaggaaagactcattttccatcctcccatcttccccttccatatcttgcaaaccctagtgtagagactgaagaactcaagtgcctatagggcacagacagcataatatcaattaragaaattggctgaacggtactttaggtaacttgagagtacactaaaggaggcagctccagttttccttgtggatttagtattgctggatcctgtgattcaagagaagccaaaggtctgagatttttatgtaaaatctgatttttaaatgttggcaattaattttaaatgtttttttaaactgtgcaggcraaacagaacacttctgcagtccaagtacttactataggaagtacaagacctgtagaaaggaaaactgtggctgggtatggtggctcacgggtgtaatcccagcactttgggaggccgaggcaggtgggtcgcctgatgctaggagttcaaaaccagcctggccaacataatgaaacgtcatcyccactaaaaatacacaaaattagctgggcgtggtggtacgcctgtaattccagttactcaggaggctgaggcatgagaattgcttgaactggggaggcagaggttgcagtgagctgagatggcgccattgcactccagcttgggtgatagagggagactgtctcagaacaacaacaacaacaaaaggaaagctgtgtattgtgaagtgaaatcagagtcaccttgaaatgggcatgaggtattcatcagattgcctttggaataaaagaaataatgyccgtggaatatctcagtaacacctcctcattgctaacccttttgagggcagaaattatagtttttatttatgttagtagctccaattaatatattaataatagttctaggtgtgttctacacattattgctagtgcttacaactctacaaggtagataggtattaccactgtattataaatgagacagccaaggcttgctgtgataagtaacttgtccaaggtcacacaaaaaataagtgatacatttatgatgaaacctcagttctgactacctttgttctttcattatgacatgctgcctacctcttatttattataaacaatattggtatactgacacaaggatcagatgctttgtataatggttgtagacttttccaaggaatcttgtgactttcttctttttactttatcccccttaatgcaaaaaaagagagattacaataaatacttgaaatgcgtcctaattatctgttacgtatagtcatgattgtgagtttctgatcaagccaaatgaaaatttatgtgcttttaacaatgatattgacaacctctaatactagaacctttatcccctgagtcttaaccccttaattcttccatattttgtaattggccctttaaagataaataggtgtagaaggatttcttacatacctcttaagcatctgcttctagagcatagccactggcaaatggaaacaactgaattctcttctagagcacatttgaatccatctcactaaagcttctcaacttgtgacttcttctgaaaaatttattttggtcttctcattttctattttctttttctctcatgtcagtggaagagattctcaatttcttttctaaggtactttcaatttcctgacttgattctgtgacatactttttctattttccactctctcttttcattactccctttcatgtgtttgttttcctcacaccagtagtagtcaaactgctgttaactatgatttctgaaaaggtacttctgcatttgatataatttcaaaagggccatggtgcttaaaaagaaattagaaaactaaatgcttatggtagtataatcatgtaacagtgtactagaaaaactactttattggccggtcacggtggctcacgcctgtaatcccagcactttgggaggccaaagtgggcagatcacttcaggtcaggagttcgagaccaggctggccaagatggcaaaaccccggtctctaccaaaaatataaaaaattagccgggtgttgtggcgtgcctgtaatctcaactcctcgagagaggctgaggcaggagaatcccttgagtagttccccacatgcatacatacaatgatcactactcaactagatactctaaggagatcctctatagatctccagcgttctctctgagtgtgtctctcctttccagtactctgcattgagaaccccggccatctgggcttccccagactcctagctctaccacttcaacttaagaagcttaagaagactgctgggtggccaggcgcggtggctcacgcctgtaatcccagcactttgggaggccgaggcgggcggatcacgaggtcaggagatcgagtccatcctggctaacacggtgaaatcctgtctctactaaaaataagtatattgaaaattatctaccaccatgtgaaatagtagttgtcattttagtcaggctgtggtacagtgcaatggcacaatttctgctcactgcaagctctgcctcctgggttcacgccattctcctgcctcagcctcccaagtagctgggaytacaggtgcctgcyaccacgccyggctaattttttgttatgtaaatataattgttttttcctctaggttgaagaatttaggtaatctggccaggtgtggtggctcacgcctgtaattccagcactttaggaggccaaggcgggcggatcacgaggtcaggagatcgagaccatcctggctaacacggtgaaaacccgtctgtactaaaaatacaaaaaattagccaggcgtggtggcaggcatctgtagtcgcagctactcgggaggctgaggcaggagaatagtgtgaacccaggaggcagagcttgcagtgagctaagatcatgccactgcactccagcctgggcaacagagtgagactccgcctcaaaaaaaaaaaaagtatttaggtaatctgcagaagaaggtggttcaggtctttggttgctgttctttcctagactcttcagaaaaaaatgaattaactagcaatgcttaaagaggtagtaaatacaagccaatccattttcattccagctgcatttcatgcttcagagtaatggctgttagccagaatcacttgtgaagctttatacacatatacattctgtgatcttattccctgtaaacccctattcagtagtcggtctgtgatgaaatcccaggcatcttcattcaggttaaaaaaaatatacatatgtctacatgaaattctggtattccctgttgaaaaccagtcttaagttagaggcattctgcagttgtacggaaagtaagggaaacaaagttaaaatggaaaaaattgaattaagaggcagaagtaatgaatttgatcatttgttcattgccactcattgtagacacttatttttgatctctgtaaacatcagcttatatctcaaagtatgaggtctgaatacttgcttgtgggtgatcatctttgtgtagaatagaaaagacaaagtaggaccaggtgcagtagctcacacctgtaataccggcacttcgagaggccaaggtggtagaattgcttgagcccaggaattcaagaccagcctggacaacatggtgagaccctgtctctactgaaaaaaaaaaaaaaaaaaaaagaaaaaagaaaatattagctggacatggtggcatgagcctgtaggcccagcatacttgggacattgaagtgtgaggatcacttgagcctgggaggttgaggctgcaatgagcaatgattgtgccaccgcactccaatctggacaacagagtgagacaagaagagagagagagagagagacagatagagcgagtgtcttgttgagttcttcagtgttgggtcaaagaagggaaaaaaattgtgcgtataaatagaaaaaaagaaaactaactttttaaggctttaaaaataactgaaagtgaagaccctgagatatgaaaagtgatttttgttaatcagaaaattggtgatttaggtgataatggggtggaagttggaagataggacgtgaggggacagggtatttggattaaatataacatagaaagataacatttttagttcaggtagtaggatattctggtaatgacagaaaggaaaacaagatgggttttttttggtttttgtttgtctaatatttttgtttttcatctctaagattatggtataaaaacaggaatttatgttttagaattgtttgggtagaatcacttaaggtagatgatttgcttattcattcatttgtttatttattaagcacattattgaaatgcccattatgtgccaggcataataatatagtaagtaaaatagatggcattcctaacctcagtgttactctaattgcatagacaggaatgctggggaaagaatttatctttcagccagctattctcctgcctgggacccagctttagctagtcttggctctacaaaggaagttgtaacctaattggaacataatttcttctccgtaaaaactgagggttacaccaaatactttcaccacttctacctctaaaattcttgcttttaatgtgaattttagattaatttagattagattaatcccttaaaactacattcattacattcataccattcttgcatggccctctatatatttcttctctcctactaccttttttccctcatagctctggtgtcttgatacagttttgattggctatttatgtgctttcagtcaacctcactggactgaaagctttttgggagcagactcgggtttctgtgaacatgtgatttactgtgtgtgtacctatgcacacgaaatgaacaaatggtgacaaaattagttttttcttatttttgaaaatgctgttgatcttgtgaatttaatattagactgtctttcaagatcaacaacaaaataatatatgtaaaataatataaattgtaattctgcttgtttcttttcattgatagattattatgtatgtttacaaggacatgattagtttagaaaggaatgattattaaatatatggttatataatatggttagctgttaatagccatggaacagatctctattcagtattggttttataagcactcagcaaaattctgttttaagtatgtgttctaaattttaaaatgaatgtatgttgacatttttcattgcttacattccagaaatgagcttattttactggtaacaattaaatgtgagtttagtaagggtagaaaattggaggaaactggagtctccttttctctttagcagatgtcttagtctgtttgtcagctataacaaaatgccttaggcaaggtaatttataaacaatagaaatgtattgctgatagtctgcagtatggagtctggggagtccaggataaaggcaccaacagattatatgtctgctgagggtttgctctctgctttgaagatgatgctttcttattgtgtacccatgtggtgaaagggccaaggcagtgtccttcaatctcttttataagggcactcattccattttgggagggcagagccctcatgacttacttcctaaaaggccccacctcttaacactattacattggatgttaggttccaacatgaattttggcaggacactaacactcagactatagcaccagacaagcaagcagtcactgtaatttaagcccattagaatggaaggtccataaagacatatttttgtctgttttgttgttgatgtatccccagcctggtgtacatcaggcagtccataaatatttattgagtgaatgagtacatgaataaatgaatgagaatatttactgagctgtcgttcattttatagcaggtacaatgttgtttcttcaccactgatatattcatttattacctcttatttattagcagtgtttctgaaataatattaaaattagaagttttcttgaagcttgttttacaacttagaattattatccagtagctttccttaatatttttataacctcatcaacaaacagtgagtgtctcttgtaagtagygtactgccgaaccttagtcagagaagacatgacatagttttggtccatgaagggttttcaacccatttggagaagtaggaaatagatacaaagatgatttgtaacaacctgaggggtgtcaaaaagatggtacatgtaggaaattaatgttatattcaagtgaaaatttgatattgtttatgtatattattcaacttttaaaaactttgcattaaagtatggaaaggaagcataagtataccattgttttaatggttatctttgatgagatcatgggcaagttgaatttttatttcttacgtgtatttttaaaagcaagcaataactctaaataaattaatctaggccaggtgcagtggttcatgcctataatcccagcactttgggagattgaggcaggaggaccacttgagcccaagaattggagaccagactggacaacaaaaggagaccctgtctctataaagcacatacacagagacacacacacacacacaccaaaaacctagctaggcatagtggcacacacctgtggtcccagctactcgggaggctgaggtaggaggatcagtttaggcccgggagcttgaggctgcagtgagctgtgatcgtgtcactgggtgacagggcgaaatcctgtctcaaaaaaaaaaaargcaaaactgtagttctaggacagatttgatataaaaaacaaaagtaaagcaggctatttgtttagtaacatcaattgctagacctctctcctgtttatgtattcacttggaagtcccataggcatccaaattcatcatttaaaactgaattctctttccaggtttattcttaactcctatattctctatcacaggaaatggcaccactttttatcaattttcccaagccagagttctatgtgctacttggaactctcctttttttccctctcccttccccaccgtagccagtgatccaatttagttcatccatttaaacagctttaaattcgtagcctattgactatttcactgccactgccttggttcaggatttcattatttcttgcttaggctattattgtaaaaaccttcttactcatcgccatctctaggacctaatctattctctgtattcctggtaggatgatcttcctcaaatatatgtttgagtttatcatttctttgcttaaaaccctcaaaggctccctgtgtgctgagggataaaacccttactgcttagcatgatacacaagccctgtcataatctggcctcaccctgcctttagtagtttcatctcatgttactgcttgtaacttccgtgttctgagtaactgagttacctaataacctgagatgaaaatactctttttgttcaggtttgcttttatagtttctccttccttttccccagtctgtctgctaaatagccatttcaatattcaaggttgacttctggtgttacatcctctgtgctgccttctcagatcctccacagataacattaaaggttccctcttctccagttgtgtaacacttcatactttattaaagcacatactgcattrttttaaacttgactcattttattatctctagactgtgaactgcttaataagggtgactttcttttgtattgtgtccctagatcagtgcaggtgctaaataaatgttgaatgaatgtttaattactgctttgtcaggttgaaggtgatagtgaagaggagctggcatagacaaaaatacttagcccctgtgactgtggcaaataagatgtcaaacaagtaattatatgaccaagagaagactcatggtatgtgttgtaaccaagattctgttgcctttttcaactaaaatatttggttttgtttgattttaaacagaaagtgtagcaaaagtgagagggagaacaaggtagattggtcttttctctcttttctttcttttcttctctttctctcttttttttttttcttttgagacaaggtcttgctctgtcacctagcctaggatgtagtggcacaatcacagctcactacagccttgacatcctgggatcaagcagtccttcagctctgcctcccaaaatgctgcgattacaggcacgagccaccacgctcggccctagattggtttttgattgccagatacctaaaaatgaagacatgaaataagtttgtttactctgatagattcatttctttgcaaattgagatcttataatatgaagctacagttacatagctgaattttttgaatccgtagtaattaataaattcctaatgaaatgtatgcctgaatgcactttttggaacaatcttgaacctacaaaagagttgtgaatatagtgcaaataatttattgctttttttctgaatcatttgagaataagttgcygacatgtttcctcattgcctcccaatactttggtatttccaacaaataagaatattcccttatgtaaccacaatatagctatcaaaataaaaattaacatcaatacatttttttcaccttgtccttagatcctatttgggttttgcaaattgtcccagtaatttcctgtatagcaaaaggatccagtttagaattatatgtccatttagttgtcatatctctttagtttctttgaatctgaaatcattccttggtgtttcctggacttttatggttttctttttcctttttttttttttttttgagacagaatcttgctctgttacccaggctggagtacagtggtacgatcttggctcactgcagcctcctcctcctgggttcaagcaattcttgtgcctcagcctcctgagcagctagggctataggcacccaccaccactcccagctaaatttttttttttttttttgagatggagtctcactgttgctcaggctggagtgcagtggcgcgacctcggctcactgcaacctcctcctcctgggttcaagagattcttctgcctcagcctcccaagtagctgggattacaggcacgtgccamcatgcctggctaatttttgtattttactagagacgacgttttgccatgttggccaggctgctctcgaacttgtgacctcaggtgatctgcctgccttggccttccaaagtgctggaattacaggcatgagccaccgcacccaacccatgctgtcttttgtgtccttttgatatgcccccgtaattctttgagtactttcttacctttagcaaaacaagacattccaggttcatcttgtattttgcctgtcccagccctgatactatttctctgaaaagccctggttacttttggggtgctgcttctcctaggacctttcagaggacagaagctagggaatatatgtatatttatatgtctgtacacacacacacaggtatatatacacatttatacctatatttttctatctgtacatattgactgatgagttcacatcagtacctcccgttgcaatgcaataccgtagggttccttcttcttttctctctctgtttgtaactcactgtttgacaaacttgatttcctttcatcttattgagaaacttgatttcctttcatcttactatgtttacttatttgatcaatctcctgttgtaaccaatctcccattgctactgcctcctgctttctgacacattaataccctaattacccaacttggcctctcatagcttgcctcctacatggatgctcttgacacctggggctgtcctcctgctctcctgtgaataccctccagtctacttggtttcttactccccactttgggcagccctactaggtagatagcctcctatcttgctcatcctgctaggattttgaatcctacctaaaactgccctttgcttctgctccctcaaccccgatagatgtcttccctaccccatttgaactccaacaccccatgccaggctgcctatctacggaaatgccctctttagtcagtcttctactttcccaccgtaggcaacccttctacacagatgccctccttattcagctcaggctccaaggcctcacatgccctcctcaccctgcttggattgtaactccccgtgctgggctccccctctcttgcccagtgawcacactatttatacctgccgggtaacctctgataaccaaccttaggcaatccttctatgtggacatcctcattactacttaggttatgataccctctgttggttgccccttgcatggataccctcctcacccttctctggctctggcattttatcctgggctctccctgctcactccacagagatccttctcattctattcatgcttttactccttgggctaggctgtccatccatatggagatttgcgttctgtttgggttcccacctcccaccctaggcagaccccctgtgcatcagccttctttcttgcgtggatgctgtcctcatcccacytcttgggcactaacatcccaacctgagccatcctcccctgcacagatattcatatattcttcaccctgcttaggctctgacaccacacactaggctgtcctatatagatactttcttcatgttgctcagactctgcatctagaatatctctkgcccctctcatccactcatttatgtcctcctcaccctgcttaagctctgaaatcccttcccaggcctccccctattctctataggtatccttccccctcccctctaggcttctgataccctcctttgagccctcttattcctcttggactccatctgagtccaaagttcttttttttttttttttttctttgagatggagtctggctctgtcacccaggctggagtaagtggcgcgatctcggctcactgcaagctccgcctcccgggttcacgccattctcctgcctcagcctcccgagtagctgggacaacaggcgcccaccatcacgcccggctaatttttctatttttagtagagatggagtttcaccgtgttagccaggatggtctcgatctcctgaccttgtgatccgcccgcctcggcctcccaaagtgctgggattacaggcgtgagccaccgtgcccagcctcaaagttcttaaagctctattgaaaaggtactcttgtaagatatctaaaaattataaataaaccataaatgttttactcagtggtgtatggattcttgataactagagagttttgttccttctaggatagactcaagaaatttcttcagaaaataacaaagaaatttaaaatataatcagaatagttaggtgactggtatattccattctgtctttcatgctaagaggttatttagagaacaattttcttttctttttttttttttgagacagggccttgctctgtcacccaggctggaacgcagtggcacaatcatggctcactgcagccttgacctcctgggctcaagcagtcctcctacctcagcctcccgagtagctggaactacaggcttgcaccacctcacctggctaatttttgtatttttttgtaaagacagggtcttgctgtgttgcctaggctggtctcaaaactcctgggctaaagtgatcctcccaacttggcctcccaaatgcctggattacaggcatgagccactttgcctggctgaacataattttaaagtttttgagtgaaaaataatacctagtagaaaaaagatatgttatactatattaaattgtctgtggaaggccgggcacggtggctcatgcctataatcccagcactttgggaggccaaggtgggcggatcacctgaggtcgggagttcgagaccacyctgaccaacacatggagaaaacctgtctctactaaaaatacaaaattagcygggcgtggtggcgaatgcctgtaatcccagctatttgggaggctgaggcaagagaattgcttggaccggggaggtggaggttgcggtgagctgagatcgtgccattgcactccagcctgggcaacaacagcgaaactccatctcaaaaaaaaaaaaaaaaactctgtagaactcaagttagttttcttcttccccaaattgatataatttatactgctgtatattatttaaaattactttaaaacactagattgttttaggaaaacagtaattaaatacagcctggcagaagtgctatgaataagtaaatatgtggcagcagactagtaaattggcttaaacttagaaattgagaaaaatttgttaagacagagcattacctaccagttattcttggactgcatactcttttagaaactgaatatccagtggacctgcagccagtacattttttccagtagagatgccaagtatgatgactgtcaagcttgaagtgtttttaacaaaatgaatgctgtctctcttcaatgyagaacgatgttggcacattgtagatgccaggcattttgttttagaatatttaatgtgaaattataaccttggaatttaccagctgattgagatagttaatggagaggtggaagagtaaggcatttcattcccaaaccattttctgaaggttttttctaactctttcagattccaagagtagcttcacatttagaggttttttttaaagtaaaatctaatatttaaaaaaagattaaaatgtttagaaatggatttttcaggattataatgtttgcatttcatatcagagagcattcattgtttgagtaactaatatctgttgtgagcattagtttacttcttgttagatttttaaagcattcccaacacaaaggaacattcttttttaccacagatatttatttctctttagctgcttacttgacaacgaaacagaaacatcttatttacggagcttttttccccgtttttattatccacctctgtatagatgcaagtccatagtattagttgtacaactttattttactatttgaaagtaaataagacagtcttgagaaaagtcataaagtagatgggctctctctgactattttgatttttactctctgacccgaaagcagttgaacaccaaatgccagctcttaggtcaacaagggtgaggtagggaggtagggatgaaaattctaagaaagaataagaacttagacttcttttcaagagatcaacttatttaagccttgtagcatctctgtgaggctgtgctctatccgtgtatagccctaattttgttgtatatattttatttgattatatacttcagtaaaaagaacacctgtgaacccattgtgtagctcagcttatttctactcctcctgtctcccatcaaaggaagccgctgtcctaaactttatcatctttctcttatcacatgtgtttttctttttttactataatacagatatcacattctttrttgataaaacctacctcataggattgattgttttgaggttaaatgagaaaaatacatatactgagcctggccctgcaaagtgctcaaaaaatagtagctgtaattatgttattaatgttgttattttgctgagtgagtacagcatgaaaagcatgtcttttcccagctgtttcctgtggcttatctccctgcactcttgaggtcttttcatctcttcctggaatgaccagtaacagtaaagcagtagagaaggggatttgggtgatcagctstttggacatagagtgcccaactgagaagaaacaaacaaataaaaaattaagttgccctattaaattaccaatttttttcttctctctcactgtcctgtgcctcagaataggatttctgcctactttaaatttgacccactgtagtgaaattcttccaccctcttgtagacagtgttgaataataaaggattgaattaacccagaaataatcagtgacataaatggatctattatagtttacagaatgactaaacaagccaaccagtcagtgcatttttacattgttttcctttccacccaacattgggaagcattaatttattttcaatatctgaaaatgttgatttcattcttctatttcctttttccagttgccctgggctctatgagaatgcaccagcatgggacagattcttgatcttctgaacttgcttccctttctgcctatctacttttcttatacacatattaataatttatgttaatggagttattatatcgcacttgccctaattctactacatggatacttaagcagtgcacttaccktggcattttggtcaactaaaatttttaatgaaatttaggtgagttgattacacattatcgcacaaattattagcagcattaatagaaaaaatatatcagaaaataatcaggtcaggcatggtggctcacgcctgtaattctagcactttggaaggccaaggcaggaggcttgcttgagcccaggagttcaggaccagcctggccaacatagcaagaccgcgtctctacaaaaaaattgaaaaggtaactgagcatgtctgagaaaaaataaataaaaagaaaataatcaccctagtcttggccgactgaagaaagagttccttagaacacaaaagtaaaatcacttctagattaaaaaagagagagmgagagaaatagagtgagtacatgtaagtttattgcacaagagcagattttaccagctcttacattaatccttgttaagtttcatctccttcctttgggcagatattccagtctttcatgatctgtgatgaattatgacataagatttaatcccttttaagcctatgtcatttgaaaaktcatatctttgttcaagttgtgatataaccaccttcttccagattgaacctatacattttttgggtactgttgtttagaagtcatctattttattaagtctatatttcttcttcttgtttacaataacttataaagatttttatcacatattttactgaatttaggataactgcctgcagcattttcctgatcctctagtagaagagccttaaaagacaaattagtttgcagcttggccttctttatatatagaagctatgtgaagagagatggttttgtccatgaagtttattagagcactgttagataccctgcttgttcttgtctaattctttcttgtgcttcttctattactctcttcctttaaaaaaaaaaaaacagctttattgatatataatttacatactataaaggttacccatttagagggtacaattcagtggttattaatgtaaatacagagttgtgtaaccattgccatttttatcactccaaaaagaaaccttatctaatacccatatcccttctctctcactttctctcactctcttttctctctcatctaagtgattttgcttttgttttctaaggaagtctttcctcagaagctgcctttccattagggatttcccattctgtttcttcgtatcttgtgtttataaacctggaatttcattattctcttatatttctgaactgatttaaaagataacataagaaaaatagatactgtggcataacatgaagtagccggcacttatttaggactgtcattttcatagatttaaagtacatatgggccaggtgcagctcatgtctgtaatccaggcactttgggaggctgagacaggaggatcacttgagtccaagagtctgagaccagcctgggcaacagagggagactctgtctctacaaaaagtttttttaaaaaaattagccagtgtacatttgtggtcccagccactcgggaggctgcagcaggaggatctcttgagctcaggagttggaggctgcagtgaactttgattgtgtctgtatactccaacctggatgacacagtgagaccctgactcaaataaaataaaataaaataaaataaataaagtgcatatgctcttattcaggatttctttcattggctagtggagactgtaaaagcatttaatttagattgaatttagggttgaatagcagtattaatagcataatttatattcctttaatctttcggtatcccatgggaagcagatttaggagaaaggccagtggctgtgttcagattgtatggttatagtttagagggaatatctttggggtactggggtaaaagaagagtttaaatgatgatttaagtcttagagaagttatttaaagtagcagaaccaaaccagttatgtctgaaataaaatcctgtgctggtaatgactatatgaactgtagcttcccttggataggcatgataaacttctggcaggctgacttcttttatttccaaacacttgagtcagttaatcagaaaacatctttggtgaaggaatccatgcttcctataccttccacttgaccttgcattttacttgtttgttttgaggggcagactttggagaggggtggaatataacaagttctgcatttaatttctttccatgtactttttagtaacattactatcatacctctagtggagaggtatgatacctcaactttatacccttctttgggaaagttagagtgtttcartccacaaagttttgctttgatttgattaatttattttaataattggagaaatggagataaaatcctgattagtaacatgctattagtgattgggctattactaggataaatttttttccatcacataaatcataaatgcatttgggtagatctttttctctttttatcgaatctgtttctttcaaatttcctttttgtttgggaaaaaaaaaaaaagaaaaaaatagactcgaggctgggtgtggtggctcacgcctgtaatcccagcactttgggaggccgaggtgggtggatcacctgaggctgggagttcaagaccagcctgaccaacatggagaaaccccgtctctattaaaaatacaaaattagccaggcatagtggtgtatgcctataatctcagcaacttgggaggctgaggcaggagaatcacttggacctgtgaggcggaggttgtggtgagccaagattgcaccattgcactccagcctgggcaacaagagagaaactacatctcaaagaaaaaaaatggacttgagtgtgtttctctcttatgtctaaggaactcttattttcaacctggaatgagaaagataattgtattacaatgaatatttggtgataatggcatttctgttttaattaggttctccctatctctactccctccatattgtttgaaagatggaagtaatttgctaaaggctttttttttttttttaacagtcttgctttgttggccaggctgaagtgcagtggcacgatctcgactcactgcaacctccgtctcctgggttcaagcagttttcctgcctcagccttccaagtagctgggattacaggtgtgtgtcaccacacccagctaattattattattattattgttatttttttttgagatggagtttcactcttattgcccaggctggagtgcaatggtgtgatcttggctcactgcagcctccgcctcccaggtttaagcggttctcctgcctcagcctcccaagtagctgtgattacaggcatgcaccaccatgtccggctaattttgtatttttagtagagacagggtttctccatgttggtcaggctggtctcgaactccctacctcaggtaatctgccygcctcggcctcccaaggtgctgggattacaggcatgagccaccacacctggcctcaagtctttttttttcttttttttgcccaaacaaaaaggaaatttgaaaaaaaaaaaaaaaagaaacagattcaataaaaagagaagaagatctaccgaaatgcatttatgatttatgtgatggaaaaaaacagggtctcaccatgttggccaggctagtctcgaactcttgacctcaggtgatccacccgcctcggcttcccaaagtgctgggattacaggcatgaaccaccgtgaccggccgtctacttaaggcttttaacaacattttaacaaactgaaaatktttagtcagggcatattatattctgacagatgctgaatttgccacatgatttgaagatgaacatttcaagcattaggtaacaacatttttccttctttcttttatttctttcattctttttttgtttttgagatggagtttcactattattgcccaggctggagtgcaatggcgtgatctcggctcactgcaacctccgcctcctaggctgaagtgattctcctgcctcggcctcccgagtagctgggattacaggtgaccaccaccamgcctggctaactttttgtatttttagtagagacagggtttcaccattttggccaggctggtctcgaactcctgacctcaagtgatcctcccgcctcggcctcccagtgttgggattacaggtgtgagccaccgcgcctggcccaggtaacagcatttttcaaaagaaacttttaagtttattctttactgtgaatgaagatcgtttaagagtacaacttctaattttagctttctttcatgaccttcctccttatccctatccacatcaaagttaggatatatactttagtgattaactaggaagctcaaagtatttatgaatccagtaagcagttaactagaaatattgtctcttaccatggataaaatgtcttatggtgctacctttgtattttaaagtactcaggcagataattaataatcttcttcaatttttggaattttggatttcttggcatactaggcaagtcccttaaatttcatgcctcagttattttgaaaataagtatacgcgatatgcctctaattgttcttttttttaaaaaaaaaaaaaaagaaggagtttcgctcttgttgcccaggctggagtgcaatggcgcgatcttggctcactgcagcctccatctcctgggttcaagtgattctcctgcttcagccttctgagtagctgggattacaggtgcccgtcaccatgcccagctaattttttgtattttttagtagagatggggtttcactatgttggccaggctggtctcgaactcctgacttcaggtgatccacccccttcagtctcccggagtgctggaatttacaggcatgaccattgtgcctagctctaattggttttttgaagttccttctaacatggattctactacctttagaggatattttgggaattatttctgttaaaaacctatacaataaaggatattttaaaaagttaaaatatattttaatatatataattttatgggcaattatagtattacaaaatatttttaaaagatacagggttctttaatttggaatacaaaagtaatcgtaatctaatataggtatttatgcattatgcagtctgatttaagagtttcctttacctttgcctttccagggttggagatgcctcagagagtaagaagtatttgcttgagccataacattccttttttttttttaagcttcaatccacaaagtttttctttgattagattgatttattttaataattgggaaaaatgaattatgatagtgttgaattaaaatattttctcaagggtgttgggtaaaagagcaggactatactaattgactggagaagccaatttaaagctgatccacagtagtatatgccatttcatatgtaaagggtaagttttacttatactattgcaaaggaagatactggaccatcttgggttatttggcatttcttccattctgtctagttttatccaattttcaatgttaataactttttctagagactatcttgaacataaggaataaagccaagaagaaaacagggacagaactaatgggaaattcatttttcagttcaataagattatataataaaataaaaaataaaaaaawtttttttttttttttgaaacagggtctcacccaggctggagtgcagtggcatgatcatggctcactgtagccttgacctcaagcagtttacccacctgagcctcccaaatagttgggactgtaggtgtgcatcaccacgcctggctgattaaaaaaaaaaaaaaaaccttttgtagagatgggggtcactgtgttgcccaaactcgtctttaattcctggcctcaagcaatcctctcaccttggcttcccaaagtcatggattacaggtgtgagccactgtgctcagctgctaatagctctttacattaattttgtgggattgtttgtgaataatacagttctcctcatgagagaaaagacatactcattttgtgcatattagattgttgactgaatctcttttaaaaattgttttctcctctctttcccctccccacagaatctgtctatgatcttctcccaaaggagttacagttacctccatctagagaaacatctgtagcatcaatgagtcagacaagcggtggtgaggcaggctcgcctcctccagctgttgttgctgctggtatgcatttcattttactttattaaagaaaactagggccaatataaatctggccaacatgaacagtgctggcaraattcatactaaaaagagtgtgatttgagggttttaaaaagaggcattaaaatatgtacttttaaccttaaactttttcaatattattttcttaatgtaattcttatttcttaaaattttacattgtctcatctataaatgccatttcctaaaatggaccttgtcttcaaatatgggaaccagcttaaagttgtttggttgactgtgcttaaaaaggttaaataccaagctgtgaatagaaaattatatttgagtttctgtttaataattaattttaaagacttgcaccaagggaaaatattttatatgatctgaaaaatgactgaagcactcaagtgtcttttatattcatagcatgttactgaaacctttttattatatttaaaaatatatgtgacttcgtagttttcaatttattgaaagtaatggaggacgtcaatataatatttatataaagacattttcttatattgatgaaaaggtatagaaagtaatgtttgaaatttattagacttatttttactcagctctcaaatcatacacttaatgatatacaattggctcaaatttttattttacataaaaataaaagatagacaagctaatagaaaaaagtgttatcagtgacaaattagtatcagtccttcctgtaatgttagtttacccacctaatattggatttatagactgctaagtgtgtttgttttaaaaaaaggaaactttaaattatatattatatatatatatatatatatatatatatattttgaagttttatctgtcctaattagaggtttcttgcctaatatgacacctctcatctttaaaaatgatatttaaagtttatcagagcattgttttcagtaaattattttagtttcaaaatgagaacagtaaagtgtaaggttgtggtttaaatgaggatattggtactatagtataacttcagatatatttctcatatgcattaacctatgtaccattaaccttatgtaccaatctttctcaggctgcatagtgcattgctgaagccttcctggttgaaggcaggaaaactttaaatatggcaaagaaactgatcagccctgttcactgttcatgtgttgccagacactttctaacagtttctgtggatttaattgtgaattagtgaactttttagtaatcaaattgataagatgacctggtttgctttatatccactgggttctaaaatggctctgatgatatttttctggaattttaagttttaaatctggttttaaaattgcatccaataataaaatatgacaaagataaaatattttttatgagatacttcactttaaatccacaagtagaaattgactaactgatttcttttgtatcttttgagattgttttttaaagatacgttgaatctatatagaactaaaagtctgtttcttctgtgctttttaacatctgttgacggtagatccagttccttttaaaagctgaaaaaattgttaggtttagaaaaagaacagttcttccttttagataataccaaattgaattttagaaattcttatatatataaaaatatattaaaagttcttgaatttgggtccctaatgaaatattaaccttctccccaccacagtatatttaagaaaaatctctcaagataaattacattgaaagctgtgagttgaaaaatcatgaaaataagaaatctaattaaaagaagtattttgaagtaatgcattcttattatcttgaaattattgacattgtaaagatggcaaagagagtaagaaggtaaactttctagttttgttatagtcacacacagaaagtttatatgatcattaacaagtcatttaaaatctttttcaaaatataaatttagcaaccaatgtagattattctaggattctaatagcttagaaagagcacttcataccttaccattataaacaagagagtttaaatcacagaataattattttaaggaaatcagtatatatcattagaattatatttttatttgacatactaatattcttggtgatataactgtcagagttacttggagtatattaccaagttactcaatgtttttctagccagaaggctagatagatgtctagggaaaggcatattaatttagacttgtatgggtttttaaaaaatctttagcatttttgaaaaaatatgggccaggcatggtggctcacaccagcactttgagaggcccaggccggcagatcacctgaggtcaggagttcaagaccagcctgatcaacatggtgaaactgcgtctctactaaaaatataaaaaatcagccgggcgtggtggcgggcgcctgtaatcccagctactctggaggctgaggcaggagaattgcttgaacccgagaggcggaggctgcagtgaaccaagatcgtgccattgcactccagcctggtcaacaagagtgaaactccgtctcaaaaagaaaaaagaaaaaatatgaaatgtgtaaaaatattgactcttgatatagttaattcttcagagttttgaaggagccggattggctgctctcaggtatgagggcctggtgggaacagacttctagttctgccataaaggtttgtgtttgacaagttttaaattaatttaaattttaaaatttaaagactgggcatatgagtgttcatggacatttttttgttgtttaattttttaaaatgtgtttctcagattcaccaatttagatttttttcctcttcctgttactaagggaataagtaaatatgatgctgctaatccacaatccagaatattgggtaaaagagcgtctatcaagcctttatctgcttctacacaattcatacttttatgcactcccatcaataatatattttagtcctctaatcccagggtcaaggtgtcggggaaaggggcttatttagacacaatttctcccctcttcatggggccaagtgtcagaatctgggaggtggagttcagagtcaccaattttgttaycccatttttttttttaagagacatgttctagctctgtcatctaggctggagtgcgaggtgcgatcatagctcactgcaaccttcaactactgggctcaagtgatcctcccacctcatctgggaaataagtgcacactaccacactgggctaattttttttttttttttttttttttaagagacagggtctgtcacccaggctgaatgcactggtgtgaccttgactcactgcagcctaaaccccctgggctcaagtgatcctcccatttcagtctcctgagtagctgggaaccacaggcatatgccaccacatggacctgggtaatttttttttttttttaaacagagtctcactctgtcgcccaggctggagtgcagcagtgtgatctcagctcactgcaacctccacctcccaggttcaagcagttctcctgcctcagcctcccgagtagctgggattgcaggtgcacgccaccatgcccagcaaatttttgtatttttagtagagacggggtttcattgtgttggccaggctgatctcaaactcctgacctcaggtgatggacctggctgatttttgtgttttttgtagagacagggtcttactatgctgcttctccagggatggtctcgaacgaactcctgggctcaggtgatcctcgaggcttggcctcctaaagtgctgggattacaggtgtgaaccactatgctcggccctggattgtttttttaattttttgtagagttgtcttgctgtgttgcccaggctggtctcaaacccctggcctcaagcagttctcctaccttggactcccaaagcactggaattccaggtgtaagccaccacactgggccctcctcctcatttttaagaattctgtttttgtcccagtggaaagatagttaagccttagatgttcaatatatcaatgaatgaaagctttaaaaatataaactttctgaaccattttgtaagttctcagtaattaaaagagaggccacgttcctaaaacataaaagttatccaaatgaattgatgacactttttggcaaaataaggagtttattaagaagaagtacaaatcatgaaaagattcttttgtttattttttggataatcctatagtatagttatacagaattaaaacataggtattaggagaactaaatgagttatatcagaatttggggcttttgaaaagatgtatggcaggtttggggttttttaaaataacagctttattgagacataattcacctgctgtataatcaaatatttttaatctatgtgcttacagttttaatcattaaatttacttaatttatttaaaatagaaagtcatggactttagtcttcattttaagaaatcaagttactttcttgttctattctacacttgttttgtttggcttcatttgggaatataacattgtgtttattagtttatttcaaaatatatttttctaagtggactgtttgaagtttctttaaaatttttaattcaaattcttgaactaaacaatgaattaaactaggccgggtacactggctcacgcctgtaatcccagcactttgggaggccgaggtgggtggatcatgaggtcaggagttcaagaccagcctggccaagatggtgaaaccccgtctctactaaaaatacaaaaattagctgggcatggtggcaggctyctgtaatcccagctacttgggaggctgaagcaggagaattgcttgaactcgggtggcagaggttgcagtgagccaagatcacgccactgcactccagcctgggcgatagagtgagactccatctcaaagaaacaaaacaaaacaaaacaaaaatgaattaaactataggttttataattcagccagagaatcttaataatgcattaataattctttttttgcatagcttcataatattcatattttggtttcagtaattatatattaatactctttttagaagtaacagtacactaatacttcatagcaattgtgcttttgtttttgtttttgttttttgagatggagtcttgctcttttgccaggctggagtgcagtggcgtgatcttggctcactgcaacctccacctcccgggttccagcgattctcctgcctcagcctcccgagtaactgggactacaggtgtgtgccaccacacccggctaacttcatagcagtttttaacatgtataaagataatacacagtcataaagtgtgtacagtggaaatcttggttgaatatctccacttgttggaccactgtcggtttttaagttcataacttgatgtgaagtgatccatataataaatttttcttttggaagagctttgatatatagtrctttgagttctatgccatgtcacttaataaatctcaagtatgtaacaagtattttctacaaaatttcattgagtgctatttatactataagagagggcactagagatgcaaattaatgtcctataatcaaataagtgctatattctaattcatttcatatctcctaatcacctgaattaaaatcacagaaatttctaaaccatctataataatacactgtacaaaaactgaggtgaagaaaatatgttactcctcctgtaggagacagcttttaaaaaatgaaaatatattatcacttttaagttcctactatgtgacaagaattgtgttaggtaatttgcatgtcatcatatcacaatccttctagccataaagtatctctcttttttcttttacctagttcttactccttgtcattgtgcttgagggaatttggcattgtgtgctatcacttcgattagggaaacgcaagatccttaactaggcaatgtatagaatattgagttgaaaagccatacctcttctctacaagtgtcaggatcttcgaatgggaatttgatttctataataataatttaataaaagtgatttctagcaacaaaattttttatcccattgaatttattataacttaatttacttacgttagaaagtatttacagttatataatgaggattttcttgagttgactaaatttgaggaagaaatttgcctttgattgctttcctgggttaacatatttcagaatttttgccacctaatgtagtatactcttcatgaaattaaaccagaaacccactaacgagaaagrtaattcacctacagatgctgtgagctaaaatgttgtgagttgatcttggttattctttatggccattcccttttttccaagaaaactagaccatttctagaaggaagtcagatcctagttacaaacatgttgcaagcagatttaaaaatctctactcctccttctatcttattatactgaaattacatagtaaatttaaatacatacacttatacatatggatggtatgtatgtatggatttatgctgaagtctgcattattagagagcaaacttgggcctatagccattaattcagaaacaactgctaattgtttgacagttacaaattgacattgccaaaaagcaaacttggcctattattgctttgttcctttaatatttctctttttattgtcctcttaataacacttttataaatattgtgatttattcagtttctaataaataagcatatttttatattacttgagtcaacagaacagcattttgaaactgttcacagattctcattcataagctaaatacttatagaaaatagatacagttactgattttatgcattctgtacaattttgcctaagaaattaatgcatagaagtggacttttttatatcaccaacaagattgaaaatataagcaaaaagtgtttataactaattgttttataagaaaggaacttcacctgtttctggatattttttcctctggaattcagccataaaaaagaatgtaatcttgtcatttatggcaatgtggatggaactggaggacattaagtgaaataagccaggaacagaaagttaaacactgcatgttctcactcatatgtgaaagctaaaaaatgttggtctcatagaagtaaaaagtaagacagaggatagataatagaggctgggaagggtaggaggaaggaagggatagggagaaatttgttgaaggatacaaaatttcagctagatagaagaaataagttctagtgttctataccactgtaggatgactgtagttaacaatactatatagtttcaaatagctggaaggaagatactgaacattcctaacacaaagaaatgataaatatttagataatggatatgttaattaccttgatttgatttctgtacattatatgtatcagaacattatctaccccatgaatatgtatgattattatttgttaattaaaaaaataaaattaaaaaaatcatacatgggccaggcatagtggctcatgtttgtaatcccagcactttggggggccgaggcgggcagatcacttgaggtcaggagtttgagagcagcctagccatcatggtgaaaccccatctctactaaaaatacaaaaattagctgggtgtggcggcgggtgcctgtaatccccagctcttcaggaggctgaggcaggagaatcactcgaacctgggaggcagaggttacagtgagccgagatcatgccactgcactccagcctggcgatagtgagattccgactcacaaaaaaaaaaaaaaaaaaaaaatcatacatagtaaaatggtagcattttttgaatatgagtggaagctacatgagtgttttaaatatttcataattttaaaatcactgggtgcaaatgactatatgaataaaagtgtccaataaactgtactcttaaaaactaacaaatatatgggatatattagatacttgatggatttatatttggcataagtaaggttatattcacttttcatccatcattgcatatatgtatcaagtatgtgtgtactggcagtatttatttagcccactcaggtagaatttattcttcccatataattacagggtattatcatcaactaaattaaatcagaaaatgaatgagaaagcacctcaaagtaccaggtctatacagccattctctagatcaaacttacttacaaacacacacacaacatgtacatagttttatttatttgtttatttttctcacagatgagattaacatgggctttggagtcataaagactgaatttgaatctaattgctatcatatcatatctcctatatagatggactcttgggaaagttaaataaatttctaataatattacccttgtagttagacaataataccaacttcttcttaaggttcttatgaagataaatttgtaaaatagccgaacattttctgacaagtagtaattattgaataaacattgacctccttccccatgtgtttctaacctcctttgttagtaaagtttttttttttttttttttttttgtcatccaggctggagtgcaatggtgcgatctcrgctcactgaaacctccacctcctgggttcaagcgattctcctgcctcagcctcccaagtagctgggattacaggcacctgtcaccatgcctggctaattcttgtatttttagtagagacagggtttcaccacgttggccaggctggtcttgaactccggacctcaggtgatccgcccacctcagcctcccaaagtgctggtattacaggcgtgagccaccatgcctggccattagtaaggtgttaaaaaataggttctctttgtaaaaattagttttgaactttatttttactttttttctttgcattctcacccagtctatttttggtcttattttgaagtttcgcacaccagtcaagatgtatatatatgtgggccatgggatatactttctgactttgttattctgtcatgttgacactctctcagtgggaatctgcattggtctgttttcacactgctgataaagacatacccgagactagaaagaaaaaaaggtttaattggacttacagttccacatggctagggaggcctcagaatcatggcaggaggcaaaaggcacttcttacatggcagcagcaagagaaaatgaggaagaagcaaaagcagaaacccctgataaacccatcagatctcctgagacatattaactatcacaagaatagcacgggaaagaccagcccccatgattcacaacacatgggaattctgggagatacaattcaagttgagatttgggtggggacacagccaaaccacatcattctgcccctggcccctccaaatctcatgtcctcacatttcaaacccagtcatgccttcccaacagtcccccaaactcattaactcatttcagcattaacccaaaagtctaccagtccaaagtctcatctgagacaaggcaagctccttttgcctatgagcctgtaaaataaaaagcaagctgattacttcctagatacaatgagagtacaggtattgggtaaatacagctgttccaaatgggagaaattggccaaaacaaaggggttacagggcccatgcaagtccgaaatccagtgggacagtcaaattttaaagctccaaaatgatctcctttgaatccaggtctcataaccaggtcacgctgatgcaagaggtgggttcccatggtcttgggcagctctgcacctgtggctttgtagagtatagcctcccttccagctgctttcatgggctggcattgagtggctgcagcttttctaggtgcatgatgcaggttgtcagtggatctaccattctggggtctggaagacattggccctctcctcacagctccattacatagtacccagtacggactctgtgtggggtctccaaccccacattttccatctgctttgccctagcagaggttctccgtgagggccccacccctgcagaaaacttgccagggcatccaggggtttccatacatcctctgaaatctaggcggaggttcccaaatctcaattcttgacttctgtgcacccacaggctcaacactacatggaagctgccaaggtttggggcttccaccctctgatgccacagcttgagctgtgtacattggcccctttcagctatggctggagcatctgggacacagggcaccaagtccctaggccacacacagcatggggaccctgggcccagcacacaaaaccgctttttcctcctgggcctctgggcctatgatgggaggggctgccacaaaggtctctgacatggcctggagacattttcctcatggtcttggggattattaacattaggcttcttgctacttatgcagttttctgcagccagcttgaatttctccctagaaaatgggtttttcttttctgtcgcatagtcaggctgcacattttccatacttgtatgctttgcttcccttataaaactgaatgcctttaacagaacccaagtcacctaatgaatactttgctgcttagaaatatcttccactagataccctaaatcatccctctcaagttcaaagttccacagatctctagggcaggggtaaaatgccggtctctttgctaaaacataacaagagtcacctttactccagtttccaacaagttctttatctccatcagagacctggaccttattgtccatatcgctatcagcattttgggcaaagccactcaacaagtctctaggaagttccacactttcccacattttcctgtcttcttctgagccctccaaactgttccaaactctgcctgttacccagttccaaagtcacttctacattttctggtattttttcagcaacaccccactcctggtaccagtttactgtgttagtccattttcatgctgctgataaagacataccccagattgggaagaaaaaatgttcatttggacttacrgttccacatggctggggaggcctcagaatcatggtgggaggcaaaaggcacttcttacatggtggcagcaagagaaaatgaggaagaagcaaaagtggaaacccctgataaactcatcagatcttgtgagacttattatctgtcagaagaatagcacaggaaagaccagccgccatgactcaaataccacctcctgggtccatcctgtgacacatggaattctgggagataaaattcaagttgagatttgggtggggatacatagctaaaccatatcagaacctttgtatataaaaggaacattgatagaggatgatgaaatcataggaaagaccgacagtttctgaaggactaattctataaagtctgctgtttaagagttcttaatagtatttttttaatgaagtgatttaagttgcatggttaatgatcaaaacttctggtagaggctgggcacggtggctcacgcctgtaatcccagcattttgggaggctgaggctggcggatcacaaggtcaagagtttgaggctagtctggccaacatgatgaaaccctggctctactaaaaatacaaaaattatctgggcatggtggcaggcacctataattccagctactctggagtctgaggcaggataatcgtttgaacccgggaggcggaggttgcagcgagccgagatcacgccattgcactccagcctgggcgacagagtgagactgtgtctcaaaaacaaacaaacaagcaacaacaaaaacaaaaaacaaaaaaacttctggtagagcaatttatgacttctggttttttgtctaggcagtttattttgtctacgattggatctaacgtacactttactccagacccaggtctaaaacctgattgattaaatcagaagtttttaatgatgctgtaaatgattttttattattgtttaatcatatcttaaaaaaaacaaacgtagggctgggcacggtggctcacgcctgtaatcccagcactttggaaggttgtggtgcrtggatcacctgaggtcaggagttcaagaccagcctggccaacatggtgaaaccccatctctactaaaaaatacaaaaaattagccagaggtggtggtgggcgcctgtaatcccagcgactcgggaggctgaggcaggagaatcacttgaacccaggaggcagagattgcagtaagctgagattgcaccactgcactccagtttgggcaacagagagagactcggtctcaaaaaaaaaaaaaaaaaaagtaaaaacattgaagtasaattggcaggaatgcctttattttttaatctaaaatatttaaaatgtattgtagcgtattgaagtgtccttcagataatatcccttggaactttttttttctctaattttgaagtttagtgatactctgtttttatcttaaagtgacattatctttcagtagttcagtgtttgtctctgtctctctctctttttagcctatacttcctggtatatttggcagtgtaataaatgtagctgtcagctagtataattattcccttttgtgtttaaattattggagatagaagattacatctggatattagtctcttcattcagtattgacaagtgatggtatccagtggtacttaaatcattggatgatggaaaacatctttttcttccattaggaaagaattttacatggacttaaaaatcaaagtatttaatgtgtatatctagtacatgttttatacactgtgcttagatcctttgggttgaatttttgtttgaatagaaaaaaattttgtttggatagaacaaaaaatacatttaaaacattgctctaagtttcaggataagcattttatttttcagggagcactctttagtaaatattatatgagtgtattaatggtactctgataaggtagaaataattatttaaggagaattcagattaaaaactggagagtaattgttttataacattagaaccctgaatggcaatttgatgaactggagaagaaaaagatgtctgcaataaatcagaaacaaacccttcagcttcagcagtagtgctcattattttttttaaaaaaatagagcctctaggatcaaacatattatacaaagtagcatgtatcattaaaagtataaattggtatcctttttaaggggagtataaagaagtatgtaggagtcagtgtggtctgaaaaatggaaaggttattttgctgctaaaatataggtttttttacagtgtaagtgcattgctcagaacatatcttcttccacgcttcaaaagagtttgggtaagggaacagcctgaaaaacacctgaaagagagaattctggcttatggattagagagcatctataaacagaacaaattggtgaataagagttcacaaaaattttgtctaagaaatttccccacatgcattcagaggttaataattaaattttttgaagttcattttaaaacattgcttattttaacatgtaaacgtatgttgggtgggaaaagtacaaatgggagattgaaactgttttaatcatgtaaatgatcagccctacaatttttgtttttttaataatctggaatgcttattttatatgctgggatgctagttgttttttctattaatacacttaacttgcattctagcttcgccattcagagacaggcatcgtgtggtgggttgtgtgacagtgtctgtcaatagtgaagacaaatagtgccagagacacttaacccatccaatctcacccagggtataggtcggtctcgttttcagacttcttcataagtccttctttctttctytcttcctttcttactttttgtttgtttgtttctaaatagtggattgatactgattgaaactaaaactttttgtaaagttttaaactttgcattaatattataagaaaaagaagaaaagtagaaaatgaaggttggcatgtaaggtgtcgacaaagcaggtttgcagccactttgtgtgttctagatatttcaatctcttggcaacatgagtgttggccttacagcttttttctctgaatatctttcttctttaatctgaaaatatgtccttgtatctggtgacttttatcagatgagaacttcagagttggtcattgttaccagtaagaaaaatataatgcttaagaagaaataacgaaggttgaacattatgtgttttagatcagaaatagtttctggccaggcacagtggttcacgcctgtaatcccagcactatgggaggctgaggcaggcggatcagctgaggtcaggagttcgagaccagcctgaccaacatggtgaaaccctgtctctactaaaaatacagaattagccgggcgtggtggtgcatgcctgtaatcccagctacttgggtggctgaggcagaagaatcgcttgactctgggaggtagaggttgcagtgagccaaaatcgtgccattgtactccagcgggggcaacaggagcgaaactccatctcaaaagaaaaaaaaaaaggccgggcacggtggctcacacctgtaatcccagcactttgagaggccaaagtgggcagaacacaaggtcaggaatttgagaccagcctggccaatacggtgaaaccccgtctctactaaaaatacaaaaattagccaggtgtggtggcgggcacctgtagtcccagctactcgggaggctgaggcaggagaatcgcttttacctgggaggcagaggttgcagtgagccaagattgtgccactgcattccagcctgggcaacagagtgagactccgtctcaaaaaaaaaaaaaaaaaaaaaaaggaaattgtttccaaatatcttttttttaatgattatttttgaatagtcaataatttattccttctttgttccactatttgttcacttagcactcttgcaaaattttatggctttttttaaactagcttttttagaaaactcaattttgcacagatgttgaaaaattataaaatatgtacatattcaaatgttagggatcaaattttaatcttggaagcttggaaattaaatatcatttctgtcatatattttaaagcagtgaaaggtatttctttcttttgaggacttcagcaaatatttctaatttcaaagctttctattaaaagtttttagttccatataaagtatatcttttttatgatattttaagcactaatatattatggtagttaaaataatttctagttgacaaatctagagctgatagttcttaagtttaaaatacagtttaagcaaggagtatataaaatctacatgggtttctataaatggtatcgtttaaaatcttatttcagtctgggcatggtgcctcatgcctgtaatcctagcactttgggaggctgaggtgggagaatcccttgagcctaggagttcaaaaccagcctgggcaacatggtgaaaccctatctctacaaaaaaatacaaaaattagccaggtatggtggtgcatacctgtagtcctagctattcaggaggctgaggtgggatgatcrcttgagcccaggaggtcgaggctgcagtgggttgtgatcgtgcccctacactccagcctgggcaacagagcaagactgtctcaacaaagaaaacaaaaaagaaagtaaagaaagtaaataaaatcctgtttcatcttttattaaattgcagattctgggatattcataytccatgtagacattatttaatatctgccagtctttgaatctcaactatttttgagtatttatagtttccatcaattcttaaaagaagctgtatgtacaattcaagttcaccatcgttactggcatttggtctgataactggctactgttaatagtggcaaacagacttaaatacaggatactttacatatgacactttacctgcctcttttaaattttaaaattattctatttaaaataatctgacattataaatttctatgagtaaattatagaatggtctattaatttttcctttagtttgttgtgctttctgtggtcacagaaaatgctttagaaaaaataaaattattctagcccaggcacagtggctcatacctgtaatcccagcactttgggaggctgaggtgggcagaacacaaggtcaggagttcaagaccagcctggccagtatggtgaaactatctctactaaaaatacaaaaattagccggacgtggtggcgggtgcctgtagtcccagctactcgggaggctaaggcaggagaatcgtttgaacccgggaggtggaggttgcagagagccaagattgtgccactgtactctagccttggcaacagagcaagactgtgtctcaaaaaaaagaaaagaaaagaaaagaaaaaggaaaaaaaaagtattctatataagttagactataggttcaaagataattccttcataaaagaaaaaaaatcaataaaatttattcacatggccatgcaccatggctcacgcctgtaatctcagcacgtcaggaggccgaggtgggtggatcacttgaagtcaggagttcgagaccaccctggccaacatgatgaaatcccatctctactaaaatacagaaattagctgggcgtggtggtaggcacctgtaatcccagctactcaggaggctaaggcgggagaatcacttgaaacctgggaggcagaggttccagtgagccgagatcgcgccactgcactccagcctgggcaacagagcgagagtccctctcaaaaaaaaaaaaaaaaaagaatatatagacgggtcagaactgcattcacactttggttctatagaatatcaagctgttttttgatactttatttagtgatacagtggtattcccaggaggatttgtcagcacttttctgggaatgcttggaaatgactaattagcattagaaatttaaaatgttctgatatcattattttatgtatttatattttaataggatattaaggatttttttcatggtaaatttatggatatataagtaggtaatttggcttacttataatttaaggaaataaaattactagagtactctcggtagagatagcaaatcgttacctctagactcttagtattttctctgtatcaaataatgctatcgtagtaatatatattctaagtactttgaattatatttgaattatatttgaatataaaagaataaaaattcttttattcttcaacctacatttatttgccagcttatctttaatgtaactccaaatacataccaaatttttggcttcccagaaatcaatttaataatttgaattttattacaatgtaggcactgtgataggtgttgggaggatctaagatgagaaagatattgtcagtgctttcgaagtgctcacagttcttaccctccattttactacctcacatggcattattaattaatgcactcagatctcttgctaaccagaatgtaatgttttgatgtgaaagattttatacatcattatcatcatcagaggatcaatagtaccatggtaaagaattttaggctgggtgtggtggctcacgcttataatcccagtactttgggaggccaaagctggaggattgcttgagcccaagaatttgagaccacctgggcagcatgacaaaactttgcctctacaaataatttaaaaagtagccaggcatggtgttgtgtgcctgtagtctcagttactcgggaagctgaggcaggaggattgcttgagcccaggagatcaaggctgcagtgagccatgatcgtgccactgcactgtagcctgggcaacagagtgagaccctgcctcaaaaaaaaaaaagaattttacagtttaaaaaaaattatttcatttgtcttaaaatgagtagaatctttgcaattgaggtagactttaaaaagtaatatttttctattaaaagatggttactgttcttttctgacagagttaatattttcagtgtcatagttttgtgctaactttttctttaataagtatgcccaggatcaatcctgcagttgtgcacacacaatcgtgtgttagctgtccatggaaaatgtatagaatatttaaatttatgtaggatatgatatcacagtttggcatacttaccctagaacacacacttatgtctgactgttaaatcagttgggttttataatcattacggttttgatatttgataagatttgcaagataaaattttttacctcagagaacaagacaaggttatatcgtgcatattaaattcataataccatataacttgcttttgggttcatgattgcttttcacctgtactttccatctgtcatgaacagggatccctgagatgttcatactctgcattctcatgtgcatgatccttagatttaaaaagggtgagtgggagaaagttgctttatagaaatataagttcacagcattcatgttttgtgtgttccactgcaaatattgcatgctgcatacttgtatgctgcatacttgtatttctctgaaaatgaagaacataggctcataagtacacaaaaaattagtttcgtttttgccaatagttggaacagatgaaggaatgttagatgtaataccttttctattttttctaaaatgaattctgtagtatttttcaaaagacaaggaaaaaaattatatttaaactcaaagtggctacaaatcagctcctaaactgtcactgacagtagcatatagatttcgtagtttttacaaacttttaaaaatatttatttactaagaaaacattgcattaatgcatgatacaaaattgataagttttcctttaaattggaatgcagtttaaagtgactgaattttccaatttcagctactgcatttgagaaggatacatactggaaaatggaactggtatcatctaatttctttagactccttcacttatggtagttgggaaaaatctttccatgtggcattatatagatcatattcttgatgactaatattaattactgtgctttttagccttgacagtaatgaagaattctgggtggatatagttcattcaaataatttaggtgtattttaaatacatgttttcaattgaaaaaaacagatctttggcacttggcttttaattatgtaaacattgacattcttacattttgctctttatattataattgatgtgtatgttgcaattccaataactgcacatacagttttatcatacactttaaaacagtggcatacttggtcatagatacaaattaattttagattgaaatatatctttgtcacattacctatttttatttttgtgtgtgtatgtaatgacaacctttccatattgtgaacaagataaaatgatatctaaaatgttagtcatgacaacttccaaccttagcgatcaacgcgcctctgagtttatgctgttaagggctaaagtaatagtattttcagtgcgctattctgccagttgccacacatgctgaaaagatctacttaaatctttcttgctaggcataacagataaatagttttataaaaaatattaattctgatgctctccagagatttttatgcttaactattttctgttagatttcagccagtaaaatttaccattgttcttacattggaaaattcccttactagtcacaatcaaccaggtcctttaaaaagagaaaatggacagctctaaccaattgtcaagcatgtaatcaagtactttattaagagaaatccatccattaatcagttcttcctttgcttttcattatgtcataaaggatggatttattttagagcttatggttttgaactaccacttccagcttctggagacccaatgattaacttgcttctacaacccagaatgttccaaatcatacctttttcatcttgattctcctagattttacaacaaatcatagtgacaataccagttccattttgcctccaattcagttgattatatattttttctatttatttctcattttataattgatatctggaataatcagcagctcttttctcatttattttctcatatttttattccaggatttgcctctgaagcagggagtgtctgcattaaaaatgacctgtagttctctgcttcataggttagaaacttattttaatattttgtggctaagcacagtcccacttttcaaattctataatgaattatttaattggcattgaatgtggaccaccagcatatatttcatattggggttttctttattactttaaatgattaaaattcaatagaatgtccagctgaggcaataaaagctttatttttgctttacagcttaaaacgttaaatgagattttaaaaatctatggattgtaacataagtaaaatratgctatttgggcatttttaaaaattccatttcttaggccttatattgcttgaagcatttatattctaaaacataaccaaattctgactattcattttggggaaaaacaatcagttcacaaatcacattttcaatgggactgctagccagcataggtgaaaacatgtatagtgtatttactcttgaattgtacactgcagatgcttcttcagctccctcctcttcctccatgggcggtgcttgcagctcctttaccacctcttccagccctaccatttattctacctcagtcaccgacagcaaggctatgcaagtggagagctgctcctcagccgtgggggtaagtaacagaggggtaagtgaaaagcagttaaccagtaacacagttcagcagcatccatcaacaccgaagaggcacacagtcttgtacatctcaccaccacctgaggacttgctggataacagtcggatgtcctgccaggatgaggggtgtggattggaatctgagcagagctgcagtatgtggatggaggattccccctccaacttcagtaacatgagcaccagttcctacaatgataacactgaggtacctcgtaaatcacgaaaacgaaatccaaagcagaggccgggggtcaaacgacgagattgtgaagaatctaatatggatatatttgatgccgacagtgccaaagcacctcactatgtgctttctcagcttaccacggacaacaaaggcaactcaaaagcgggaaatgggttggtattcacattttttaaaattctatcatcattatgcaaaacaaacaaacaaaaaaaattcccaatttttcctaattgctgagctcaagtttgcatataaagcaacagtgctaattttatcattgaaatacatgaaaattttaacttaaaattaccaacttttactagatagaaaataaaataatcatagattctagcaatagatatcttattatcagtatagttaggtagtagaaaatgaaaataatctgttctgaaataaatttcaaatgaatttatattttaaaaggacttttactcagccaggtgcggtggctcacacctgtaatcccagcactttgggaggccgaggcgggcggatcacctgaggtcaggagttcgagaccagcctgaccaacatggtgaaaccccatctctactaaaaatacaaaaaaaattagccgggcattgtggcatgtgcctgtaatcccagctacttgggagaactgaggcaggggaatcgcttgaacccaggaggcagaggttgcagtgagccgacatcacgccactgtactccagcctgggcgacaagagcgaaactccatctcaaaaaaaaaaaaacaccaaaaaaaaaaccgaaagaactagcaatgtaatgactccatccaaaacaactcaaacagtcactaagagctatgttctctttccaattgtgtcctcatatggtttacattttttagaggattttagacttaatttttttctctttaattgatgaaaacaagaaaaaactaaattgagagtttgattctcatcatttagattcatgtatcataagcttttttcctttgatactaatacattgattgtacagagtcgatattttttttaaatcactcattttttttctgtgattctgggttacttatttagagggtgatgaaacaggatcatggtacatgtttgagttttctttcatctctgccagtcacactacccactaatatagttcaatagctatgttacagaatattcactgctataatgcagactagtatgacttttaattcctttagtaattttattgtaatatttaattgctagacttttaaattagatttttgtatagtacattcaaaataatttgttaaaatttaactctctaggacccaggatctcctacaatttcagttttacacaaaaagtggtcaagaagctttagattgatttactacttgatgacatcactgatctttttttggttaaaaattcagttgaatattatagagaatattcttaatatatatttaacttgcccttaagcactccctcagtacattttaaaaagtaatatctaccctttaagcaataattactctacaccgcttctttacctccttaagggtgatgtagttaaatgaaaatgaatatttaaatgcttttcagttttagaaagtccagtttagtaaattacctaaaagaaaataagatatactctttcctaaaatgttgccatttaataaaatcaagaatttcagaacataatatttgtagaactattacttataaaataaggctctgaaatgtaatgaatacagcaggtaaatacttaagtaactgtgatagtaacacagatctaaaagtctcatgaatatcatttaattacatatgtgtgtttatttgtgctttagtggagaaagtctttaatataaagttccagaagataaattttcatttttatatcaaaatgaatgttgaaggttcaaatttagagcaaatagaatttttacttatggctagtaaacagtgatttgcagttgctaattaaatatcttgaccttcatttttctgcttctacttttgtatgatagctatatcttagaaatgatttgaggttacccagggaaagtataatgacattggtcaagacagactctttcatgaaataattcatggagcagaaattccatcaagcagaagaaatgtccagcttcttaggtaatgaaaaaaatatttgaaactagtatatggaaatgatggaagaattttaaaattggaatttataacaactatattgaggaaaggatgaaaccatacctaaatatatagaaaaatcggccttaaaaataatttttcagagcatgtcaagctaaaagcctgtattcttcaacagtgaaaaaaatcttaaaatgttttgagagataaggatatagccttagatctaatgtgccataaatctacaatttatatcatactaagtatttagaaaatgtactttaaaatgtatacagcagtttattgatcttcaagataccacatagaaatctgatagcttgtagatgaaaatagcatttttatatgactaagatgttagagtctaataagagaataaaaccattaaaaaaaaaagcttagtatttgaatattcctagccatatcattcttaaatttctcaactaaatgtcctgagaatcagttgccccatgtctcttctagatatttctataagttaagataggatgtcatctggatgtgaaacctactttaggctttttgtaatgaaaattatttttttgacataggtcaccagaaggattatgcggcacgaataaattagaatgtcattttaagacttctgaatagaatatrccatgatggtggattttcctttttggttgtcatttagaagtaaaatcccatgtaactgactgctactttattttttcttaagccatcatgccttaaaaattagtaacttgactacgtttctaagcattagtggatgttttcatggttttacatgtctatacatctcaatatgtatgtattccatttttacattttagaaaaaaaagatagttttaagaacttctaaagtaccattttagaaattgcttaattacatgatattcttctttaagccataatgtgtatactcactcaatacttcatcccaagtgagatcatttgttttgctagactagtaaaactcactttcatttatttgcccttataaatattagcttgactagcataagtgagtataaaaacatgtcttgccaagttaatcgatatgctctatgaattttccttgtatttcaaactaaaattttcccttttctattataaaattgatacatatgaattacaaatatttgaaaaatacaagaaaacctcataatctagtcactcagtaaatctgctattatcattttgcagtattttctttcatctctttgtatgtatatttgggggatatttctacatagtttcaataaatgaatatttttactttaagattagtataaaacagaatatcatagactttcatgtgtgaggaactgcacactagttagaccaaatgtttgaatctgtacccagaatgatgaaaagaaaaacagggtttactgcccattgttccagcttcaacttgatacttatgttcatagaatttattcttccagggccttttaaatgacttgcacaagtaatctttgatttacttatgtcaaatttacacgaatggcattccttgtccagttaggatctttctcatcttaatattacagaagcttctttatccctctgctttcctttctttgtccctttcttcttctttgccttcatcaacaaacatttcttcagcacctgttatgtttcaggaagtgtgccaggttcagggaatataaagatgattaagcacagtattgcgccttgagaacttttcctctcatctatcagtcttactgaattcctatgctagtttcattccttctttgctccattcttttgcctctttcctagccaaggattcaacctactccccatttccattgaagatagtgcctttcctcactttgttcttgatgattaaggcaacaacttggttacagctggaggggtaaacattagagccaggtttaagcctgcttagcttctctgtgtttgaagtcgtaatattcctactggaatctggttgcttttagaggagatttttcttcacagtcatctggctcctggatctttgatgtgagtcaaaacttaggactaggagggtcacagagaaagctatgaccctgactttatttaaaaacatacgtgaattttttttttttttttgagacggagttttgctcttgttgaccaggctggagtgcaatggcacgatctgggctcactgcaacctgcacctcctgggttcaagtgattctcctgcctcagcctcccgagtagatgggattacaggtgcctgccaccactcctggctaattttttgtagttttagtagagacggggtttcaccatgttggccaggatggtctcaaactcctgacctcaggtgatccaccccgcttggcctcccaaagtgctggaattacaggtgtgggacaccacaccattgctcaaaaggaaagataactaacaatattgtttttacttgtttttattatgtatttgcagtgcttcaactattttacagattaaatgtgtttgcctgaagtcataaccaccatttgggatactgtttttctttgaacatgcattccacatagcaaatgcattataaataaatgttaaaaagcataactaaaaaaaataagggccaggtgcagtggctcatgcttgtaatcccagcactttgggagactgaggcgggaggatcacctgaggtcaggagttcgagaccagcctggacaacatggtgaaaccccatctctaacaaaaatataaaaattagctgggcttggtggcacacgcctgtaatcccagctacttgggaggctgaggcaggagaatcacttgaacccaggaaacagaggttacagtgagctgagattgtgccactgcactccagcctggatgacagagtaaaactccatctcagaaaaaaaaaaaaaaaaaggtagaatgctggtgctgtaaagcccagattgtaaaaatttttattgagggctttaattacttaactaatcacagataaaaataatctgaaaaatcacactcctagaaaagattgtttagagtaaagctaatttcccaataaaaattgaatcgctaattttttatctaatttcttcagtttggtttactgagaaggatactcaaaagaataagctacatataccttcatttggtttgtaggccattttgtatgggggtatgtagggtttttgggggtttgttttttgttttcgctaccctcacttcttttactgtgcagttaaaaaataacagtagttaatcttatagctttatataaattttggaatttatatrtggaatgcatacatggaatttttaaatcttattttgactgaagtacaatgttaaaggttatagtgacattagctattctttcctgttagtctcagtttattgcgctcaatcttcctcccttcctcctaccactcacatacgttcattttcttttctgtcaaacrtactttgttttatttttgcatcatatagtaaacttttttacaaaacctttttaaagatactttgctcatgtatcttcctttaggcaatattttattttgccagcaagctgaatagttgtttttactattattgccagttctgtttcttcctttgtcttaatggctttttttttttatcaaaaaactstttttgayactttctccatgttgtgctttgatttctcagaacattggaaaaccaaaaaggaactggagtaaagaagagccctatgttgtgtggacaatatcctgttaaaagtgagggaaaggagctgaagatagttgtacaacctgagacacagcaccgagctcggtacctgactgagggcagccgtggctcagtgaaagatagaacacagcaaggctttcctacagtaaaggtatttactttatttatcatttgaattttagttaaaatgtaaaggggaatgagaatatgtcctgaaaagtaaaatattttcaaatcatgaattttcttccctcatatttgatatttgaattagattcatcccaaactttagaaagaattttttttttttttttttgagacagagtctcactctgtcacccaggctggagtgcagtggtgtgatctcagctcactgcagcctctgcctccggggtgcaagtaatcatgcctcagccacctgagtagctgggactacaggtgtgtgccaccaggcccagctaatttttgtattttagtagtgtcgcagtttcaccatgttggcgagactggtctggaactcctgatctcaagtgatcctcccgccttggaggaagaaatattaaagtgaattcagagaaatacagtagaaattattaagaactttgaaaataaggtttttgagatggttatagtaatcaagactattggactgagaaaagacttgattaatacttaaggcttacggtttaagaaatgggatatcatttgcatccactcaagtacaggaggaaagaaggaaatgaggaaaaaaaaagaaatgaggtatcaattgagtcttaattttttttacagttgagactaaaagttaaaagggacttaaattttagcacctaggatatcttggtataaagaatatttgtctttgaagacaaacctcaaaaaaatgggggaatggggagaggacttaacaagtgtccctaccccttgctaaatactaaatagggaggaattttggctagtcatatggtagattcttattaaatacagtttgtataaatatgttagttgaacagtattttaagttaggagtagaggtggactgcctttcattttatacttgaatgaaattatgattgaaactctggatcaatcaggaaacrtgtctgccaccatttataaggttgttaatagtcacgtgtacaatatcaagtctacccttcttcactacatactaccttaacccacacccagtccttcaatcccaggacaggtaacaggcaagtgagaaatctrtgttatgctttgtgtaaatatttgtctagctagatattttggtagtttggtcattacgtttaacctaattgccctgactttaagttatgttttgtctagttagaagtattgttagattaattgcttaactatgatagggaatgaattgaccttaaaagtttgtttagtcattcattcaacaaatactacactcctccatgtgccaggcactgttctagattctgctgaccagcaatttgactagtttgcttattttcctcattatgataccattttatagagatgtagctgtactggaatagaaaagatgtgtgaattttttaagtactttgtttggcatgcattgtacaatttactttgtgattttctgcattctatattaggagcttcaatgtttaactrtaagcctcatcaagaatcaggattggaaacatttgttcccaaatgctgttttaaatatttatttatttttcagcatacaaattataatttaatttatgaaggcttgctagagacctgtaatgatccatagatccccgtttgaactagcagtctctcagaccataatgttttgtctcaggatttaatgatgttatatgtatgtatctagtccgtgaaaatgagcttcatttccttcttattcatatagctgcactcatacttttctattcaagtagctttagtagaataaaaatttggtatatgtrctctcatttgatgatgatgatgatgccactaacagttttgtgagttttcccattagttatggtggtaggtcctgagcaacccaaatgctgcctgaagtactgtgcattcattctcatctgcttgtacaaataaattataaatgataatttatcatctaacatctaaatttataatttaagtatagttattacagaattaaaactatgacttacttcaggaatttagccarctcttttatgaaaatgttttatctctatttttcttgaagatttaaatttttttaaatgtaattcagttacaagtataggatttggtcttaaatatttgattttataattagattatttgaaatactaattagtgtttctgttgcatgttttctggtttcagctggaaggccataatgaacctgtagtgttgcaagtgtttgtgggcaacgactctggacgagtgaaaccacatggattttatcaggcctgcagagtaactggacgaaatacaactccttgcaaagaagtggacattgaaggcactactgttatagaagtcggccttgatcctagcaacaacatgacactggcgtaagtacttagtaagaatttttcattatacattacactcttgtgttaggcagaattgttcagtttctaatgtatagaagattttttgcgtattttattaaaatgttttaaatattatgaataaaaaaagacattacttcagaatggtaatgggttaaaattaactcttttaccatttgctaaagaattcccatggttgggccaggcgcagtggctcatgcctataatcccagtgcttttggagtctgaggctggtggatcacctgaggtcaggagttagagaccagcctggccaacatggtgaaaccctgtctctactgaaagtacaaaaattagctgggtgtggtggcacgtgcctgtaatcccagctacttgggaggctgaggcaggagaatcacttgaacccaggaggcggagtttgcagtgagccgagattgtgccactgccctccaagctgggcaacaaagcgagactctgtctcacaaaaaaaaaaaaaaaaaaaagaattcccgtggtaaaggcagggaaatcaaagccaagtggaaagctggccaaagacttacttttttgggtttataatagtaacattgaaaataaaaacttcaatttgatttgctttcctgaattccactttcttaatgtttgctttaaaaactttttttttttttttgagacagagtctccgtctgtcgcccaggctggagtgcagtggtgctatctctgcttactacaacctctgcctcccaggttcaagtgattctccctgcctcagcctcccaagtagctgagattacaggcatctgccaccacacccggctaattttgtatttttagtagagtcggggtttcaccatcttggccaggctggtctccaactcctgacctcaggtaatccacacaccttggcctcccaaagtgctgggattacaggcatgagccgctgcacccagccgaaaaactgttcagcagagactatgaagtgccttattccatcttgatgtgaaacacatattgctggtttaaattcaccgtctgttgttattttcctctgtttaaaaaatatatatctttagatttagattatgtgtttttcatcttgtgcatttaaattttaaaaattatttttycttaagccttttgtaaaggacctttaatcctaaaattgaaccgtaacagcaggaaatatattggtatggggtagatctatgttgtaattatttgtatattggatagttgctaaagactttacttggttttcagttttcttttgaaagccattttaaatagattggtaaaaggttagttggaaaagacattttgagaaatattttgtaaattttttttttttggagagggagtcttgctttgttgcccaagctgcagtggagtggcacgatctcggctcactgcaacctccacctcctgggttcaagcgattctcctccctcagcctcccgagtagcttggattacaggcgcccaccaccgtacctggctaatttttgtattttagtagagacggggtttcactgtgtaggtcaagctggtcttgaactcctgacctcaaatgatccgcccacctcaggctcccaaagtgctgggattacaggcgtgagccaccgtgcctggcctcataaatattttttaacttgtaacttttgaaaattactaaaaaaggggctgggcacgcagtggctcacacctgtaatcccagcactttgggaggccgaggcaggtggatcactaagtcaggagttcaagaccagcctggccaagatggagaaaccctgtctctactaaaaatacaaaaaattagccaggcgtggtggtgggcgcctgtaatccaagctacttgggaggccaaagcagagaattgcttgaagccgggaggtggaggttgcagtgagctgagatcatgccactgcactccagcctgggcaacagagcaagactccatctcaaaaaaaaaaaaaaaaaaagacaattataaaaataaatacatataggccgggcgcagtggctcacgcctgtaatcccagcactttgggaggccgaggcaggcggatcacgaggtcaggagatcgagaccatcctggctgtcatggtgaaaccccgtctctactaaaaatacaaaaaattagccaggcgtggtggcgggcgcctgtagtcccagctactccagaggctgaggcaggagaatggcgtgaacccgggaggcagacttgcagcgagccaagatcgctccactgcactccagcctgggcgacagggcgagacttgtctcaaaaaaaaaaaaataaataaagtaaaataaataaataaatacatatagtagaggaggaaaggaaggaatttactgattataaaaatagtacttattcaatataagaaagttgaaaacaggccaggcgtgctggctcatgcctgtaatcccaatgctttggaaagctgaggcatgcagatcatctgaggccaggactttgagaccagcctggccaacatggcgaaaccccatctctactaaaaatatagaaattagccaggagtggtggtgcatgcctgtagtcccagctacttgagaggttgaggcaggagaatctctggaaccctggaggcagaggctgcagtgagctgagattgcaacattgtgctccagcctgggcaacaagagcgaaactctgtctcaaaaaaaaaaaaaaaagttgaaaacacagggtaaaaaaagctaaaaacatgccctttaaaaactaacttgtggcctggcacmgtggcttgtaatcccaacactgggaggctgaggtggacagatctcttgagccaggagttcgagaccaacctaggcaacatagtaagactccgactgtactaaaaatacaaaagtgagctggagtggtggtgcgtgcctgtaatcccagctactcaggaggctgaggcatgagaattacctgaacccaggagggagaggttgtagtgagctgaggtagcgccattgcgctcaggcctgggtgacagagcgagactctgtctcaaaaaaataaaataaaaatataaataaaaaacaacttcctggaaataaccgctattttaatgtgtatcttcccagtcttttttggacaaaattgagaaaatactgtacccactgttttgtaatctgctttttacttaacatatcatgagcatttttcacatatcattcaatgtggtaacatactttttagtggctattattctatccttctggaggcagctactaattttttaaaagtaaaatccattttatctgttttctgaattagctctgtaaagaaagagactaaatgtatttttttattttttttttttttttaaaaaaaaggtctctggccaggtatggttgctcatgcctgtaatcccagcactttgggaggccagggtgggtggatcacttgaggacaggagttcaagaccggcctggccaacatggtgtaaccccatctttactaaaaatacaaaaaatagttgggcatggtggcggccacctgtaatcccagctactcaggaggctgaggcaggagaatcccttgaaccccaggagacagaggttgcagtgagccgagatcacgccactgcactccagcctgggtgacagtgagactccatctcaaaaaaaaagatctcttataagccattatttatgttcagattttaaaatagtgattttattttttttactttttattattataaacaaaagattgacaggattaggaacagtggtgaatgtttagaatttacccttttgtactttttgaacttggaactttgtaactttattacataytcacagaattaatagataagcaaaattttaaaaacaaacttgttgattaagaacattatactatttatacaacaaaatgtccctttatatattttttttctgtattagggtggactgcgtagggatattgaaattgaggaatgctgatgtcgaagccagaataggaattgctggttccaagaagaaaagcactcgtgccagattggtttttcgagttaatatcatgaggaaagatggctccactttgacactgcaaacaccctcttctccaattttgtgtagtaagtaagaagatacggagatactaaacatatggagtttctttcattttctgttaatcttttagacatctctaaattttagatatttcatatgctccggcttgtgatcatgcaaaatttgaaatattttaaaagcagtagtcagattttctagaccaaactagaggtgaatacttgggatacaattcaaaagatgtggaacattttgtagtttcctattatcataatatgctgatttaaaaagtaatttggaccagacagggtggctcccagcactttgggaggccaaggtgggaggatcacttcagcccaggagtttaagaccagcctgggcaatgtagtgaaaatcctgtctctacaaaataaaaaaatatatataataagttgggtgtgatggcttgtgcctgtagtttcagctactcaggaaggtgaggcaagaggatcacttgagccctaggaggtcaaggctgcagtgagccttgagcgtgccactgcacgccagcctgggcagcagactgcgactgtctcaaaaaaaaagaaagtaatttgagctggttatcagaagtaaattacaaagcgaaagcattttctaagcatcttcactgtgtggtaaattactgtggttctaactgttttgtgttagaacatgagtaaggtaagcagaactttgcaaataacaacatgtcagaagtttcaattattaattataatattatagtatagtgttgggagtgggaaattcaattcttatcactaaccttgacatggatagaaaatgatgtgtgcgtgtttgtgtgtgtaaattcaattatgttgttatatatgtctcaccataattgtagtttctctctaatgattattgttataggtaataaataggaaaaattttccttttcacgtctctctctctcttttttttttcttttttgagatggagtttcgcttgttgcccaggctggagtgcaatggtgtgatctctgcttacagcaacctccacctcccaggctcaagcgattctcctgcctcagcctcccgagtagctgggattacaggtgtgtgccactagcacctggctaatttttgtatttttagtagaggtggggtttcaccctgttggccaggctggtcttgaactcctgacctcaaatgatctgcccactcctcccagcaccccccaccaccctttttttttttttttttgttagattgtggctcatgcctgtaataccagcactttgagaggccaaggcaggaggacaggagtttgagaccagccgaggctggtctctcttcctgtttccttctgtctcccattccaatcccagctcttcttactaaccaactttgttttcacctctcattttactccagctgtttaaacctgccaaaaagtttgtattcatggaaactaacataagccagaaacttataatggaagtgtattgaacaacataatgagagaacctgtctttacaaaaattaaaaaaaaaaaaaaaagccaggcatggtggcatgtgcctgtagtcccagctactcaggaggctgaggcagaaggatcacttgagcccaggagttttgagatagcagtgagctatgatcacaccactgcactccagcctgtataagagacccagtctcttaaaaaaaaaaaaaaaaaaaaaaaaaaagggaaattgttcagatgagtgctttttgtttttaatttttattgtgttctgataacaaaatatgcctcattgctcattcagtcactcatttagtcaacataaattaaatgcagttgttctcaatcctgggtgtaggttcgagtcacctgtagtgctttaaaacaaacaaaaaggcatgccaattgatgatttgtttttggaaaacttcatagttaattcaatggatagttacagtgtgcctaactctgaaattaaagattatagtttaaggagcttacagtttagcaggctggggaaaaaacaggcaagtaaatgtctaattttatagtaaaattatattaacttccatatatgtgtatataaaattgtatataggccaggcgtgggagctcacacctataatcggagcactttgggaggccaaggcagggggattgcttgagcccaggagtttcagattagcttgggcaacaaagcaagaccctgtctctatttttttaattgcatataaaaattatataagcttccaattgtattataaagttatataaagatactatactgcacagtagctgtgtgaataaagtacagtggaaacatagtaagagcatctaattcagactgctcagagatggtagaacttgttctgtcttgtcttaaaacacaaatagaagtaaaacaagtaaaatgggatttacttgaaaaattttcatatctacccttctgtagtaattctgggcagagggattcatgtataaatatgctccctggaaggatatgattcttttgggggaaataaaaagagttttatgtgattggaataaaaagatatacattatgaagtggtaagatttgaggttacagaggtagacaacacctctttcttttttttttttttttttttttttgagacggagtctcgctctgttgcccaggctgaagtgcagtggcatcatgatctctgctcactgcaagctccacctcccgggttcccgccattctcctgcctcagcctcccgagtagctgggactacaggcacccgccaccacgcccggctaattttttgtattttttagtagagacggggtttcaccgtgttagccaggatggtctcgatctcctgagctcgtgatctgcctgcctcggcctcccaaagtgctggggttacaggcgtgagccactgcgcccggccgacaacacctctttcataaagagacttgtgtattcagcaaaataatttgaattttatcctgaccacttaggaagcttgatgcttgaacttgcgactttgagggctggatatgggaggaaaagaagaataaacataaaaatgatctacagtaaaacacaggacccaaaaaatctttttatttaaaaaaattaaaatgtttgttccattataagtttctggcttgtatttctttccgtgaatataaactttttggcagctttaagcagttgcagtaaaatgagaggtaaaaaggaaattggttagtgcaaagagttgggattggaatgggagatagaaggaaacaggaagagagagaggtagaaaaggaaaggggccaaaaggtgacagagttggaagggagaagaggaaacagatacttgatcttccttctatagatactcagtggaaagaatttctaatatcaggattcatgcagtgccttgtggctttaaaaaaattacttctaattattggtttaacaatggccattggatcctttgtctttttgtttttaaggggatagaagatcatccctttttacattcttaacatctttcatgttctccagacaatataggtgtatatgttttttgttttggtatgtatgtttatattattttgttatgttatatcaaattaagaatattaattttcagctaggtgcagtggcacgcacctgtagtcccagctacttgggaggctgaggaaggagaatcacttgagcccaggagtttgaatccagcctgggattcaaacccatctctttaaaaaaaaaaaaaaaaaaaaaaaggccaggtgcagttgtacacgcctgtaataccagcactttgggagggcgaggtaggaagattgcttgaagccaggagttggaaaccagcctggacaacatagcaagagtccatctccacacacaaaaaaaatgttttaagttagctgggcgtggtggcatgtccctgtagacccagctacttgagagactatgatgggaggattatttgagcccaagagttcaaggatacagtgagctatggtggcaccactgcactccagcctgggcaacagagtgaggtcttattgatctgtccttaaaaaagaaaaaagaaaaaattttcatatctacccttctgtagtagtttttaataggacaaaattaatcatggctttcttacatgtaatatatattagattttatcttatggttactcaattaaatatgactcwgaatttaagaattttctacttcccctatttctacctatcccacagctatggggaaaggatggtattgttaagcaaactatccctctcttaaaattttggataggattagtaatttacatagtcagatgtaggctttatactctaaaatattctgttaactatgttgttctactagacattattacaaagctttattctcttgacaggttgaaatatttgcttacttatttttcagtattcagatattcattatttttttcaactttatttatttatttattttttgagacggagtctcactctgtcacccaggctggagtgcagtggcgatcccggctcactgcaagctccacctccggggttcacaccattctcctgcctcagcctcccgagtagctgggactacaggtgcccattaccacgcctggctaatttttggtattttttagtagagacggggtttcaccgtgttagccaggatggtctcaatctcctgacctcgtgatccgcctgcctcggcctctcagggtgctgggattacaggtgtgagccaccgcacccggcctcaactttatttttcagactgctagttgaaaagcatctaaaagcacacagtttttacaataccaaaaaggtgattttttgtgtgttctaatttttaagcattattcctttcaagtaatttttaagcattattcctttcaagagtcagcttataaataacttggtcgggcgcagtggctcacgcctgtaatcccagcactttgggaggccaaggtgggcccattacctgaggtcaggagattgagaccagcctgagcaacatggagaaaacccatctctgctaaaaatacaaagttagccgggcttggtggtgcatacctgtaatcccagctactcgggaggatgaggcaagagaattgcttgaacctgggaggtggaggttgcggttagccaagactgcgccactgcactccagcctgggcaacaagaacaaaactccgtctcaaataaatagataaataagtaaataacttaaaaataaaacagttaatgcttaagtaatcttgactttagttgtgtttagtatggcgtctgttggggactcatctcgtaaactttaaagaaaggaccttttaaaaggccagaagttaaattatcttgaatctatgacaaacccacagccaatatcatactgaatgggcaaaaactggaagcattccctttgaaaactggcacaagacagggatgccctctctcaccactcctattcaacatagtgttggaagttctggccagggcaattaggcaggagaaggaaataaagggtattcaattaggaaaagaggaagtcaaattgtccctgtttgcagacgacatgattgtatatctagaaaaccccattgtctcagcccaaaatctccttaagctgataagcaacttcagcaaagtctcaggatacaaaatcaatgtacaaaaatcacaagcattcttatacaccaacaacagacaaacagagagccaaatcatgagtgaactcccattcacaattgcttcaaagagaataaaatacctaggaatccaacttacaagggatgtgaaggacctcttcaaggagaactacaagccactgctcaatgaaataaaagaggatacaaacaaatggaagaacattccatgctcatgggtaggaagaatcaatatcgtgaaaatggccatactgcccaaggtaatttacagattcaatgccatccccatcaagctaccaatgactttcttcacagaattggaaaaaactactttaaagttcatatggaaccaaaaaagagcctgcatcgccaagtcaatcctaagccaaaagaacaaagctggaggcatcacactacctgacttcaaactatactacaaggctacagtaaccaaaacagcatggtactggtaccaaaacagagatatagatcaatggaacagaacagagccctcagaaataatgccgcatatctacaactatctgatctttgacaaacctgagaaaaacaagcaatggggaaaggattccctatttaataaatggtgctgggaaaactggctagccatatgtagaaagctgaaactggatcccttccttacaccttatacaaaaatcaattcaagatggattaaagacttaaacgttagacctaaaaccataaaaaccctagaagaaaacctaggcattaccattcaggacataggcatgggcaaggacttcatgtctaaaacaccaaaagcaatggcaaccaaagccaaaattgacaaatgggatctaattaaacggaagagcttctgcacagcaaaagaaactaccatcagagtgaacaggcaacctacaaaatgggagaaaattttcgcaacctactcatctgacaaagggctaatatccagaatctacaatgaactcaaacagatttacaagaaaaaaacaaacaaccccatcaacaagtgggcgaaggacatgaacagacacttctcaaaagaagacatttatgcaggaaaaaaaacacatgaaaaaatgctcaccatcactggccatcagagaaatacaaatcaaaaccacaatgagataccatctcacaccagttagaatggcaatcattaaaaagtcaggaaacagcaggtgctggagaggatgtggagaaataggaacacttttacactgttggtgggactgtaaactagttcaaccattgtggaagtcagtgtggcgattcctcagggatctagaactagaaataccatttgacccagccatcccattactgggtatatacccaaaggactataaatcatgctgctataaagatacatgcacacatatgtttattgcagcactattcacaatagcaaagacttggaaccaacccagatgtccaacaatgatagactggattaagaaaatgtggcacatatacaccatggaatactatgcagccataaaaaatgatgagttcatgtcctttgtagggacatggatgaaactggaaatcatcactctcagtaaactatcgcaagaacaaaaaaccaaacactgcatattctcactcataggtgggaattgaacaatgagaacacatggacacaggaaggggaacatcacactctggggacggttgtggggtggggggaggggggagggatagcactgggagatatacctaatgctagatgacgagttagtgggtgcagcacaccagcatggcacatgtatacatatgtaactaacctgcacattgtgcacatgtaccctaaaacttaaaagtataataataatacatttaaaaaaaaaactttacaagaatagtaaattttaagtaacaaaactgtataatatgtgggatctcttttgcataattgtataatgtcaagattcaatatacttcttttctgacttgtactgtataacttgtgaataaagcaggtcatttttgcagaaactaaaaaaaaaaaaaaaagaaagtaaccgactagttctttctgtaatgtaaatacgaatatgtagaagataaatatattctaaaccttggggcctcatttggctgtcttatgcctttaacaaataaatttaaaaaatgagatatgggaaaaagttttatcagtaatcagtgaagtggaatttccacacagtatttgaaaatggagggaaaggttatatgctttacgtttcattttggtaatacaatatattaatgtaattttaacaagatataccatatgtttctggaatgtttttaaaaacaagtatctatttcctgttactccaaaaagttacctttgaataaactgatttagttaattcttcatttaaaagggtatatcattgtcagtgtatgaccaataaccctttccattctgttcacacatttaccctataggttctagacaatacttattttttgtttttttgttttttgtttgtttctttttttagacaaggtttcacttttgtttaccaggctggggtgcagtggcrtgatctcgggtcactgcaacctctgcctcctgggttcaaccgattctcctgcctcagcctcccgagtagctgggattacaagcatgtgccagcacacccagctaattttttgtatttttagtaaagatggggtttcaccatgttggccaggctgaccaacttgaactcctgacctcctcgaactcctgacctcaggtgatctgcccctctcggtctcccaaagtattgggattacaggcgtgagccacctcacccggccagtgtatttgtttatacattaacaatttctattaaactccccagcattgttgaaaatgtcatttatcatatacaaacaggttaaatatctcttatcttaaatgcttaggacccgaagtgtttcaggttttgaatttctttggactttgaatttctttgcatatacataatgaggtttcatgggaatggtacccaagtgtaaacacagaattcatttgtgtttcatgtacagctatacacatagcttgaaggtaattttacataatattttaaataattttgtgcatcagagtttcaaaaagcaaaggtgtcactgtttcagccacctttgtaaataatctttgtaaataacctgttgggcatcaccatcattcctgactctgaatttatttttatttttatttttttttgagacgaagtcttgctgtgtcacccaggctggagtgcagtggcacgatcttggctcacagcaacctccacctcccaggttcaagagattctcctgcctcagcctcccaagtagctgggattacaagcacccaccaccacgcccagctaattttttgtatttttagtagaaacagggtttcacccgactctgaatttatatgctaccaataagcaatccttttcttatatttcttcacacgtaagtacttaacaccggtgcagtcatgactcactgcagcctcaacctctggggtttaagtgatcctcccactccagcctcctaagtagctgggaattgcatgtgcatactaccacgcccagctaatttttttgatttttttgtagagacaaggtctcactattgcccaggctggtcttgaactcctgggctcaagtgatccttcaaccttagcctcccaaagtgctgggattacaggtgtgaaccactgcacccagcccaggtgtgtaaatttttgagcattgtattggcactcaaaaagttttggattttggagcatttaagattttagatttttggctgggcatggtggctcatgcctgaatcccagcattttgggaggccaaggtgggtggatcacaaggttcgagaccagcctgaccaacatggtgaaaccccgtctctactaaaaatacaaaaattagctgggcgtggtagtgtgcatctgtaatctcagctactgaggaggctgaggcaggagaatcacttgagcccaggaggcagaggttgcggtgagctgagatcacacctctgcattctagcctgggcgacagagtgagactcagtctcaaaaaaaaaagattttagatttttggattagggatgctcaacctgtatttaacaaagacaggatacttgtttgtatcaatagctgaaggctaaatgatactgcaataacacacaatttaaaagaagacaacaaaacaaaactcagtggcttacaacaactgagttggtaaaaccatgtgatggctctcaaaactttcacttggacttggcacattacttcagttcatatttgattatccaaaccagtcacatgaccaagcctgtcagtagagcaagaattatagcctttccagataattgtgtaactataaaaatatttattactcctccttcaataaagacaactcatagaaccggatgattgcaagttgattttaggtaagaaataagttttggtggttcttcttatagaatgmttatgtatctccacagctcagccagcaggagtgccagaaatcttaaagaaaagcttgcatagctgttcagtgaaaggagaagaagaagtgtttttaatcggcaagaactttctgaaaggaactaaagttattttccaagaaaatgtttctggtaagtacgcatatttgtggtacagatatttgtatgttttcactttgttatatggatatagtcatagctacagagtaaaaaaaatagttcaaaaatttaataaatcactttttatttcaatcagatgaaaactcttggaagtcagaagctgaaattgatatggaactatttcatcaggtaaaatttaagctttttttataatttggttatttactctctgagcaattcagttttgttttgaaattttcctgaatcaatagattaaatttcttcttcctatgggattgatatgaattatttaaagtttctttcttgagtttctttaacygaaatagaattattttcctaatggtaaacatgaccacctctattttaaaaagttaggatcattaacaaatgtttccattgttaataaacaaaatctttctttcctgatacttattttctctgaggatttgcataatcttaatccactatatagttaaataaaagggaaaccaatatttattgagaatctgttatgtttcaggtactttatatttgttaaaccttcttgtgtttagaagcactcatcacactgatattagtctgtatttgcaggacctcaccatgtattgtttcccaaataacaatgaaaacttgaaaacaaggatcaagacctgacttaggaattcgtatttagagcagacaggaccaaacccctagaaattgagactaacagaargccaaatttataagcaagttagaaggcacatggagaagaggtagtatgtacaggtgtagaactgagacagagagagaagagagaaacaggaacaagctaatgtgtaaattacccaaagcctaaaatttagtgtaagctgatggggaaagaaaagagcacatgacagaaggtagagaaatagaagatgcaaaaattagacaatctatagccactttatccaaaaagtttataatttccttgttgttttaaaatttattttttattcctttgtgtatttttaaaaacctaataaaatttaaaacatatatccaatatattgccacactcaaggctcagggcacagccaagactgttgccacttcatacaccagacacaagttcaaaggtccccaggccaccctctttttttgaacgagtggctcaaacagtatttttcctactgtccccttggatttgataacttcctagaaaaattcacagaactctgggaagtgctatacttagtgcctgtagtttttttgtttgtttgtttttgttttgttgttgttgttcttttaagacagtcttgctctgtcgccaggctggcatacagtggcgcgatttcagctcactgcaacctctgactccctggttcaagcaattctcctgtctcagcctcctgagtaactgggactacaggcatgtgccaccatgtccagctaatttttgtatttttagaagagacggggtttcaccatgttggccaggatggcctccatctcctgacctcatgatctgcccgccttggcctcccaaagtgctgggattacaggtgtgaaccactgtgcctggcctagtgcctatagttttacaacaaaaggacagaaatcagaatcagctaaagggagagatgcataacacaaggtctcggagtgtcccaggcactaaccttctgtcatcctcaggaagacattaccatcttggcatagcaatgtgtgatgataacaatatgcagagaattaccaagcagggaagctcacccaagcctttggtgtccagagttattatttcagacctgattatatactgcccatgcagctacctttggtcttcacttccacaaggttagaattgatatggtgtgttccaaagcctctgttataaatcacattgttagactatccagcgaccaaagctctcaagtaaatatcactgtcacacaagacattgcaggaacctagagattacctcctagcagccagaggtaaagaccagaactctctctgggtaaagttaattatttcctagacaatatcgtatagtgtggagattcctatatatctagacaaatgctatgtggcaagttttcctctggccttatgcaactacatgttgtggaaaagagataatgggacttaacaaacattcctttgtcacacagaccattgggcaatatctcctagggtttatagtcagactagtcttaattgaagttttaatacctgctttgtcattagcaatctgtgttaactaagtaagacaaatgacttttgtgctccagttttctgatctgtaagataagcgctttcattagattatttgagactcctctgactctaacattttattatttcttatattatttgatcagaccatctccactcccatgaaccaacaatagcttcctctggagtactcctggaggttagaggcaatgtattataattcttctgtgttccttgtaataccaaacacttaatagatacacaagaaaaacttattagttcattttattcaccttgaagaaaaaaatgggtgactgtgtggtctaagtaaggttcatttgttctttccgaggatacttcaaaccctaatttcagccaggtctttaaatacctagagttgtaatcctaactgaaacttaatttattcatgcagtacttttgtatgctatgaacatgttttgtttcttgacaaattagttagattaatgtagactcccttgcttgtaatgctctattatgattgttattcttatgataaagattgatagataaggagactatttctggagattgagagacttgccttataaattatacaaaatatcaatgacatagccccaacaaattgtagtattaacttgctattttgtatagaactttatattcataagttatcctccctccctacctccatttttctttctctctctctctcttgccttttgaggcatggggtagttatatttttaaaacactttttttcagggcagttatgccagctacagtaggttaaagaataataatcataaaaataagacacgtggtggaatggaaaggaattatatccttatttggtgactatatctagaggtcctggggtttttgcaagcaagtatgtaaacaaactaaatcataatataatctgtcattaattctgtggttttgttcatttttatctttttcagagagaggttttattttattttttttctaaaggggttttcttggaagccttttctttgagtggaatcagagctgagatcctagagaattgattctagagattatataaaggaagaaaacccacaaagcaaacctttagggggaagaaaatgtgttgagactgggcatagtgactcatacctataatcccagcactttgggaggtagaggcaggaggattgcttgaagctgggagtttaagaccagcctgggcaacatagtgagatcccatctctacaaaaaatttaaaatatagccagtcatggtggcacatgcatatagttccagctacttgggaggctgaggtcagagaatcacttgagcccaggaagttgaggctgcagtgagccctgattccgccactgcacttccacgtgggtgacagtgagaccctgtctcaaacaaaaaaaaaagacaacacactttggatgtgatcagtaaagaaatattaggcctacacaaaaaaagttgaaagggaatctctacaatatttaaaaatacccagcagatggtatagtagaaaagaccatttaaagataatttcacaaattgcagttgtgaaagattgtaatagctgttcagttgcaaacccaaaatcaattcatcaggtattacactttttctatcatattataaatattgccaggcgtgtggctcatgcctataatcccagcagtttgggaggccgaggcaggtgaatcacctgaggtcaggagttcgcgaccagcctagacaatatggcaaaaccccatctctactaaaaatacaaaaatttgctgggtgtggtggcatatgcctgtaatcccagctacttaggaggctgaggcaagaaaatcacttgaacccaggaggcggaggttgcagtgagctgagatcacgccattgcactccagcctgggcaacaagagtgaaactgtctcaaaaaaaaaaaaaaaaaaaaagtaatacggtattataaatattgagactaatgaagtctggaaaaacaattctttgttcaattgttttctggtcttctggtccatagtatacctcatgctcatgtataccaaatatgatgggtacatgatcattcattatgtctattcccttttaacaactgtagatgagttatatataacattaattacctattaaaaatatatataaagggatattcaatctatatatacaaatatacataaaaggatagctcaggggaagatggtataaatgtggaaagaaaattcttgaaagaagtacaaaaaaaagatcctcagaagaatttgtgggaagaactagactaaacaaagacttgaaagcttagagttatgtttttcaaatcagttctaagagtaattttgtaatgggtctttggtcaagtctaattgtagatattctaattatgtaggtattctgattatatatattcccaactgtaaaattaatgtgacaaaataaaaagtatctcatagaagagtgaaagatatctagcaccattgctggtacactctgaaaaagattatctgctagggaaaaagttatttgaatctaagcagatttttctaagaagttaaaattcaattgttttcctctttttatcccaaagagcattatacctgctcccaaagcctcccaaccctttgtatgttttgtatgtactgtatccctagctcagtgatagttaattgtttctaatttatgagagggtattaaaaatagcttttgatcactagtgacagtttacctaatttttaattcagatcagttgtagaatttctagattcagattgaggaagtttgaagaattagtagcaaaatagrttcatttggtttttaaaaggtttcaaaattagttttacttaaatgtgctctccaaagcaagtagagtaaaagtattttgataaaatatgcatctgatttgtagacactagtcctgttactaattgccaagaaacaagtttttattcaaaagaatagtttgaattatggagtttgccaaacaattttaagagtgagagctctcacaagctgttcattcaaccatctccttaactctagatagactgtttctgtgacatagttgtagtgtttaaacaacagagtaaaaatgaggtagacaagattcagtaactctgtttcttagaagttagatcaataccagtgcgttttttatgaccttgtatgtgttcagatttagctcctgccttataactgtggatgtatgcatatttgtacatgtttttccacctagttgaaaagaatgtggtttttttgagatggccaacttaggaggcattctgttaatgccgtaaattagaagctagttttttgtttttttgttttttttgttttggagacagagttacgctcttgttgcccaggctggagtgcaatgacgcgctcttggctcacctcaacctccgccccccgggttcaagcgattcttctgcctcagcctcctgagtagctgggattacaggcatgtgccaccagggctggctaattttttgtatttttagtagaaacagggtttcaccatgttaaccaggctgttctcaagctcctgacctcaggtgatctgcccacctcggcctcccaaagtgttgggattacaggcgtaagccaccatgcctggcctagttctttatttataatgtgactgtatttcagagagtgttttaagatggctcagaaacaaattaaattctcagaaatggaaaccttgaccttgatctcatttgtcccatattttctattcaactgagtcaacgaactatgtagtctaactaaattttaaatgtcatcaaactcacgtcaccctcagctgtcagcttcggcctcctgcaaatcagatcattagtgaaaaagcataatcactaccctgtgatatcccctaccattataataatctactagggaagaagaaaaaaaagtcaaatatggctcatattaccctctaagaagatatagtacccttgagtaagtactggtgaaacttttatgaactctgcctttctcttataaggatgcttctgccactgttccaactaaaaacatctttggtttactgagatgtggataaactgaacccaatttgacttaaaatgagaattatgttgttaggagtagcgaactgcattgtgaaatacatctcacattgaggttgtacagaatgtatggtaactgactttgcccttggtgggcatattttttttctaataatttattcattcttttattcaatatgtaccttatgtaaggtactattctttacaagtgagacagagtgaagaacaaaacagcctagatcctcatggagcttacattcttatgtttggagaaagaccaaaaaacaagcaaatagggtaatttgcaggggtgaggataagtgctgttatggaaataaacaagattatgttataaggttggggaagggttttgctttaaataggatgatcagggaaggcttctttgaggtgacatttgtatctgacctgataatgggttaggaactcmccatttgaggaggtgaaggaataatattgcaattgaagagaataacaagtatagagaatctgaggtaaaactgagtttagtatgttaaaagaagggaccgaggtcagtgtggctacagtgtagtgagctagaagagcaggaatgagatgaagttgacagggcagggatcttgaccttgtaagccattataaaacacttggattttaccttaaaagcagtgttaagattaatatcctgatgcctgtgaacctgagctttaaaatgcattcttttttttttaatcactttttaaactttacagctaacaggaaatatacttcatttaaaatttttaaatttaagtattgcttcttttccaactcttgtgcttttctttacattagaatcatcttattgtgaaggttcctccctatcatgaccaacatataactttgcctgtgtcagtgggaatatatgtagtgacaaatgctggaagatctcatgatgttcaaccattcacttacactccagacccaggtatgtcaaaatgaaaaattcagaactaaaacaaataattaatttccagytttttgaaagaatatgaagatgwctagccaaccaaaaagaaagttgctcactaagatgaattgatgttagtttcttttggaaatgacattattttctaagaggacagccgccagatactgcttttactcttatattaaggaatcatttctaccttatgctataataataaaaggcagcaatgctctgaagtcagattctctgaagctatctgacaggttactcctccataagaatttccatgcattgactaccgcttatgtgcagaaacctgaaagtgacaactttgggaaattgctaatagtttagtttggctggtttatagggtacattttgagagagagaagagataaactagagtgacaggtgataaaataaaaaatcccaaagactgatggtgaataaatatttttttctttctatattgccccataatacctgataaatattttaaataaaactttggttgggttaaaacgatattttaggctgggtgcggtgatgcacacctgtaatctcagcactttgggaggccgaggcgggtggatcacctgaggtcaggggtttgagatgaggctggccaacatgttgaaaccytgtctctactaaaaatacaaaaaaaaaattagctgggtgtggtgatgggtgcttgtaatcccagctactggggaggctgaggaaggagaattgcctgaacctgggaggtacaggttgcagtgagctgagattgtgccattgcactccagcctgggcgatagagcgagactgtctcaaagacagaaaacaaaacaaaaacctgatattttagaaatgagaggaactaaatttttttttttgcatgtgagtgggagacggagtctcgctgtgtcgcccaggctggagtgcaatggcgcgatcttggctcactgcaacctccacctcctgggttcaagctattctcctgcctcagcctcccgagtagctgggactacgggtgtacaccaccacgcccagctaatttttgttttttcagtagagacgaggtttcaccatgttagccaggctggtctcaaattcctgaccttgtgatccacctgcctcggcctcccaaagtgctgggattacaggcatgagccaccacgtccgaccctaaaatgttcaaagtttagaagatacctatttatgaagtgtctcacaagttatttgcctgcattcatttagatgcctgaaaaaagcaaaaagcctccttttggcagaaatggggagaacattttggaaatggaaactctttgcatgctccattgacctaggcttggcttctgccatgtttaccattggttcagttcagtccagtctcaagcatacttcagaattagcagttcttctctatctgtagtttattagtatgttatttccatatagttcaagatccagtgaggtagaaggtaaagaatggggcaaagaaagaaagccctggcatcaaaaagtgaagaaaacagtagctaggacagaataacaactaatttaagttaattgctttctgtcacttaatttttctattcactattctcttttcttttcttttctttttgagatggagtcttgtgttgcccaggctggggtgcagtagcgtgatcctgggtcattgcaacctctgcctcccaggttcaagcgattttcctacctcagcctctcatgagtagctggcactacaggcatgcaccaccatacatggctaatttttgttagtagagacagggttttgccatgttggccaggctggtctcaaactcctgacctcaggtgatctgcccgcctcggcctcccaaagtgctgggattacaggcgtgagccaccactcccagcctcatattttattcttaatcgtatctgaattttgcaacattattttctactaatttgttacaaaaggtatgccacagtacagcactgttaaaataccccttgaaggcctggcatggtggctcacacctgtaatcctagcacattgggaggccgaggtgggcgaatcacttaaggccaggaattcaaaaccagcctggccaacatggtgaaacccctctctactaaaaatacaaaaattagccaggcgtggtggtgggcacctgtttacccagctacgtgggaggctgagacaggagaatctcttgaacccgggaggtggaggttgcagtgagccaagatcacaccactatactctagcctgggaaacagagtgagactttgtcaataaataaataaataaataaccttgatatttgtctcagaattaaagatcatgtgtgaaaacattggaccaaaaaggcaaagtttagaaataacatcctggcttcaacaaaaataggagaaagaagattggcttattctcaaagaccaaatattttattgtttcctttctaggaaggcttaaaacatctaaggaaatttgatataaaattaataatagttggctgggcatggtggctcacgcctgtaatccccgccagcacttcgggaggccaaggcaggtggattacaaggtcaggagatcaggaccatcctggctaacacggtgaaacccatctctactaaaaatacaaaaaaattagccgggcgcggtggtgggcacctgtagtcccagctactcaggaggctgaggcaggagaatggcatgaacctgggaggcagagcttgcagtgagctgagattgcgccagtgtactccagcctgggcgacagagcaagactccatctcaaaagaaaaaggaaagaaaattaatgatagttaaagcattttagtaactgatagttactaaatattgacatttaatgtttggcaggagcttgcacaaacatgagaagaaagatggtataattaatacataggatttgtttcctgatgagcttctgcatcagttgtgttggaagggaaaggaatttatgtcaggaaatagccttaaaggttttgctatcctgaaaacactgagattttcttgtcttcacttgtttctttgtttttattgatatgagacttcaggactttgaagtacttagcatcaacactaagaatcatcatttcttagtgataaatgctaattattagaaattggcctttgataaattgctgaacaaacaacttttaagtattctacttcaaaggctatactaattgcctaattttggccattcttaggcaatcattactgtatgtttgctctttcaagttttcccccagcatattttgtatgttacagatagcaatcactcttagaaaaccttgtttgaataaatataaggtatgcaaactttgtaatacaatctaatgtcttagcttctgcctctatgatacagctaattagtcttcctgcaattttcatttttttgtttttttgtttttattttgttttgtttttttgagatgaattcttgctctgtcacccaggctggagtacagtggcgtgatctcggctcactgcaacctccacctcccaggttcaggcaattctcctgccacagcctccgaagtagctgggactacaggtgcccaccaccacacctggctaatttttgtatttttagtagagacggggtttcaccatgttggccaggctggtctctaactcctgacctcaagtgatccgcccgcctcagcctcccaaagtgttgggattacaggcatgagccacagttgtacttttttgtattttatgaaatgtaataatcttttcaagtgtccatgagaagtgtcttggaagccatgagagagaatatgatttcaggaaaacttgggcacagagaatttggcctatctcagtatgacaaactaatagctgttgtgattcatttagggactgttgttaaatatttgattactcgatagtgtattattatagcagccaaaacaaggtccatcctaatatttacgggttggagtagaagtggtgactgttaatactattagttgaaatacttaaaagttataaataaaactaacaaatcattaagtgaaatacctcctatcttactttgaccaaaataccctcataacaacctgaaaggctaaatttgaatttagaattttcaaactgctttgagttctaagctgggctatggtagcatgaggagagagcatccctgcctgccacccttcttttgccactttttggctccatcctatacttggaagcctttgataccttaatcagtgtttccacctaatatgcctaagagtgctcacaaaatctaggatagttgtacagaaaatctagggattggccgggcacggtggctcacgcctgtaatcccagcactttgggaggccgaggtgggcggatcatgaggtcaggagatcgagaccatcctggctaacacagtgaaaccccgtctctactaaaaaatacaaaaaattagccaggtgtggtggcaagtgcctgtagtcccagctacccaggaggctgaggcaggagaatggcatgaacccgggaggcagagcttgcagtaagctgagatcgcgccactgtactccagcctgggcaacagagcaagactccatctgaaaaaaaaaaaaaaaaagaaagaaaagaaaatctagggatcctgggtgcctgttacatggtctaaaggtagggtcaaggcaaaggctcaagtgaacatgtcctggttccacacattcttccaggtacagaccttctaacatcccatggggccatactgccccaaatcaaaatgtgtattctctcaggcacttagatacttttcagagtcataaaacctttgtattattgatagtctctgaagctttgcttagccattaaaacattttaattttttttttttttttacttcagcctattcagacacaaaaatcacacattatttgctgtaactccacagtggtgatttctataagaaatgggaatgtaatatttaacattttttttttttttctaaaaaagaaattactggctgggtgaggtggctcacatatgtggtcctgacacttcaggaggccaaggcaagaggatcacttgagcccaggagtttgagaccagcctgggcgatatagtgagaccsccccccccgccatccctacaaagaaaaaataatactaagctgagcttggtggcatgcacctgtagtcccagctacttgggaggctgaggtgagagatcgcttgagcctgagagattgaggctccagtaagccgtgatcatgccaatgtactccagcctggacaacagagcaagaccctgtctcaaaaaaataataagaagaatttaaaaataactcataacatgatttataagtagaaatttaaatttttttcaaggattagcttatatttttaaatcttttattactagaattaatgtcatgcataaatatgtgtgttttttttccattcagttgcctataaatcatttgttggacctactgtgaagcatactaagataaattatttaacttcattctcaggagatgtgtacagatttccctctttatttttgttataactatcatttgacatgttagaaaatataaaataaatatattgaaaaatagaaattggctgggcgtggtggctcacgcatagaatcccagcactttgggagaccgaggtgggcagatcacctgaggtcagaagttagagaccagcctgaccaacatggagaaaccccatctctactaaaaatacaaaattaacagggtgcggtggggcatgcctgtaatcccagctactggggaggctaaggcaggagaatcgcttgaacccaggaggcggaggttgcagtgagctgagatcgcgccactgcactccagcctgggcaacaagagcgaaactccgtctcaaaagaaaaaaagaagaaaaaagaaaagtagaaattaaggccaagcacggtggttcatgcctgtaatcccagcagttagggtgtctgaggtgggcagattgcttgtgctcagcagtttgagaccaacctgggcaacatggcgaaacaccatttctaccaaaaatataaaaattagactggcgtggtggcgtgtgcctgtagttccagctactcaggaggctgaggtgggtgatggcttgagcttgggaggtggaagttgcagtgagccgttatcacgccactgcacttcagcctgggtgacagagccccagaccctgtctcaaaggaagaaaatatatatgtatattcaaataaaatatataatcatttgaagcaagaacgaatttatttgtaatttattaaactttattttttagaactgatttatatttaggcccattaaatttatagtttaaatttgttacagtaggctgggcactcaagcctgtaatcccagcactttgggaggccaaggcgggcagatcacttaaagtcaaaagtttgagacccagcttggccagcacggtgaaaccccatctctactaaaaatacaaaaattagcctggcagccagtgcggtggctcacgcctataatcccagcactttgggaagccaaggtgggcagattacctgaggtcaggagtttgagaccagcctggccaacatggtgaaaccccatctgtactgaaaatacaaaaattacccaggtatgatggtgtgcgcctgtagtcccagctacttgggaggctgaggcacgagaatcccttaaacccgggaggtggaggttgcagtgagtcaagactgcgccattgcactccagcctgggtaacaagagcgaaactccgtctcaaataaataaatagcctggcatggtggcgtgcacctgaaatcccagctactcaagaggctgaggcaggagaatcacttgaacctgggaggtggaggttgcagtgagccaggatcataccactgcactcctcctgggcgacctagcgagactgcctcaaaaaaaaaaaaaaaaaaaaattggctgggcacggtggctcacacctgtaatcccagcaatttgggaggccgaggcgggtgaatcacgaggtcaggagttcaagaccagcctggccaagatggtgaaaccttgtctctactaaaaatacaaaaaaattagctgggagtggtggcaggcgcctgtaatcccagctactcgggaggctgaggcagagaattgcttgaacccaggaggtggaggttgcagtgagccgagatcacgccactgcactccagcctgggcaacagagcgagactctgtcgcaaaaaaaaagatggggtttcaccatgttggtcagggtggtcttgaactcctgacctcaagtgatcacccgccttggcttcccaaagtgctgggattacagacgtgagccactacacatggcctggtattgttttgctaagtgatcacatgctccgcccacttggagattggagaatttagaggatagaaatttacctcaactagaatttctgctaaataaataattaaatratactttgtgacaagatattctaattaaagaatttaagatacgaggtttttaggatgagtaaatgtagataaatacattaatcttttttttaatagcagcagctggtgctttgaatgtaaatgtgaagaaggaaatatctagtccagcaagaccttgctcttttgaagaggccatgaaaggtaccaagtaaattcttctcaaaaatcgtaattgggtgctcctgtatgttttctctagcacmccttactattttgttttctcttaggtacttataatactttkcagggtatcttcatattgtaaaataaatatgtgtttaactttactaaatgtagagacttgttttccaatttgatatttttcttgctgaatatgtttttatatatatatatatatatatttttttttttaagtatattggagtggaggagttttgtttttttttttaattacccaatattaaaagtatatgaggctgggcacagtggttcatgcctgtaatgccagcactttgggaggccgagtcaggtagatcatttgaggtcaggacttcaagacctgcctggccaacatggtgaaaccctgtctctactgaaaatacaaaaattagccaggggtggtggcaggtgcccgtagtcccagctgctcgggaggctgagtcaggagaatctctttaatctgggaggcaggggttgcagtgagccaaggtcatgccactgtactccagcctgggcgacagagcgagaccctgtcttaaaaaaaaaaaaaaagtgaaataaggccaggcacggtgggtcacacctatagtcccagcactttcagaggccaaggtaggaagattacttgagtccagaaatttgagatgataaatatccattggctaataattaaatgcatcatctatagttattgctgaacagatatgggcagcacagtgagaagatttcttgtctctacaaaaaaattaaaacaggccaggcgcagtggctcacgcctgtaatcccagcactttaggaggccaaggtgggcrgataacctgaggtcaggcatttaagaccagagtgaccaacatggagaaacccattctctactaaaaatacaaaattagccaggcatggtggtgcatgcctgtaatcccagctacttgggaagctgaggcagaagaatcgcttgaactcaggaagcagaggttgcggtgagccgagatcgtgccaccgcactccagtctgggcaacaagagcaaaactatctccaaaaaagaaagaaagaaaaataggccaggcgcggtggctcatgcctttaatatcaacactttgggaggctgagcttggcagatcatcggaggtcaggagttggagaccagcctggtcaacatagcgaaaccccatctctactaaaaatacaaaaaaaaattagcctggcatggtgatgtgtgcctgtaatcccagctactctggaggctgaggcaagagaatcacttgaacctgggaggtggaggctacagtgagccaagattgtgccactgctctccagcctgggcaacagagcgggactcggtctcaaaaaaaaaaaattaaaaacattaaccgggcatggtggcatgcacttatcatcctagctattcatgagactgaggtaggaggattgcttgatctgaagaggtcgaaggtgcattgagctgtgatcgtaccactgcactccagcatgggcaaaggaacaaggttctcaaaaacaaaacaaagcagaaatttggttggtttatatacttttttgataaaaaatttaaatcaggctgggcacggtggctcacacctataattccagcactttgtggggctgaggtgattggatcacctgaggtcaggagtttgagaccagcctggccaacatggtgaaacctcatctctactaaaaatacaaaatttagctgggcatggtggtgcgtgcctgtaatcccagctgcttgggagattgggcagaagaattgcttgaacccgggaggcggggattgcagtgagccgagatcatgccactgcacttcagcctgggcgacacagtaaaactccacctcaaaaaatatatataaatcacatatgagaaattgtttggwagagattacttgagaaaaaatgcaagtgttggattgtaatgcattgacaccagcttgatgttcttagagcaaattaattcttaggaggagaaaaagattaatctgatattttcatttataatgtactactaaattgaagttgactagaagattattattraattaacaagatggaacatatctgacaaacttaatgtctggcctggagacattttggactgtttttggtgggactagacttaaataaaattggaacaaggccagatgtggtgactcrcacctgtaatcccagcactttgggaggccaagccagtggatcacctgaggtcaggagtttgagacctacctggccaacatggcaaaaccctgtctctactraaaatraaaarattagctgggcgtggtggtgtgtgcttgtaatcctagctagttgggaggctgagacaggagaatcgcttgaatccaggaggcgaaggttgtagtgagcccagattgagccactgcactccagctygggcaatagagcaagactctgaaaaaaaaaaaaaaaaaaaggattggaacataaataaaattaacctttgtgacctttgtgcatatggccgtagaaggacttgtgtctttgcatgagcattagactaaatgtccttttactgtttgtctttaccagtagacatacttgtcagtggtcaactgaggataggtaaaagactcttgctcaactttctctacctagtctcactttccagaaagggggagaagataataagcattactatctaaatacattttaagaaaaattgtagatctgttaagcagtaagtgtataggtgatatatttatttatatgtaatttctaattgaattataatataatcttatctgtaaacatggacatttttagatcaaaaatactattaataaaaatataagccaggtacagtggctagtgcctataatcccaactactcaggagactgaggtgggaggatcacttaaacccaggagtttggccgggcgcggtggctcacgcctgtaatcccagcacttgggaggccgaggcgggtggatcatgaggtcaggagatcgagaccatcctggctaacaaggtgaaaccccgtctctactaaaaatacaaaaaaaattagccgggcgcggtggcgggcgcctgtagtcccagctactcgggaggctgaggcaggagaatggcgtgaacccgggaagcggagcttgcagtgagccgagattgcgccactgcagtccgcagtcccgcctgggcgacagagcgagactccgtctcaaaaaaaaaaaaaaaaaaaaaaaaccaggagtttgaggctgcaggtactcactccagcctgggtaacagagtgagaccctgtctctaattgaatgaatgagtgagtaaatgaatgaatgaatgaatgaatatttttaaaaagaaaaatacagactgtatatttttatttttatttattattattattatttgagatggagtcttgctttgttgcccaggctggaatgcagtggcgtggtctcggcttactgcaacctctgacctctgcctcctgggttccagaggctgaggtaacaggtgccctctaccacacctggcttttttttatttttactttttttgtatttttagtagagacggggtttcaccatgttggtcaggctggcgaactcctgacctcgtggtccacccacctctgcctcccaaattgctgggattacaggcatgagccaatgcgcctggcccatatttttatttttataggattaaccaaacaatccacaacaaactaaattgacagtgataaagctaaagtaagattattttcttcattcattcagcaaacatttgttgattacctactgtgcaacaggtgataacaacatctgccttcacagagctcatgatctaatggaattcaaaagcaagaatagtagttgactattacaggatcaacttaagataacactaayggtttttcaaaatgttctatgggatattcttagattacttttaaatgcctgccctgtgcatgatctgaagttttgtctcagtcaaaattaggttgtaggccgagtgtggtggctcacgcctataatcccagcactttgggcagcctagtagggaggatcacttgagctcaggagttcaagaccagcctaggcaaagtaacgagactcttgtctctacaaaaaaattttaaaaattagtcaggcatggtggtgtgtgcctgtagtcccagctacttatggggctgaggtgggaggattgcctgagcccaggaggtggaggttgcagtgaggcctgattgtaccactgcactcccaccaacagagagagaccctgtctcaaataagataaaataaaataaaaatctggttgttaggggaattgtattggtattagaatttaggtgaaaataggtccaaagaactcatgaataaatgattcatttctcaaactacttaggtagaataataaaacatggaatgtcaaaagttaaatgagcactttcccctctgtcaaaataatcagttttcataggaattaggtttttagccaaatggctgtgaggcaagttgaagtaagacaagaaaattgcaaatatttttagatgaaaatatttactttcagcagattttgagacagtcttgctccgttgcccagcctgcagtacagtagagcgatctcagctcattgcaaccacctcctcctggattcaagcaattcttgtgcctcagcctcccaagtagctgggatttacaggcatgtgccaccatgccctgctaatttttgtatttttagtagagacagagtttcaccatgttggccaggctggtctcgaactgctggcctcaagtgagccacctgcctcggcctcccaaagtgctgggattgcaggcatgagccaccacacttggcctttcagcagcatattgactgacaacaacaacaaaaatttatgaagggagcgatccaacttatagaccatgtgccattttaaaagcttctttatagccaagatttcttctcgatatcaaattaagaaatttaacagctatgctttctgaagactgtttccatagagcttccaagtggtagtaaacttttaaatcaggatttggctatgtgctcaactcagaagactgtcattagcaatagcagtaggtaccactgagtgccactgcggactcaagtagacaaaaaagaagaaagaaaagcaatcaagggggaaaggtagatatagtgaagtggtagaatcttgctatatgttgcctctaggtataaatctagaactaactactcctgaaaatggaggtagtaggaggtgggaaataatttttcattttgcttgggaaatttggtttgtaaacctaaaatagcccttatttctgrggaaaaaaaaaaagatgtttaaagtccagtctaaaagagaattgtgtccatgtgtcaacttgtcatattcaagttttctaattaatttagttttcttttaatttagaaaagcaaaatttattaatcactgggtggtattttctaatgagaagcttgaacttagtttaagaaagaagtgctctgacaatctcatagtccttaagaagttctgagactatattgtcagatagctaaatgctaagaggagagtgtagtttgtaattgagtagctttatcctcctggagatttttaagctgtatcctataatatactcttggtcaggttgggtagtatgattcaaggcacttggaaccgtcttggggaatatagcttggtaattgaactgcttaagcttattattaatatttaagctatagttccaggcccattccagaggtcccccagccaatgcacttcataaaagggaagatatatcttaatataccaggtttgtatctcatgctaccattgtagcatcaaaaaaatagacatttaaatcatggctaataacaaattttagaatgaaatagttggtaaattttgtgattttaaacttttctttttgtgtgtgtgtatatgcagcaatgaaaactactggatgtaatttagataaggtaaatattatccctaatgccctgatgactccactcataccaagcagtatgattaagagtgaagatgttactccaatggaagtaacagcagaaaaaagatcttccactatttttaaggtaagctgtattgactagtgcacaaacctcctatataaaaattgctgtcttttacttttcctatttttttaacattatttttactttggatgcacttaatgaattttgctgtaaagagggaatgctttatacttcagcaaaattgcccacatagtgacttccaatatacaagggaggaattaatatgttgtatgagatattgatgaaagtactaattttagcattttcagaattagagatgtttttatttttttcccagtcttttcccataactttctgtttcttttttttacttgtcttatcccctgtaatgttactgaggagccacaaaattgagatattttgatacctgctcttcatgaaccataaaattactgtgttctgattacccttaattcacctaagcatatcaatagccgattattctacttccttgtttgactatctttgcttgtcgtacttttaaaaaatatatctcaaggaaaatgagacatcatgttatggagaattgtagtcctgtacctgttttctaaatgataataatatagagtggaaagctggtcctgcatatatttttagagcaatagtgatttttgatgtatgttacaaacttgtttaatgtttatatattcataatatttggggatttttattttttagactacaaagtctgttggatcaactcagcaaacattagaaaacatctcaaacatagcaggaaatggctctttttcatcaccatcatcttcccacctaccttctgaaaatgaaaaacagcagcagattcagcccaaggcatacaacccagagaccctgacaactattcaaacccaggacatctcacagcctggtacttttccagcagtttctgcttctagtcagctgcccaacagcgatgcactattgcagcaggctacacagtttcagacaagagaaactcagtctagagagatattacagtcagatggtacagtggttaatttgtcacaactgactgaggcatcacaacaacagcagcagtcaccactacaagaacaagcacagactttacagcagcagatttcatcaaatatttttccatcaccaaatagtgtgagtcagcttcagaatactattcagcagctgcaagcagggagtttcacaggcagtactgctagtggcagcagtggaagtgttgacttggtccaacaagttttagaggcacagcagcagttatcttcagttttattttctgctccagatggtaatgagaatgttcaagarcagcttagtgcagatatttttcaacaagtcagtcaaattcagagtggtgtaagccctggaatgttttcctcaacagagccaacagtccataccagaccagataatttattacctggaagagctgaaagtgttcatccacagtctgaaaacacgttatctaatcaacagcagcagcagcagcagcaacagcaagtgatggaatcttcagccgcaatggtgatggagatgcaacagagtatctgccaggcagctgcccagattcagtcagagttattcccttcaactgcttcagcaaatggaaaccttcagcaatcgccagtttaccagcagacttctcacatgatgagtgcattgtctaccaatgaggatatgcaaatgcagtgtgaattgttttcttctcctcctgcagtttctggaaatgaaacttctacaactaccacacagcaggttgcaacccctggcactaccatgtttcagacatcaagttcaggagatggagaagaaactggaacacaagcaaaacagattcagaacagtgtctttcagaccatggtccaaatgcaacatagtggggacaatcaacctcaagttaaccttttttcatccacaaaaagtatgatgagtgttcagaatagtggtacccaacaacaaggtaatggtttattccagcaagggaatgagatgatgtcacttcaatctggaaattttttgcagcagtcttctcattcacaggcccaactttttcatcctcaaaatcctattgccgatgctcagaacctttcccaggaaactcaaggttctctctttcatagtccaaatcctatygtccacagtcagacttctacaacctcctctgaacaaatgcagcctccaatgtttcactctcaaagtaccattgctgtgttacagggctcttcagttcctcaagaccagcagtcaaccaacatatttctttcccagagtcccatgaataatcttcagactaacacagtagcccaagaagcattttttgcagcaccgaactcaatttctccacttcagtcaacatcaaacagtgaacaacaagctgctttccaacagcaagctccaatatcacacatccagactcctatgctttcccaagaacaggcacaacccccgcagcagggtttatttcagcctcaggtggccctgggctcccttccacctaatccaatgcctcaaagccaacaaggaaccatgttccagtcacagcactcaatagttgccatgcagagtaactctccatcccaggaacagcagcagcagcagcaacagcagcagcaacagcagcagcaacaacaacagagcattttattcagtaatcagaataccatggctacaatggcgtctccaaagcaaccaccaccaaacatgatattcaacccaaatcaaaatccaatggctaatcaggagcaacagaaccagtcaatttttcaccaacaaagtaacatggccccaatgaatcaagagcaacagcccatgcaatttcagagtcagtccacagtttcctcacttcagaacccaggtcctacccagtcggaatcatcacagacccccttgttccatagctctcctcagattcagttggtacaagggtcacctagttctcaagagcagcaagtaactctcttcttatctccagcatccatgtctgccttgcagaccagtataaatcaacaagatatgcaacagtctcctctttattcccctcagaacaacatgcctggaattcaaggagccacatcttcgcctcaaccacaggctactttatttcacaacacagcaggaggcacaatgaaccaactgcagaattctcctggctcatctcagcagacatcaggaatgttcttatttggcattcaaaatagtaagaaactctaatttttcattacttaattggtcattattattattagaaggaagcagagtgcagtggtgcgatctcagctcactgcacctgcaccctctgcctcccaggttcaggtgattctcctgcctcagcctcccaagcagctgggattacaggtgtgcacaaccacgcccagctaatttttgtatttttgttagaggcggggtttcaccatgttggccaggctggtgttgaatttttgacctcaagtgatccgctggcctcggcctcccaaagtgctgggattacaggcgtgagccaccacacctgtcctgtatagttgttttaagagtacagattgtagttagaactctatcacctatagactataagatcttgtacaagttatttggcttttatgggtctcaattctctcatttaaaatggtgataatattacatactttacatggatttggggaggattaaatatggcaatgtataaaaatgtgtgtttgccattttaagctataaacttaaaaggaaaatgaagtcagaatgacagataataccttacccagttgaagtaagtagtttctaaggaggtagaaactcatctttaatgtttatataccaaggaatttatataggacttttgatatttaagcaaagttgtatttttagactgcttaaaggaaacctaagatgaattccagtgccagtctgtgaaaacctttttcttggactatcaggtgcctaacttttagtaatatacaaggagaatgcagtaatgaattttccccaacaactaataaatatcttttcatgaatctttactaatcagatagcttctatttttaatgtttctgcagactgtagtcagcttttaagcttctgttttcaatgtctctgcagactgtagtcagcttttaacctctggaccagctacattgcctgatcagttgatggccataagtcagccaggccaaccacaaaacgagggccagccacctgtgacaacacttctttctcagcaaatgccagagaattctccactggcatcctctataaacaccaaccagaacatcgaaaagattgatttgcttgtttcattgcaaaaccaagggaacaacttgactggctccttttaactggatatgtaagtattgcattttggcttcttattgaaaagcatcagattttattcttcttaacagatttaggttaagtaatagtagttctaatcttttaaaatgtggctttctcacaagatgatacttttttactctgaataaaattattctgaatgatagcttatggtcatatagttaatacagaccaggccgggcgtggtggctcatgcctgtaatcccagcactttgagagaccaaggtgggcggatcacgaggtcaggcgatcgagaccatcctggctaacatggtgaaaccccgtctctactaaaaaatacaaaaaaaaaaaaaaatacagaccaaacatccctagtccaaaaatccaaaatccaaaatgctctgaaatccgaatctttttgagtgctgacatgacatctcaagtggaaaattccacacctaacctcatatgatagggtcatagtcaaaagtcaggctcacaacatgcagtttatttggtgtccccaagggtaaaaaagatccktccagctcccttcagctgtgatagatttttttaggtgtatgtgaaacagaagtgaatttcatgtttggacttgtgtcttatccccaagatatctcattgtgtatatgtgcatattccaaaatccaaaaaagaaatcagaaacacttctgatcccaaacattttagataagggatactcaacctatattggacattccttctgcctctgagcttctttgccttggaataacaaaacatctgatgagtatgcaaaatgtgtttcctttgtactatatattggatataaccatgcctcacttatcccttcctccagaaataaatattgagtcagaaaagtctgtggaagatcaaatatgataaagttttacttacagtaccataatatactttaggatcattcagggtgtcagaaactttataaatgcttccctccctagtaagttaaattaaactttttctcttttttagaaattccacgaagaaaatcctgattccaagatgtcctgagatcttgtggttccatgagaattattactttaaaaacaaaacaaaatataaaaaactgtgtttgagtaaactgatagattttactctgactgcaaaagagcacacctatgctgcttgttgcagtractaaccaccaatgttaacatcttcatattttatattcctaataacagtgatgactgagaatctatttgagtttccagctggcagaattaattgttattattttcctaggcgcaatttccttaaacgtrcagtttaaattcaaggctggaccactcagttattattgctattagaaaataatatatcatgtttacttttgttcttcattattttctttcctgcattgttttagtcaagtaatggcttttgaaaaagtaaagttcaataataactaaggctgtgatttttttcaatataaaaggcacagctgttggccaaagtgaaggaatcttttttcagttttattggagaaactgaagggtaacattctaacaagtaaactgtatgtgcagataaaagtactcttgatttaacacaaaggcagatgatacacttataaaactgggaacagctggaatgcttcttgattttattttttcagagagttgttagttctctgggtttctactaaggggtttagccataactgtgcatagaaaaataattatctgtaaaaaatgaaggggataatatatgataaattatgttctgatatcctcctacagtagtttaaattgacagaaaaatttgaatgttttcttcttaacccagtcttaggctggtattccctttttatatatatctatattacttttcacctctttttcactttactttagagaactattaatatactactggcttcatgaccctgtagcatctttggccactttaatctagggtgacctagcaatcctgcagcacagggcagagagtactgtcttaggaattattaggagttgattcctgagaaacaacacatttttccccatgaacggtgctgttctgaagtcttcaaatttttccctctaataggaaacagtataaattttaattaaaaaaaaaaggcaaactaaaatttcttgaaatatcacttctccctgatctgcagtgagtataaattcacttgtcacctcagtgctttacagtttgaagtggtcacttacctgatggttcccacaagccttaggctttacagggttgtatcattgacttaaaatgaagaattaacttgtgttacatctataaagagcaaaataacacactccagaacttggcagttgtagcattagttatacagttttgggtgttcttgccacccgtgggatgcctgcttctcactaccacctgtgtctggacacatgcttatgtctcattttccttttggcatgtggaaagctgtcaatgcagtgtaaggccaacgtgtgtgtggcttctatgtgttgagataatgttttggtatccttgtccgtttcatttattttttaagtgtacaaaaaataacctgttaattgttgaaggctacttttctgttctttttttttttttttttctatcctgtacatttagttgaactgtgcggaattgtggtgttggttttgtttacacagccagatttttccttctttttgttttgtgatgatcttcctttgttctttgaatgtgctcttttgtctttttctcttttttctcatgttttcttccctccacctccacccctttctttctttctctctctgattgagaggcattgaattacgttttcagtagtacaggcttcttgccgatatgaagggaacttttcagaaagagacctactctgggtcatttaattttgaatacagttttcaatcgttcaagttttggatggtttatatctaatgtgtgtttcatttttttggaaagctatattttgtatttaggaaatggtatactattttgctatttgtactgagtgagtacattggcataaatatagaaatttatatatatacatatatataaactattcttttttgccacacatttttgtggtaaatttgtgagtttgtctgatgttctaccacaacgtggcgtctgataacagtgagggggggtggggtttgttatgtctttattgagtatttaagtatcttttgaaacaaatgacctgttcatctgtggccattccatcaggcagttagttccttgatgtcagtagtgggctaaaggcagcttactgtgtgtttgctggagctttcactcagccaagtgttagagtcaggaaacccattgaggcaatggcgtcaaatggtgtttcacaagaatgagccattcagtctttgctcactatatatttaatattttattattgttgttattgttattattaattggctttctgtattctatgccttttatttataaagacactaagaaaacccatgtttgtaattttaataacatttttcccatcttgtaatatccagagctactttataaattctctgaaccaaaagtattttcctcagtgtatctcttctcccccagcccctattgggaaaaattacccagtatagttcaggttatgaggaggatcagccacacaatccagtgcttcagtttgaaaatgtaaaattctaaccctaaagtagggttggttgaaatttcagacaaagcaaacccagcaggtataaaaagtagtataaatacaaatctgtaagttatttttgaattttctgaacttttttctaagagattacataggagactaaagaaatctatctgttcaagttctaattaggatgattgttaatactgcactgtggatgaagtggcgactggcttgtgtgctgacttctgtggtttagcaagaggtttattgttatcaaatgctaattggcaatgccaagtcactgggaccaattttctgttttataatatctaagtttagaacagaatatatacctgaactgtagtggtttgatcggatggagacagaaaacccgatttttattctcataaattttgtggttatttatacaagggctgtgctatgctaccatattcttgttcaataataataggtttgttgttttttttacattgttaaatgttccttacccctaaaggtcaatgttaagtacaacattctgaaaatacaatttggctacraagagtattcatcttctttgaagctcagtggttgatatttgtgctaataatgcaatttcctgattactgttacaagttatagctacatatgggagagactcagtgagccagcaaaggccatagaaacaacaatttattaaatgtatttatggcagaaggacctaaataaactgtgagccaccttttcttctttatattgttacakttaagtgttcttgctttcagcaactcacattaatgcttggagcttatctctttctctctctctctctctctctctstgtgtgtgtgtgtatgtgtgtgtgtgtgtgtgtgtgtttccttattgtcattccattatatatccacaccaacatgggtgacgataattcaaagtcatattttgcctctaagcttgatcatgttacctttatgattaaagtatcatgttatttagccaatgcaaatctgttttaaaacaaatagtttaaaaaaagaacaagtttttaagggctttattatagaagaagtattaatgaaggactttccttcctccctccctttcctcccctccctgcctcccttcttcccttccatctccccctcctccctgccttctttgtttctccttcccttattcctccctccctcctttctcccttccttcctttcttccattcatccttccttgccttttatttttattttttgtaatatcacatgtgctgtagtttggaattttattctagtgcatttcttgctcatcagaacctcagctaatctacctaggaaaaatagtatcaaaggaaatgagaaagttgtatctgagtccctccagaactaagataattctttttgaccatttaagcctttataaatgcgttttgaccatttaagcctttataaatgcttgttttaggaaagtgaatctgttagatgcatcaacaaataatgaccaggacaaaacgatttaataattaaagtctcaaatcaccatggttatacattttcaccagaaatagtaatcttacaatttttcatttttctgatgaagatttctgttmcaatatctgtttcctaatagattttttaaattaattagctttcctctgctttatgaccayaggttttatccctaaccgagacagctgtcttatatctgcatgccttagactgtgtggagggactccatgaagaaagaccataggttagaaaaataactcatagtatataccctagtaagtgggttagtagaatctcataacatgtattaaaaagaggttttcttctctgcttgtttgtgtcactagagcaaaattgtagagataatgctcataatgcagtaaatatcagaataatatctacaatatcatttgtggatggtcccaggtcccagtgctctagttactttacttctttttttttttttgagatggagtcttgctctgtctctcaggctagagcagtgtgcgatctcagctcactgcagcctccacctcccaggttcaagcgattctcctgcctcagcctcccaagtagccaggattacaggcaccctccactaggcccggctaattttttttgtatttttttagtagagatggggttttgccatgttggccaggctggtttcgaactcctaacctccagtgatccacctgcctcggcgtcccaaagtgctaggattacaggcatgagccaccacatccggcctaattacttctttaatccccatttatttttatgccattctagcctcatttattaataaaattatgtttttactttctctttcaggaaattttttaaattaatattttatatctagatcwaatgctatggaaaagtgcctttttatcatttataatttcatttttcactatttccaaaaacacataaacaaatagtttcagtaggtcccagcttttactttttccatttaaaccttcttttctccatttcttccctttggcttaagaataaaagaaaaggtacattgctagaattgtttctttgggagagggtaaaagattacagaattagactgttcagcctttatataaactaaatttgtcttcatctcaaccagctaatggtaggtcttatctgaatactcatgagaattttagcatctgtgaaactccatgcaccagatgtgtgtaaatttcaggaagaaagtgttgaaagcattttctctgatgttaattagatggaaataaatcactaaaacatagtttaggtaaagcctgattatgccacttttttttaactagacagggcaaagttgtttatgttagtgtacttcttgtctatcctcagttaatttacctagacaaaaagtgtcaaaggaaatgagaaaaaggttatatctgactccctccagacctaagataattccttttgatcagatacagtcagatggagtgccttggtttttgttaattttgcctctattccagctccttaccacagcggtggtgcttaaagaaaggatcatcagcaacaggtcaggatagttctacctttgggatagggctgctttccccgtgctagtatttctgtgactgttagtggcactgaggactgcaaacttttatgcaatattcttaataccctattgatattatgcactttaatcattccaaagaagccaagaatgctgtatagtgatgattccttcctaatgaattcatcttaactatttagaatgttatgtcccttttcttttggatagccaacttggtataaatgttatatggatttttctaaaatgactatataggacttaagactttgaaatgtaatttacttataaggggaaataattatgctttagcacatcattttagaaacgtcacattttagaaacattcagcttgctaacctacatgtttgggaattcattaaaaccagttgtctatatattttgtgccatgtatataagaacattacaatatatctttttctacatatgtagtatgtgcaaccagtggttctcagagtatggttctcagcccaccagctagtatcagtatcacctgggaactagttagaaatgtaaattctttggccccatcccagacatactgagtcagaaactctggaatagggcccccgcaatctgttttcacaagccctccaggtgattctgatgcacactttaaagtttaggaaccactgggctaagactctgttgagatatagagtttttcttccactcagactgatatagttatacattgttcttcatgtaaattcagcttaacctggttatctataatcttttattggcaaaagttaattctcagtactgcctatagagatacagtgtattttatgtacatacacaattagtctaattcttgataattcagttaatttagtttggcattttcctaccacttactaaaaggtttacattaaatgactgatttaaatatataggtgcaatgttctatgtttattttaattgttatgacatttaagtagctaatataattgaccggtgctaaagtctcctgtttatccataaaatgggtacattatgggcagtgtaatacaagctttcttttcattgcctagtactttaccagcagaccacagttttgccctggctagaccaaccctcagaacaaaatcatcattccttgtatttatatttgtatctgagatagtaaacaagatggctggccaggtcaacatggcaccttaacttatttttttaataggtaaaacttcttcaaaagtagcttgctttgtataagaactaagctatcagtatagatatagctatccttggagcttatgtttcagacaagaattatttactaaaataaataataaacaagataatgcattatacaatttgggcatttctcgtttctcaagtgtatgcatcatggtaaatataaactaaccacaagataggtagattgattcatttcattttaatctccttgtgtaattcagtacctccataattgttctaatcttcttcccactgtttacaaattaccagttaattaactsgtgaaagaaaaattcacatatcagaataaaaataaatgtatactcactttataaaaatcaccactgctgtctttccttaatactagcagtggaaatgtaagtggcttactctacaaattttggtgctggcaaatacataggcaaactgttgggagctgctctagttacattcctcccttcttattccctttttctcttcctcactttattgcataacatattcctgtacccaaagcattctaccacagttctatttgactcccacttgtaataactcctttaaaaaattccatgtttaaccatatgaccctgcttgcttactcatattctccctccctctccccttcctttctctctcttccagaagtcatttgcctsgtttgaaatattttgtagggattgcttattatattattttagctgatgaacctcaggacaaygtctacacacacacacatacatacacgcacacaaaatctcagctgttgaagagtgggcttggaatcagacttctgtgtccagtaaaaaactcctgcactgaagtcattgtgacttgagtagttacagactgattccagtgaacttgatctaatttcttttgatctaatgaatgtgtctgcttaccttgtttccttttaattgataagctccaagtagttgctaattttttgacaactttaaatgagtttcattcacttcttttacttaatgttttaagtatagtaccaataatttcattaacctgttctcaagtggtttagctaccattctgccatttttaatttttatttaattttatttgcttgagcacactgatcaaccactgaactgccttcttccattgtcctgcaatgatataagggttacatttttgtgtatatggctttcatagttgggatttcagagcactgataccagatattttcagtttgttctctgggggaatttcatttgcatctatgtttttagctatctgtgataacttgttaaatattaaaaagatattttgcttctattggaacatttgtatactcgcaactatatttctgtaaacagctgcagtcaaaaataaaacactgaaagttttcattttgcagtggatagctgtcttttttttcctcaaactttgtgaatggaattgtgtgcatgaacgacagttttgagcagcatgagtatatggctgaaattataaaatcattagggaggaggtgtgaaatatagacatatttctgagtagttattttgtgcctaccattttgccaggtagagtataagtgactcagtgtgacagaatttttgttttacgtataatttaaatgtttcatgtttagtaaagcaatacatatacacggaggtgcttttgatgaaaaccaagtctccccatcccttagtcccatgcccagagacaatctctgtttattcttttggtgttatttctacatctctaaattagcgcatatcagagtgtggtacacaactacccgtggtacgtggataaacactatttttaaacttacatgtataagtgttttgatgcgtaatagaaaaaaatataggctgggctcagcggctcacgcctgtaatcccagcactttgggaggctgaggcaggcagatcacctgaggtcaggagttcgagaccagcctggccaacatagtgaaaccccatctctactaaaaatacaaaaaatagctgggcatagtggcgggcacctgtaatcccagctacttggcagacagaggcaggagaatcgtttgaacccaggagacggaggttgcagtgagcagagatcgcaccattgcactccagcctgggcaacggggcgagactctgtctaaaaaataaaaaaataataatgtgtctacctaccagagtgagggaaaaagtgagtcaaattaaagaaaaatattaaatcactgggctcagtggctcatgcctctgtaatcccagctactcgggaggctaagacaggaggatcacttgaggccaggagttggagaccagcctgagcaacatagcaagaccctgtctctatttttttttttgatgtttaaatgaaaggaaaaaggaagaaaaatattttttaaaaaaatgctaatacagatacatgggtgtcatgaatatggtatctaattgaatcgtaaaagacattgctttagacagcatacttataccttcctatcaaatatagacagtatctgttgattctgtaaaggagtaacaattcttaatacatccaaatctatatatatatatctaaatgagttgttaggagattttatatatatatatatatatataaaaaatttattattattttttaaacaatccttctgttctaaatacagtatgccttgccaagcatggtggctcatgcctgtaatcccaacactttgggaggtcgaggcaggaggaccacttgagccagcccgggagttcaagaccagcctgggcaacaaagtgagacttcgtatctacaaaacataaaataattagccaggcatgttggcatgcgcccatagtcccagctattcaggcggctaaggtgagaggatcacttaagtccaggagtttgaggctgcagtgagctatcatcatgccactgcactccagcctggataacagatactgacactgtctaaaaaaaaaaaaaaaggaaaaaaagaataaaagttgtcttttggtgtttattgacttcaatggcactgaaaatgagcaataaccaaatgaaatgtaataagtatatcaaattatatattttggttcaaaaaaagcttatgtgggcaaaatactgatctgaagatgggactacaataggatggggctgccagaaaatatgatgcaatctcagttacataatttaagtacagtgtccagaataagggaggtaattgtcctgctctgctctaagctggtaagagccttactctattaacttacaagaaacaaattctctgcagccatctaagcctagaagagaaccaaaatatcatttatccctgctgagaacacagtagggactctagaaatcaaaaaatagctataccttctcaacagcaacactaatggtcttattctcagaaaaagagatattggttgctactctcatgctctatttcatggtgccatctctgcttctattctactgaggcaatataacatagtgtttaaaagcataggctcttgagtttgcctataatataacctccattcctcaatttcctttgctataaagtgaaaacaataacagaaccttccttgcagagttgttgaacgagttaagcaagttagtccatgtaaaattacctagttcctggcacagtaagtgcctcctaagtgttaccttgtattagtattactagtcctgatactactctgctcttctagctcttgtgcactacttctcacatccttctatgtattagtctgttttctcttgattttaacagaatacctgaagctgggcaatgtataaagaaaaagaatttcttacagccatggaggctgagaagtccaggtggaggggctgtgtctggtgagagccttcttgctggtgaggactcccaagaatcccaaggtgttgcaagctatcacggcaagggggctgagcatgcactcccatgtgaggtgccggaataggtccatctcggagagggctgtgtcatggtgagtgcgagtgaggcggtctgaggactcaccaagaatccacaaggtgttgcaagctatcacggcaagggggctgagcatgcactccaacctgggtgaccggagtgaaactgtctcaaaataataaaaagagaaaaaaaaatcaagagggagnnnnnnnnnnnnnnnnnnnncacaatcacagctcactgcagcctcttctgggcttaagcaatcctcccatctcagtccctaccccgagtagctgggactacaggtataccccccactacacctggctaagttttgcattttttgtagagatagagtttcaccatgttgcccaggctgggtcttgaagtccagggctccagtgatctgtctgccttacctcccaaagtgctaggtaggattacaggtgtgagccaccatgctggccctcagtcacctcttaaaagtccccacctctcaattctgccacagtggggatgaaatttcaacttgagttttggaggggataaatatacaaatatagcattttggctttttcaaagatgtccctttgtcatcagcatcaaaacttttcctttctctgagtcatttccattgacatagaaatttgttgtaatgtccctgatctcttaaaaaaaattgttctttgatcacacagcctcctccacactatttctattcctctccttccattctcaaacccattcaaatcaggctttcatcacgccactctactgaaatggtgcttgtcaatgtcaccaacaaatgggttccacatgaccaagtccagtggtcacttcccaggcctcgtcttgcttggcttgtcagcagtatttgacacacctgatcattccctccttcaaacactttttttttccttcaagacagagtttcactcttgttgcccaagctgtagtgcaatggtgtgatctcagctcactgcaacctccacctcttgggttcaagcaattctcctgcttcaacctctctagtagctgggattacaagcacgcaccaccatgcccagctaattttttgtatttttagtagaaacagggtttcaccatgttagccaggctgatctcgagctcctgacctcaggtgatccaccctcttcagcctcccaaaatgctgggattacaggtgttagccactgcgcccggccatcttcaaacactttcttcgcttggctttcgggacaccacactcagctctcctgcatctctgaacaccagttttgtttttttttttcatgtcagacgggaaatgtactgatgtcataacaagattcaagggtgccacatctcacacatgcacgtgaacacccaatcaacacacttaggaactacaaaaggatctgaccactgcttttcactctcatcttcatctcctaacattgtcgagccccagaggtaaatcatcaaatctcttctctcaaaactcaaagagattgatcccagccaatctcattgctttaaacaccatctatatgttgaagattcccaaatgtgcatctccagccataacttctgccttaactccaggttcctcctatccaactgcctacttgtcagcctcacctggcagtcttaatagatgtctcttatttttttggagacagagtctcgctcttatcacccaggctggagtgcagtggcacgatcttggctcactgaaacctccgcctcccgggttcaagcaattctcctgcctcagcctcctgagtagctgggattacaggcccgcaccaccacgcccagctaattttttaagtttttagtagagactgggtttcctgacctcaggtgatccacccgcctttgcctcccaaaatgctgggattactacaggcgtgagccattgcacgcagcctgtttttcttgatttctataccactctctttcctttgaattccctgagaggactgaataggttgttctattaccatttagtaggaagcagccctgctgggtgagttgtcaagccagtcaccaaggggcttccagctgcagtttgtgattgaatcctctgatctgcctcccactagattccactatcattagcttcactgataccaatgagtgtgggtctgtagaaatgaattttatttatttaattcagatctttgagaaatttacacaaaattgcagtgaagatgaaggcaacaaaatattttcaaactgaaacacccagccgtcagctattgtggatactgtcgagagcaaaaaccaccagtgccagtcagcatctggtaaaggaggttttccagctcggtccaatcccttcattttcttggcaagtaagaggctgtctcccatttttcaggcaaccttttcatcatttctcatctcttctttcaatgcaccacaagagggcagtgttttatcatattctccttgaattatataataccaacagtggaatgagatgacttccagaagtagaaattgactattatgccaaaactgttcaccaaagttgataaaactctaggtttacaattgtaccccaaggtcatgggactggaccccatcccatggtaagtcatcagtttagcaatgataaagaaaataaccttctgaaaatttgtatagatcagaaataaagtattttttgtggaagactatttttaagtattgaaggtactatttcctttcttgaattcatattgcagatgtacggtgtggatttattggtttatctctgcaaaccttaaagtagaagattgcaagggccaggtgtggtggatcacgcctgtaatcccagcactttgggaggctgaggtaggcggatcacctgaggtcaggagtttgagaccagcctggccaacatggtgaaacgccgtctctactaaaaatacaaaaattagtcaggcatgatggcaggcgcctgtcatcccagctactagggaggctgaggcaggagaattgctggaacctgggaggcagaggttgcagtgagccgagatcacaccactgcactccagcctgggtaacagagcaagactgcttcaaaaaaaaattttttttaattaaaaaaaaagtagatgactgcagcaaagaagagatttattagctcttcctttcaaggtatctgtgtactgtatataaacaacaaaagctgaccaagagtggtacttgtgctaggcatattagtaactgctttgtaattgaaagcaagaaatatcataaacaagcattagatggctaactaccaaacaagttaagtcccttagggcaggtagattcagtcttttccttctctgagcaattcccttctgccataaactacagagaggtgattaatagaacattggagagttgaatgatacctagccaaactgtaccctaaaactttagccctaaaaagaggaattaaattgtgtagatgcctttaaagaacatttttctagcatctttctacatcttt

SEQ ID NO: 97856 - DNA, 60339 bp, Homo sapiens
  misc_feature (1)...(60339): n = A,T,C or G
ctattttttcagtcactactctcagcccatatcacttgaattccctttcccatccttgaatgtcatcttgggcagatattagaactttctgaatatctttctgtttagaattaacaaattagaattcagtcttgtgcatattaaaattccagtctcatatctaattcaaagctttcccttctgccatctctggctatgcttgtgaagtgagcgaagaaaagggacatgttttgctttttccctatctcctccatgcccttgacagctttgagccctggataatagtgagcaggaggctggattgtggggagcaggaagatatcactgtttaacaggactcagctgcagggctcccaggccgggtcattgttgcccctccagctctcactgactggccgtccagccttcttccaggcagacccccgtgctgaccctgtccttgagcacatgtgtgtggtccatgggacgccctccttgggctcctggggcacagttctctgagatgagaaacctgggtctagtccagtctccagccctagaccctcatagtccaccctgagcccactgctactggcttcccctcatgcagtggaaactccctctggagggttccacttgactcatgagaaacacacttcctttccatgccagagttgtgggtgccccctgccttattcctctcccctctctccatctcgccttttcccctgttcaggagggcataaggagaaaagcagcagtgtggcctaaccaggcatctaaatgcaaatcagaataccaggcttcccttttttccgttttttgcagataatcccaccatctttcattcccttctcatgaatcttccctgctgccagtaaacctgagcattgagaagggagtgcctcttccttagatgaggatgagggactcaatactctccactaacactgtaattcccagacgactggccaatttttcttcccctcctggggcaccccctagtatagtcttggaggggttcctcttttcatggggctgactctgcaggtgtctggttggaatggttcatggttgtctttacaatgtagggtaggtcctcttgccagttttcaggcgtgaattcaggctaacagttttagggtaaagggaaaaattttcatcagtgctgagttgcaaatgggaaacaaaagcctgagaaacaatagaattgaataaatggcaagaagcacaaacattaggtgtacgcagattctgctttttcctctgtgatgtggtcacaaacttactccaactacaactttgtaactaacctcgtcttcacagctcccacacaaggcagtagaaagacttcagtctgttatttctgctctccagctctccaccatgttcctctctagacagtgtttgatgtgtgagtgcaaggacatgtatggaattgtgagggggcacagggaatagaccctcaggtctgtcctgtgtccttgaggtccatgccaatcctggctctacatctgatatttcttggggagtatacagcccggtttcttctctggatgttctgattagcatctgtggctgaatcagcagttgactaatgcccagcactcagctcattgagggccagccacttctccctgcagatccacactttgcttggcttgtgcaaggctagacacacattctctgtcaggtacctcaccccgatagcctgtgaggcatgtaattctactctcttaacgatgcagtcttccctgtcctctatggaattgtttgtgtgtttttctatcaattatctatactgataagtttcctttggaaatttccaataactattgggttaagagagtgatctattaaatatttagttccctgagatggttcaggaccgtcatcacctcaaatgtacttgatagaagaaagaagccattattgtttactttgtcattttgaataggcattttgttacattatttgttgcttcaactttttaaaattttaattttaatttcaatggtgtttggagtacaggttacatggataagttctaagattttggtgcacctgtcacctaaacaatgtacactgtacccaatgtgtagtattttatccctcacccccctcccacccttcccgccgagtccccaaagtccactgtatcattcttccgctttgcatcctcatagcttagctcccacttataagtgagaacatacaatatttggttttccaatcctgagttacctcacttagaataatggcctccagtccatccaagttgctacaaaagacattatttcgttcctttttatggctgactagtattccacagtgtatatataccacattttctttatccactcattggttgatgggcatttaggttggttccatatctttgcaattgcaaattgtgctgctataaacatgtgtgtgcatgtgtgtttttcatattatgacttattttcctttgggtaggtactcagtagtgagactgctggatcaaatggtagtttactttcagctttttaagaaatctccagctgggcacagtggctcacacctgtaaccccagcactttgggaggctgaggcgggtggatcacgaggtcaagagattgagaccatcctggccaacatgatgaaacctcatctctactaaaaatacaaaaattagctgggcatggtggtgtgcacctgtagtcccagctacttgagaggctgaggcagaagaatcacttgaacccgggaggcagaggttgcagtgagccgagatcataccactgcactccagcctggtgacagggcgagatactgtctcgaagaaaagaaaaaaaaaaaaaaaagaaaaaggaatctccagtttttcatagtggttgtactagcttacattctcaccagcactgtaaaatattcccttctcatcacatccataccaacatctactgttctttgactttttaataatgaccattcttgcaggagtgaggtggtatggcattggttttaatttgcatttccctgataatttgtaaggttgagcatttttttatatgtttgttggctgtttatatatcttcttctgagaattgtttattcacgtcctttgaccactttttgatggaattatttgtttttttttttttcttgctgatttgtttgagtttcctgtagattctggatattagttctgtgtcggatgcataatttgcaaatattttctcccactctattggttgtctgtttacccttctgattatttatcttgctgtgcagatgttgcttcaatttaatatgaacaaaaatcttactacaatatgacagtattgccctcattaaaacagagaaatgatttttttaagttttcaatatctttaaagctggcaattgtgttagcattgtcttgaaaggtgtctctaataggtgtatattatggaaatctactatacagagaataaaagtgacacttaaaagtaatttcaatcactacagaaactaaatatcccaccataacacacaaaagtttattcctttttagattttacaaatacatggtctgtaatttgatagttgaaaaaaattgcatttaatgtcaggaacttacgcagttgagttgaaggttttttaagaaattatattaatatcataaaaatcagcttataaaaaaactagtgccattattctcctagcccctttaattcatattacagtatgaactgtatagtgcataactttgaaaagcctcagaatcaatacttcacagttgcaggtggggcagatttttaaagtatttatgtcccaaactatctttgaaaatgtccctatgtttatttaactggtttatttttagtgttactgaaattttccaggtttgggatagttatgctactttaaaaaaatgaaagcatcacttactgatgtgtgaaatgatcatatagatcaagatgatgaaataaaaacgtttttgaaactccagattgtctgaattttcagaggagtaaaataatctggcctttagtttacattgttttaatgtgtttactaactacagctttccttcaatgtgtgatgcatacttactgcttgtttttaagaccaaaattaacctcttccagaagggtgattattagcttagctggaaaaaaaagacaggattcatttaaacaaagtctttggccaggtctgtaatagcaaggtgtagaagagaggcaatcagcaacaatgacttaatactcactttccacaaacctttctagcatgtcccatgggtaactttaaagagagcaacagtctctgccttcaccgtatcgaaaattaaataggaaacctaaagaaaagcatcaacacacatgaataaaatgccagcaatttggaaacatagacaaatgcagccaacatggcctttatttgtggcacacatgctccttttttttttgagatggagtcccactgtgtcacccaggctggaatgcagtggcacgatctctactcactgcaacctctgcctcccgggttctagcgattcttctgccttagcctcctgagtagctgggattacaggcacctgccaccaagcccagctaatttttgtatttttagcagagatggggttatgccattttggccaggctggtctcgaactcctgacctcaggtgatcagcccgcctcagactcccgaagtgctgggattacaggcatgagccactgcacccggccagcacacatgctttcaaagataagaatattgctctaattctttacctgtttggaagagatagagtctaataaagaagaatgtagtacaaaaaaaatcataggattgatctattacaatacagaggaataatgagaggctttccacattagaagaatcaacagtttcatacataactttgtacatgggacatgtactattctaaagagctcgctggaaaaatcaaattctatgatcacaatgttcaggtaccagcgtcctggtaaattttacttatctaccctttcctaaaatagaatcttgccacagaattgctttatggcattaaaaaaaaaatacagtggctcaaagaccagcgttgccccatccaacctggttgtttttagatattgtcaccagtaaattcttagagtcatcctatagagctctagcaggttatttaaataaatgcatagtcattatatcatttttgtcaataatattcaatattaattcctataagcactctttctattaatcattttatcttttcttcaataaattcactatgttattcatggtactttatcagttggtgaattaattaggtttcttctgaattaatcaggtttcttctgtaattagatttttccagagattacatcaggtaatgcccatgggttataaaaacaatccttttgccacactcctatgttagtgggggatctgccactgggcttatctcaactgggcttgcctaggctttcagccctagcgtggatcacaggcctcagatgggtttgggttttcatttcagcacccaggctgagaaaacaataatttcctgagactggctccacttgtggcaaagggcagatatcccaggagcactgggggtaactttacgtgtctctcaaggcatcagtttggtacaagcacataatcatttctggtcactatttcgttagccaaaggaattatcacttggccaagccctaagtcaatggggtaaggaaacagactacacccacagggaagctatggaaggtaggggagagaagggaaaattagggactcataatacaatctaccccatgtatgtaagtaaagagagagagaataaaacctagtatctcataataacttataaacactatgctaagaaaatcatgattgcaaaagaggtcaggatgtggaaatttaaactggttaataaggatgactcaggctcatctgatccaggccagggaagccccatgactgttcagttatttctttcaggcactgatagggacgcttccatgactcagttacatagcacaccctcctggccttcatttggtttagtattctggcaatgttttaccaaacagcagcttttcttctgggtttagctccagctctccctcacatattgacttttaccaaaccctttatttttactcacttaacctgggtcaggtgctcccaatagtcaagctctcaccataagcatctggcaccgagaacctgacaaccatgactacagagtgtttcctgcctttaaattatccagtttcttatggaggatagtgcttattctcaaaataggaaagtcataaatcagcaaaaatgttattaatctagactacttaagcaatatacttaaaaatatatgatctgattttaaatactacatttttatttaaaacaaagagtgagtggcctggcgcggtgcctcatgcgtgtaatcccagcactttgggaggccgaggcaggcagatcacggggtcaggagatcaagaccatcctggctagcaaggtgaaaccccatctctactaaaaatacaaaaaattagccaggcatggtggcagacacctgtagtcccagctacatggaaggctggcaggagaacggcatgaacccaggaggcagagcttgcagtgagcagagatcgcgccgtgaacctgggaggccgagcttgcagtgagcagagatagcaccactgcactccagcctrggcgacagaacaagactctgtctcaaaaaaaaaaaaaaaaaaaaaaaatgagtataagctgttgagcttcctaaataccaaataagtcatgaaatatagtagaataagatagtttatgttttattgtagcctttgtcactaagatttacaattacttttcacatgacatacatccctatatttgataccttggtaacctcactcaaatgatggcaaatatgagctttaagggttttgtatagtcctattcaactgatattaagtatttgagacattatgaaattatctttttttttttgagatggaatttcattattgtcacccaggctggagtgcgatggcacgatctaggctcactacaacctccacctcccgggttnnnnnnnnnnnnnnnnnnnnctcactacaacctccacctcccgggttcaagtgattctccaacctcagcctaccagagtagctggaattacaaggtgtttgccaacatgcccagctagtttttgtatatttagtagagacaggttttcgtcatgttggccaggctggtctcgaacttctcgaagttatctttttacattaaacacatatatatattttattcataaagaatcccagtaacatatacataaaaactcttctaatttgaaagtacagaaattccataaaaatttagccaataaatttaaataatggcactatctgatttaaagaacatttagttaaagttgtactttttaatttaatcttgaatctttttcagattagcatctcaaagaagtcttattctcatgattatattttcatatgatttgttcattgaatcaaaggtcagtcatttcagagaayacttattgaacatctagtatatattaggcattgagtactcaaaatgtaaaggccagcagtagagacagcttcagtcatcatggacaatatagtttacagatactgtctgccagtgatatcgacagaaagagcaaaccaaattaaaaagaaaggctgggtgcagtggctcacacttgtaatcccagcactttgggaggctgagatgggtcgattacttgagcccaagagccggagaccagcctgggcaacatggcaaaacccaagatccacaagtacaaaaattagctgagggtggtggcacatgcctatagtcttagcaacccaggaggctgaggtgggaggataacctgagtccagggaggtggaagctgcagtgagccttaatcacaccactgctctccatcctgggcgacagagtgagaccctgtctcaaaaaagaaaagaaaatatatttttggataaagttttatgaagaatataaacttggaaacaggatagaaaatgactcgcaagatgtgcaccgcttgacatagggaggtcaaggaagacatctgggtgaaatctaaaggaaaaataagagaagaagccagcaatgtgtgatactgcgaaaagagatttctaggctctgcagaaaagaggaaagaggctgtcatgtgtgaatgagcctgtggtgttcaagagacatggggaaaaaagactcttgcctgacacccacggagcaagggtgagcatggtacttgggggttcaggggagtgggcagaggccgggtccctgagggagttttgacatagatgatggtgacttccagagcagtgtgcccatgaagaaacagcaaatactgggtttctaaaaatcactcccccaccgttcagtaactatacataccagaagtaaaccactctttggttctcattgttataacctgtaaaaaatgggaatctttacagtcatagtaccaatacagattttaatagatttatttaatcaaaaatctcaagatctaacatattgactgaaaactaacctatattaagcctctttattttatgttaatcatactcggaacttgttctgtcgtttgtcctaaaactataatatacatacctttgcagctggacaaagtggtttcctagcaacaaaatgattagcactttctttgcaagaaactaatcaccttaatatagatggaagaaaaaacgccggcactctagtagaagcaaaaattctttcacaaaacaactgatggaatttatgtattcacccattcaacacatatttattaaatgcctgctaaacaccaaacacaatgatgaccattgaggactaaaggttactgcttagcatgatgtaggggttctatatttaatacattatttgttgaattagtatataatcctaattcataaattattgtacaaatggctctctagtttcaaatgaaaatatattgaaaacagtataatggtctgtattaggttctccagagaaacaggactaataagatatatacatgtatatatagagggagattaaaaggaattacctcatggaattatgaagaactcgagggcaggtcagcaagctggaggcccaggtgagctgatggtttagttccaatctcagtcagaaggcctgagaaccaggagagtctatggtaaagctctagtccaaaggccagcagactagagactcggaaagaactgatgtatcagttggagtgtgaaagcaggaagaaagcctgtgtcccagtttagaaggcagtcagaggggaagacttctctctcattcagggaaggtcatgaggctgcccatatcatacagggctatcatcttgaattcaaaaaccaccctcacagaaacacctagaataatgtgtaatcaactctctaagcatccgatggcccggtcaagttgacacataaactaccactcacagtgtccgatttctgaggctgatgaaataatacagatgagtgataacgatggcagtagaaaggaaagatctgcaaagaatgaaaagatattaaggaggtagagagaaatggagagagtggcattgtagagtaaacatattctatgtatccagatcatctgtttatttgaagtttgagaagggatatgtacgagaacaactgtagttgcaaagttaaagcatccctccctccaaagcactcccactgtggtgttgccaagggagagtatggatttgtttgcatgattctggctttatatgtgtatggatttgtttgactatggaactggggtgggaatgacgagaaaaagtaggtgaaagaaagctagaagatttctagccaaaaccaataagaacccttctcttgtttgctgcggcttcttggagacagtgctgcactgtcaaggcagctcacaaacacacggttgtgagcaaaatattaataacaaccttgaaaaatcacgcagttaagtcttctgccttcaagaacatacttaagtccttttagaaataagattctgtttattttctctttcttcagaaaggaacattcctcttgctaattcattatcagaaacattcgattgcctctaaagtattgtcacacaagatattagtgcttaataaaaagtctcttaaagtaactaggtgctccaataatgcaattattattgctactattaatgctgttgaatggttctttgctctaccttcaaaagatatcagttgtgtgattggacttgctaattgtcctccttagacctcagttctttcagttgtaaaattcaagtttggataagaagatcattatggagacttctagttttaattttgtacccatgatttttaatagctttaatactagattttttttyccctccacttaggctatgctttgtcttaaaaggtacyatgctgccctcatgtggtcagacttgaaataacacataaacgattactaaaactggtaagtgcatttttaaattttgttttaatgaataatgaatgaaatcctacatttgagcttaaaattcacaaacagtcaatactcaaatcaatttgawtcatctatttacaaaagtgccaagcattaactcactcatagtgatgtaaaattttgatgtagaaataatattacaaacatgaataccaatattagttaattgtaatgagcactaccatgtgctaggcaccataaatattttacatatcttatctcatttgatttttctaagataggttttttttatctataatttgtcagatgaagaaattaaaccacttttggggaatgggcgaagacaccacaataaataaaatggtaaggccatcatcaaactcaagttgtgtgactccatagcccaaactctttcatcactagcttcccactcaaccattttatatttataagagctcgttcctggacacattcacaaggaaatgcacatagaaarcttgaaatgtgatgaggtaacatatgtgaaaactgcattaacataacgtctgatacagaattagctcacagaatgttcacgtgttttttaataatgtacgatactcattcatttaataattaatattcacctcgttggtcaggctggtctcaaactcctgacctcaggtgatccacccgccgcagcctctcaaagtgttaggattacaggcatgagccaccgcacccagccctatattcactcttaatcatggcatgaataaagagataaaacatgtagccataacaaatgagtaccagttttctaggcagttctaactttatcacttgtgagggtgaataggtctgtctgaagttttgtaattcaggaaaactttttcaagtttataactttatgtatgacttcctgggacggatgaacaatggctgtgttttaaattccataaaggaaaataaatgtagtaagtctagttttaaaagtgagaggggcttatccactcaacaaggcaccctaaaatatcagaaggaggtggatggtaggaggcaggacaccgtgtcaacccctggctctccaagtgccagctctgtgattttaggagcatgttcatcttactaggaaacttctcatctgcaaattaaagaggcgggctacaggatttggacatgctctgctagcctccacattccatttttctagtaatcctaaaagtcttaggttctgagccactttctttccttgggctgctttgttgaattataccacagtcactccctggctgtgtggattaagcctcagaaagcccccatgggaggaggacttgtgcttggttaggctttgtttaacttactttcctatttcttttttttttttttaatgtttttttttttattatactttaagttttagggtacatgtgcacattgtgcaggttagttacatatgtatacatgtgccatgctggtgcgnnnnnnnnnnnnnnnnnnnntccatggcagaaatcacacttccctctctgctatctatattacctctcttttccattccaaacccccaaaccttatttcccgaaacatctccaaccttagaaacatcaccttagacaaaaattctctaagttttctggatcagcgagatatctaaaaagagattatggctagggaggaattactgtatttataaaacctaaacaagtaaagtcattaaaaaattgccatattcctccagtattaatgatagctacttctaatatgatataattattaatgcaatgttgatgttagcaaagaaaatcattaagaagcagaatagacaggaaagggcgatgatcctcaaatataaaattatttttgtccaaggacttatcaatgaagagagtaaagtctaataatgttgatcctaaatcttaccacaaaaggaaactttatcgccaattataactgccattatgaatgaacacctatgatccaagcattctgtattcattgtctctgaccttcagaacaccaccagaactagaaattatcatttccaatttacaggtaatgaaatagaagctaaagaaggataactaacattcctaaggtcacaaaagccagtaaacaaacaagaagaagaatccgtgttaattggaattcaagaatgtgttgtatctactatattatgtcatttgacattacctggggtcttagctggaagattaccttagagaccatgagggggaccaatatgatatttaaaatgaagatcaaataaaaatcatttaaaccaaatagttcttcaaagcaatgaaacaaaatttgtcttttttttttttttttttttttgacaaggtctcactctgttgcccaggctggagtgcaggggtgcaatcttggctttctgcagccttgatctcctgggctcaagagttgcttccacctcagcctccggagtagctggaactagaggtgtgcaccactatgcccgaaacaaaatttttttagagctaactgcctctttggctgtctttctcatatgctgcctgagctacagggttttctataattgttagttggaaggcaggatttacaattaggacgagtcaccttattttatatgaattccatctaaagacagttttttctaggtgtatgtcttccctgtgagtcttgcgttctcttgcatccttcctttgggataatgtgatttttgctcaggcaatagaagtcaaaaggtgtgtaattcttgcagtctccatctaacttgagggaaatggagggctgttaaagcagaatggagcattagcattaatgacatgcattagtgttaatgacacattaaagataccggagttattttcttagagcatgaaaatgacaaattttggctctttaacatttttacatgagtaggagagcgagtttttggagcctacaaaatagtagtcatgtcaaaagtgttgttttgcctactgatcccagatttttcagaagtacttaagactgtggaatagtttaagtmtatgaggggagaactgatgcgattttgctctgagtagttaataatggttctaagataaacccattagcgctgtctccacagtgtgtgtaatgggactgagctaaagcacgcgtcggctcacatttattcaaatgtcagcagaatagaaatggattgaggtttccatagaaactgctcttgagttcaggtgtttcttggggctttttgttccattaactgtttggagaaagaggtatacatcatggcttttcatttatgctatttactttgtcgttaggagttggctggtggagttaccacgtcttcctttgttttatggcatttttgccaacccctcttacaacctttcccctccagctgagaaacgggaatgagcaatttctacgacctgacaaatcctgcctgttagcagtggctgttcagacagcatttcttcaatttcagccagaaaggaagtttgaacatctcttacctagaaatttatgtaactcattttcttattcaagatttacattatccctatggaatgtcaccattataagaagttaagaacaaagcaatgactatgaacataattaacaaccacaataaaaaagaggatttcctggcattaggaaaatattctggtgtaaaatctaagattaaagataatcaactttttcaactcacacacaagccaattagtttcctggagaaataatgtcccttcccataatatagaaaaaaaaattaaaaagggggaaaaaaagcctgaacaattcaactcagagggactacaatgactcacgtccattaccgaatgccacgcttgcctgtaagttaaactagaacataaaaagctcacagtgtactaccaaaggtatgttaataaagaagagccaatataaaatagaaatagtaatgacaaatagcaagataggccttggacttcccgagagcaggctggtgcagaagaaaacacaggcatgagctctgaagtctgacagctcaatttacatctcaccatggccacttactacttaggatcttgaataagtccctaatcgctatacatgtcagttccctcatgtgtaaagtgagaacaataatttctaccttgctgggttgttgtaaggattagcagtaatagacatggttccttcttatcagtgtattaaatatctgaaaccctgcaatcatgaggttgtggggatgcaaaattcttcatatcgtgaaaaactcactaaatacctaatctcttatacaattagtattcattccaatattttccccagattaaccctagcatttttctcagtttatgtttcaaattatttaataatctctagctgattatatgaggtttgcaatatctcatgcaattagtacttaacttttctctgcctaagttttctcatctataaaacagaaacgatsataatactaccttctgcaagggggaattaaggttaatatttgcaaaatgtttagcacagtggtaaatcataataaacacattaatgtgttgtgtttcaagtaaaaataaaaacaaggctgggtgcggtggctcacacctgtaatcctaacactttgggaggctgaggcgggcagatcacctgaggtcagttgtttgagaccagccttgccaacatggtgaaacttcgtctctactaaaaatacaaaaaattagctgggcgtggtggcacttgcctgtaatcccagctacctgggaggctgaggctgcaatgagccgagatcgtgccactgcactccagcctgagcaagagagatactccatctcaaaacaaaacaaaacaaacaaacaaamaaamaaaaaaaaggtaaaaaaaaaaaaacaaagaaacaaaataattccgtagcaaagtcactgaaacatgaagtagcatgattaaaaatggaagaaaacccagaaggtgcataacgggataaaaacaacagtaaatattgatttgtgtatcataaaggttaagaggtatttgtgaaaatggttagctctggagtattttcacacataaagaaatgactgcatttgttactgggcttataacattcaacatgaggctgtggtagcgggcctccaagatggcacctgatgaccccaccttatgtcagctccacctcccacatcttaccagactggctctgtgtaaccaatggcagaagagatgatatgtttcaagataaggttataaaaagacactgctgctcccacctcagtcattccctggtccactgtctcaatttctctattcactcattctgcaggaacaaagagctggcaggaaaagcccagccttctgataaggttctgaggattttgtccaaaggcctaagaggagctgaggactcttgctaacagccacatgagcttgaaattgaatcctttaaacttgggaaaccttcagaagattgcagccatatgcaacagcttgtctgcgtcctcatgagacactctgagctggaaccacccagataagctgctccctcctggtccacagaaactgtttaagataagaaaaattcgtatttttaagatgctaagtttgagggttatattttacatggcaatagatatctaatacagagttgagggaagttccatgtgctattttgcaaatttgatgaaaaaaacacatctctacatatacatgtaatttgtartgtttattctaagaattagcagatacttkccaccttcacttttcaagccacttttcaaaaactttgttttactacttaatagatgattctgatctcccttttaactgacccaaaattcttcacaatctgtgcgcttcttacttatctcatattctactctcccccatccttttttttttcctttactccatccatgctgacgtcttttatgtttctggaacgtgccaagcaaacttccatctcaaggcctttgtgttgacagttctttctgtcttagcttctctttccctggatatctgaatatccatgtggctcactttcttctccttcaaatctttgctcaaaactctcctcatcagtgaggacagtattgaacagcttatttaaaatagcagtaccacccctcacactgatgatgctccttatctggatttattgtcctttaacacatgtacaagttgagcatctctaatccaaacacccaaaatactccaaaatctaaaacttattgagtaytgacatcatgccacacctagaaaatttcacacctgacttcatgtggtgggtcatagtcaaaatgcattcaaagccttgttttatgcataaaattacctaaaatagtcagtaagattaccttcagtcagtagcataagtgaaacacaaatgaattttgtgtttagacttgggtctcatccccaagagatctcattatgtatatgcaaatattccaaamtctgggggraaaaaatctgaaatctgaaacacttccagacccaggcattgtggataagggatcctcaacctgtagtaattttattgcgtctctccccctcactgaaataccagcttcaacagggtggggcttttcatctcttcagtcacttatgcacttccatccatgatgtgtcctgatgacctagaacaatgcctgacacttaggaagtactcaataaaatatttgttgatgtaaatcaattgaaatatcagtcccatagggatggggattttcatccctttagtcacttatccacttacttgatatatcctcattacctagaagaatgcctgacacttagcaggtactcaataaatacttgatgtgagctcctgaaatgagtttagttcaaggggcttttttacaataccaattatcctaaagtaaagatgactgcctatatttaaatttcctgactccgtaggttgtcaataaacagggactatgatctgaaagcaaagttcagtttaaaaagaaaagtatgtgcttgtatgagtcacaaaaaagggctaagtacaaaagaactgctgaggtaaacatgaacatcgttctgtgaacttatgatttaaataaaatctttatcaccacacttgccaagagcaatatatcttatcatgaacgtacataaaaaactcttgtgtctttcctcttaatactcggaacattatttttatttttattacgaagtttgcattggagaatattgtaactcactgcacctaggtaaaaactaaagacataaatctgatgttagttctaaaaatctacaagggtaatgatatgaatttcacagacatggaagccttgttcagaatagattataatagaaaggctcggtagagccaggttcatgagtgtgtgacctgtgcagaagtgggtgcttagaaggcccatggcttgggttaatgyyctgctgttgccgtcttgaaattcttcacaatttatgaacaagggaacttcattttcagtttacacggaaccctgcaaattatgtacttggctctatcttcctttgcaaacggagaaacaggcttcaagagttttgaaactgccataatagatccaaaaactgtgtatgcttttcacatctgtacaattttgttacgtatttataaacatctgctgaatggatgactctatgtattggcccacatcacttcagaactaggtcttgaacttagggattgtggcaagaaggaaaaaggcagcttccggtggctcacagggcaggccaggtggctcacacctgtgagcattttgggaggccaaggcgggtggatcactagagtccaggagttcgagaccggcctgggcaatatggcaagatcctatctctactaaaaatacaaaaatagcctrgggtggtggcacgcgcctgtagtcccaggtactcyggaggctgaggcaggaggcacttgaacctgaaggtcgaggctgcagtgagacctgatctcaacacacacaaaagaatgactctcaggcttctttttttctaatggatggaagtgaaacctcgaaakcacatggtcaagtgcctgactcttccaaaacaaaaacaaaaacaaaaaaactagcctcagcaagsaggtccgtagcctccagctgaccggattttcagtcacagaacaccggggacctaaaaaagggtcaatctcagcatcgtgcactcaacccagctccttccgcccctcgagcccaggctgggaggagccgaggaaccgaaagagaaaacaggccgcgcgggcggcagaggagccgggcgccgcaatggacgtgcgggcgctgccgtggctgccgtggctgctgtggctgctgtgccggggcggcggcgatgcggactcccgcgcccccttcaccccgacctggccgcggagccgcgagcgtgaagccgccgccttccgggtaccgagcgcgcgcctccccgggatctgtcyctgctccctcacttcctgtcccgggtctgggctgcggaagagggcccccgagagctgaccctgctcgtgggcacccgtggctctgcgatgcgtctggggccctgagctgcgggtgcaaaagccagcttctctctcccctctccttgtgccatggtgtcactcccccatgcctttgctaaccaaaagacttgattttccagaagagatttgtcgctatggatttttgggacgcacccaaataaatccatagatacgtccaaagtgtccttggtgggaagaagcacccccttttagcaatcccctckatcgttgccactggcttccaaagctcttctatttctcttttatgagaaccagaaacagggagcagcctgttggtggaagaaacctgtcgtgtttttttttcccgaggagggcgctagtgatcagaagttagaaacaaagagcctgtctttagccagattaaagaatcctgatggtttatgattctccttaaactaacgcaccacyttaaaagttcttcctgccttggcggagactgagttgaagaaaagagaagcatttaatttccttttcatattattatacgaaatataatataatttatawtttataatatttataataaatacttagatttgagtctagcatgaaaactctggaagggaccagttagctgagcacaaataatgattttcctgaaaccaaggaaactgcaagggatgccgatttagtgttcgcctcactatgttctagatagctgatactatttaacacatttttaaattcatgaaagatgccattrtcatgatttaatttattggaaaagaaaattctttcattctgaatcaaacataagtctgagttgagtaatattgctcaaggaagtgtatcttttttcctggtgtttgttggaatttctcacaggatttcatagctgtgctcttttcccccgactctcctggaaagctccaatgtttaggaaggccagccttccctgattctgtccactcttacgttttgtccaaaccgagatgtgtactgttatctccactttattattcttgagttcagttctagctttcaaaaccagaagtcctcttactctttcaagaacaaaattctggcctgtattctacccctatcctcaacttacgttcgttttcctggtaaaccaaaccccttaggggaaaagtcagtttcacctttattggtaacgtattcattggctaaataaataaacacactgtcaggctcctaaaaataatatttcaggacaaagctcaaagggctagacttataaatatatttttaacatttatttagattttagataatttataaatatatatgtgtataatttatgtagtgactcatactggtcctgtaaagaggccataccctgatgaatgtctagaaaatgtaacttttctcaggagaaatacaaagaaacaggttgaaagatggaaagttggaagtggaggaggatcgaattatgaagactcttagtacattttaaaaacctcgggttaagaaatactgaaaaaattttcaaagcaattgctgcctgtaagaatttgcttcatgagatggatacccaaaaaagagaacattgaggcttcaacgcacagttgctggaaactgaacacctctcggtgcttagttggactttatccaagaatgctttaaaaccgattttctaccttagtggtccccaatcttttggcactagggaccggattcatggaagacattttttccatggacgggaggagggaagtgggggagatggatggatttgggatgaaagtctttcatctaagatcatcaggaattagttagattagttagctggagattgctgttcggacttgggatagagagctggacagtgggaaaggtggaaagggccttgcctccttggtaaccgtgaaacttcwtgttgaaatcaagttaattcattggtgaattgatgattcaggggtttgcagctgaagatctggttcaagaaagtccttgattaattagtaatgtctttcatggtcatgggtttagagaatggtgaaggttttaaaatttgttttaatcttagccttagatagttttgtaagtttcccaggaatgcacgttaaatgaaagttaggttagcccatgactttcccacaaaatattatagtattgttcagtgaaaactagactccactatggtttattatgggatgcctcacaagacacctgactttggatggcaccccttatctctgcactttcactcctttagaaacttccagtgctcaggaagctcttaactattggatttagcctactctcctttgtgccaaaacctagctatgccctcatatttactgatgctcattattttaccacagaacatttggtattcttatccttttgggaggcacagacccaatattggatccaataaaatttgcttgatacactcactttagaataatatctatgccaaagtacatgtgattttacataaaatttccaaagctttaccttaagaccagttgccgtaatgacacaggttatattattataagattatttatatatttaggaatatttatttatgtgtaaatagatggccatagcatctttataacaagtgatcctaactaatgagccacttatatgtgcttgccgtaatcagccccttgaaatctggaattaggtcctccaaataggctttatccaagaaagctttaawacctattttctacctcagtggtycccaaactttttggcaccagggattggtttcatggaagacaatttttccacggactggggtgtsggsgtggggtgaggaggatgcggatgatttcagaatgaagctgttccaccccagatcatcaagcattagattcacataaggactgtgcaaactagatcccttacatgcaccgttcccagtagggtttgtgctcctatgataatctaatgctgctgccgatctgacagaaggtggagatcaggtggtgatgcatgctcgcaggcccctcaccacctgctgtgcagcctggtcgttaacaggccacagaacagtactggtccatggcccagggtkttgagactcctgttctaccttatataaagatgataacacgaatttgatgttagataaggttgttcagcagactttttctgatgaatctcacttaaagcatacatkgactaaatggaaatatatcataaacttaaaatcataggttataatttattcatcttcccatacatttatccaatactttatttaatttctactgtgtctaaagaactggtctgggttttctgagggatacagtggagaataagacgcgtgctgtcctgtaagaaatgtacacaaaaaatgaatatcgttatgtttaagcattgtatcctgtaaataaacattttcctgtaaataaaaagaatgtaaagacttatacactggagaaatagattctcccaagtagttcacaaaagtatgtatttttaattcaatctttttgtgtacatgctcacacaaatcctgactacacatttcttatcatacatagtaaacatatatctgcaatatgtttacacacacttcagtacactgtatagaaaatactttgtctaagaaacttttcaaaagctgtactttataaaagtgtatccttaaaaagcttttattgttctaatccaaggctcctcaacagtggcactattgacatttgagaatggatagtgatttgttgtgggggaccttcctcttcattgtagggtgagtagcagcatgcatgggctctatgcaccagatgccagtggcatcccaccagtatgacaatccccagtatgacaaatgagggacaaaattatcctcagttgagaatcactgatctaaagtttacaactcctaagtcttccaagaaattctcagtgatgctctttgtatacaaatattttaccttttttgctcatcctcagctttactgcaatttccagaaacgaaagcactcctaaggagaacattttaaatctatgtgtacaatttaygatttatcctatgaaacttcaaaatctgcaaatgaaagttgttaaaagtctgagtaatggaactgcaagacaaacaatgagtttaaagtgccgaagataaagtgagcttccaaagtaccttaggtgtctctgttaatttcaatataaaacttatcccatggatacatgggattcattgtaagggaatacacacatcattgcgtatattgataaaggcaaataaatcatcattagtggaaggaaacctagatatcaatggggaaaaataatagatgttcactgccttttcagctgataaaacagacatgaagtcccttaaagtttataacgcttcagtagatttcttgcaggctaaataactatacccctccaccaaatactagttgtgtgatcttaggcaaatcatgtatctgtttctcagatttattcttctgtgaagagggstaatgttagcaattacctttatacagggctaagttaattcatgtaaaacacttagaatgaatacttgcattcaatttaacaatcccttcaaccctttgtatttagtgcattcagtggctgagaactttccttgtagagaaatgaaaactcaacagtttgctcataaaagattcgcttactcctttagaaacagttgagtacatgcaagaagaaaatacatgatttcatttactcttacttagtggcagtctgtgagaaagatttcacagatttttcccctcagggaagtagattaaggaaacatctgagaacccctcaagycaccctccktgggtttctactctttgattgttttgaacatgaccattttcctcttaacttaccctagccggagcattatctaagactgtggttacccacagctggaaaggtaagagggccaagatgcctgagatagctggaagggctttctgatcctgtaagaaaaatgttgatttctgaggaattttaaaactgcagcctaacctcctcatgagactggttcaggtctcttgtcaatagagttatcctgttttatgatcagactgaacccatcctctgtttgttgtttggccttgctgggatgtttcatgactactctgcagttcttatcaacctcctttagcatactcatgaagcatcctagctaggctaacaggcgggaaattagaatatggaagacactgcttagaaacatattacatttaaatcacagttcaaatatgtgatcacctccagtacacatgtgcacacacacacacacacacaaaggcagctttaagagattctacctcttagaaggatggctgctagaagtcataataaggatagctttagggacagagtcttacagggacagggtcctaggtatgaatttgagaggttatacctataataaatagagacttagtatgcacaagacgtactaatgcccaagggacatgtttttcctagttttataatcaggataatttcttcaatctcttgggttctgagttacccttctgttcaggaatctggtatctccctttgtaactcattcaattaaacacatttaacaacaacaacaaaaaaaaaggtgaaggtagttatttttcaccaaatctgttcaccaaggctgttctgatttatcagctctaatttttctcatgtaagatctaatttttaaacatctgcacttttcaaaagtatcaatgagaagtttcctatgtattcatcaaaactttacgtctttcctctcataaatgaagttaaggttcaggtcttttctttaatattttatatgactttagagatggctactctaaatttgctccctatcatatcctctgttgagaacatgtgcccactgatcctttacctaacggaggttgttggatgtaatgagcagcaagggcctcatacagacttcagtttgtgatgcgtctatgaaatctttaatagccagaatcaagagagaccggaaaagtcacttaaaagaattgataattcaagaaatgaaatacagggctttttaaattttaaatgatgtgaaacccatgttagtgaacttgataagtgtatagcaaacaagacaataaataaataagagaatagatattcttggatatactgatagtattattttaccatgaaagcaacagattgctttcaatagataatattgatcctcatttctaatgacatgagaaatacttgctccaagtgaatctgaaagtatggtctttgagcgccatttctataatccaaatactctgtttaaaggaaaaggaagatagaggatgagagtattttaactgagcatttattttgccagtctctgtaataagtgttttccaattattattttatttcatccttacattcttccagatcagtattactccatttgttgatggaaataaagctcagagaggttgattatatagccaaaaattgcacagcaatggtaagacatttcaaattgttgcaaagttaaaaagaggccaggcgcagtggctcatgcctgtgatcccagcactctgagaggctgaggcgggcagatcacgaggtcaggagattgagacyatcctggctaacacggtgaaacctcatctctactaaaaaaaatacaaaaaaaattagccrggcattgtggcgggtgcccgtagtcccagctactcgggaggctgaggcaggagaatggggtgaacccgggaggcggagcttgcagtgagctgagatcacgccactgcactcgcctgggcgacagagcgagaatccgyctcaaaataataataataattattattatgctgtgttcagaagcctccaaggaagtacttttaatgttattaatggttttgcaaaatcaaaacaagtgggtagagattagtggtagggagaggacgaagcagagcacttagtggtttagagtattttgctgttggcaggaagtcaacaatttgtataaagattgagtagccctgacatgggctatggagagctgtgaaatgacaggagtcattacaccagaatagcaaatggaattcttttagaagttggctcctggttgaacaagtggaagacagcaacattttcagaagtcctgcagacactagtgccgctgacataaagaacagtgtatcaagtggtaacaaatagaaaatatatgtggagatatttgtcttttcaaacacatggcacaagaccaaaaccaagtaactgttattggaatcatcattgaaaattagggacataaatatttaaaataaataaataatacattcatttatttcattattaaattggtgttattataactacttcacaaccggaacacctaaactttggatggtgaaatgacacttataaggcaacacaaaaattaagagaagtacatgggaactccctgccaacgatgtataagtttgtttcatctggcatttgccaacttgagtggcaatatattgtttctctcgtagatgtcacaaatgatctagtgagataaacttgcattagctctccaactaaatagagtatgtggctcaactactgcctcccctcccagacacacgtgtagaacccacacgtacagcattgcctacactcaagagtctaaaatccattcctagaattagattttcttaattaaacaatttgtgtaattttaaggatcttgaaagggcrtaccagtctatacctcatgtgcgtgcrtatgtgtgtgtgtgcgcatttggtgtggtgtggtgtgtgtgtggtatattccttttttgttctgttaatatggtgtatcgtactgatgattgattttgaaattttaaaccaacctagcatttctaaataaacttcacttggtcacaatatattgtccttaacatatattgttagatttgatttgctattttgttaaggattttgtgtctacagcgtatttatgagggatactggtatgtagttctattttatttagatacatttttctggtttagaatcagggtaacactggtcttatttaagttgcagcgtattcccttcttcttgattttctyaaaggataatattggtattacttctttcttcattgtataaagttcaccaaaaagccacctgggcctgaagttttctttgtgagtcagttttcacttacaaatttaatgcctttagctgataaaaggctgctcaagttttctatttctcctttcatctttggcaatctgtgccttgcaaaaagtttgtccattttgtacagtttgccaatttattgtcataaagttgtcaaaatattattcttctaatgcctgaagcatctgtaatcatggctcttctttcattcctaatattggtaaattggttattcatgtcttctcattcttttcttattttttatttatttatttatttttttgagttggaggctcgctctgtcgtccaggctggagtgcagtgctgtgatctsggctcactgcaacctccgccttccaggttcaagcgattctcctgcctcagccccctgagtagctgggattataggcgcccaccaccacgcccggctaatttttgtatttttagtagagacaggctttcaccatgttggcgaggctggtctcgaactcctgacctcagatgatccaccgacctcggcctcccaaagtgctgggatgacaggtgtgagccactgctcccaggctttttttttttttttttttaatcaatcacaggagcaattcctgtgaactaatagggagaggtccaggtagagctatctgattgcaatgtaattctgaccctgagtgaaggaaaaaaggaaggaagactggggaagagtyccatgctgtctcacagtccaaggaaagtttggtttggcaaggccatcagggagtcattaatcaaaaaccagctgtcaggggagtcccatttgtctcccaaatagcaagccttagcactaagtcatgagctaggtgcagcccgtaagaactgtggcttcccttggtgtgatcatggagatttcaactagcagcagctaaactccctatagaaagaaggctgggaggcacattctcatggctgccacattctctcctgtgcattcttaacatcctacattttcagtgccttcctgactactccagctcacaaagatggccaggcagtacttattgaatgaatgaatcctctgaattccttagcagttaatagtctctggcttatatttgtcatttgccatatacagaattaccttgtattctagttctatttttacatttatatatccaggttatattgaaagccttgcttcatcaagattattttaaagtacctcaaaaactttattaatttgttgattagcaatcttcctaggtatgcacaaaaggaaaaaaaataagattatgacaacttccagcaataatttacttaaaaataaacagcttaaagttattaagggcatgatatggaaaatgtcacttatctatttattcaacaacaaacacttatcaaggatctattgtgtgtcagccatgtgctaagtgagtgtctcaccataaggaataagacatataagcagtcatcattttgcttataggtttttgatacagacacacaataaacacataagtacatagacaaatatgtagaagcgctagggttggaaaggtaccaaatgatagccccctgaaattttatttattctatgtrattggttagtattacgaaattgaagcatgtttatatataaaagataagcttaagataaattgtcacaaaattcaaagttgagaaatcagtaaataatggtcacatttcccctccagatagagaaaccaggctatcttcttcaaatatttccagaattgcatctgtcacagagcctttgtaccctacatgagatagagatatctataaagctttaatagaatcagattgatttattaatttatttacccagtctgtttttcatgcttcattacttagttccgggaaacacaaaggtgaagaggacatattccatattcataattgtttaaccacatgagtgaatgtctaaaggtgacaatttgcttctaktatctagtgtttatttgcagtctatttcttttttcccactatgtcaatactttaacagctgtatatggaatgcttgcaacaaacctggtgatggggaattataaatgaataaaatacacttttctcagcctcaaaaaatgtctgcaattagataataattctaatagaaaatatttatgaatctcctatggatatcttatacaactttacattgtagtctgaaggaaatcaagctttaactttataattgaaaaatttctccaagttagttatacacagtttactttggaaaactgacatagtggatatgaaatagtttttgtttttcttctaggaaagtcttaatagacatcgatacttgaattctttatttcccagtgaaaactccaccgccttctatggaataaatcagttttcctatttgtttcctgaagagtttaaaggtatagtccgatgttgctatttaggtggtttcctgattttaatttgcttgcttaacttttgataaatatttcattgtaaatctaatatattgagtaatagttaacatttattaagtgtctactaaatgtcaggcatgtaccatgtgctcacataagaaaataaattcatggccagtctcttctaattactgcttaagaaatgaatgttataattatgcacatttccatgtggctataaaggataattgtctaatcacttctgcagttttctagtgctttttctcttcaggacacacatggttccatgggttatgatagaacaaatgatgtcaattatacttatttttattattgacctggttctatcaaacaaatcattttatgtgtcaactccagccttattgtaggaattctcttttgtagtttttaatgaatgcattttatgttatagaaaagcacaagagaaaatctaaaatagcaggtctactagaaggctactgtttcttctttaaaagttcctcccaaagaatctcaaggatataatataatataatattggttgtcttttagtataatattggttgtctccctataatataatattgattgtctttatatataacaaatatatatgatatatataatataatatattgtaatataatattggttgtattttcattttatgtttctactcagccatttatttaagaagcaaaccttccaagtttcccagatactcagcagaagtacatatgtccatccccaatgtgtctttgccgttaagatttgactggagggacaagcaggttgtgacacaagtgagaaaccagcagatggtacgttgaaatccctcttcttttctaatcatctaagcattgaaaggcagctttgaggtcaagtttaatcaaagttgtaatggaaacatcatttctctaggaaaatcacatctcagtcatccaaaaatgacaatgaaaagagaatctctggaggaatgagagtcaaatgtcaaagccctgacttttatttctgaagataaaccttccttgctgtgtactcttactaattgccattgccaccaacacaataactcagggatacttcccagtagctgtaataacagctcagggatacttcccagtagctgtatcacagataccaagctttctgtacaatagcagatgagaggctggagaaggtaaacatgagcactaaaggcttaaatggttcaagaaaaaaaaagtgaaaaagtaaaatgaaaatggatacatttaccaacagtgtggccgaatctcctgggttctcaagcctcatcttgcaagctctgtcagaaaatctgcccccgtcttcacaggatcatatacctttgaatctrtgggccttaaaagtatagttagtagtcagttcagccataacgtgacgcatacattccagaaaatcaccacctatgcagaattgagcagtagcatgacagggattatgggagaaatgaggttaggttacactacctacgagcttagtcaatgacatatgttttaaaagacagaaaactaatagacacagtagcacagttttacacatgtttactgattaagaaatatgtaagtactgcaataaatatagcaatttaccttgaaaagagactcaaagtgtgctgaggacatgggagttggcagggcagcagcttgtgagttattctgaagtggtggaaggaggtgcctttgaactaggaaggaaagtggtaagagcagatgtgggtgggtatgacctataatgcatgtagtgaacccacctagctggcagacgtttgaggggtgtgtgcatactttgctgaccttccctacccgtctacactcccaactgttggcawagggaatgcctgccaaacaggcaaagtcaaacccctaaccagaggggatagtctcagtttgtctgcagtggaaacctcaacagatcattcagccttcccttttatggaaagtgttttggtgccagctgtttcgcagtcaatgtgtagttagaatgatttttgcttctcagagtctatatttatttttgtacattaagttttaccaccaaatcatttgctttattattggatttgtaataacatgtcaattagacataaatctaatcctttcaaaaattgtccacagtgtattgaagagggaacttttaattagagatctttaattaaaggaatrtatgagagactttttttttttttaagcaggaactgcccttgtggcttgactaaagctggctataggggtgatgtcagcagcctgttaccttttctcttttttttttttgagacggagtctcactctgtcacccaggctggagtgcagtgatgcgatctcggctcactgcaacctccacctcccaggttcaagagattctcctgcctcagcctccttagtagctgggattacaggtgcgcaccaccatgcctggctaatttttgtatttttagtagaaacggggtttcaccatgttggtcaggctggtcttgaactcctgacctcatgatccgcctgccttggcctcccaaagtgctgggattacaggcatgagctgccctgtgttcacctttgtcaaagtttggagaccctgctgtatggtcacttagtgagtgtttttactatgccatagrcactagagatagagatataacctttaaaaaagcacttaaagccataaagttgctcaaaacttaactctgcaaagatatccaattgtcattcctttttttttttggtctaactctgccacacatggccctccagttatgttagtttcatccagtctcaaatcctactctcttctgccttttctgtggatccttcttccttttacgtgatcctacgatccctaatttcattccctctgtctcctctctttctttcaggactagttcttttattcttttgttctagtttgttaagtaaaagcaaattaagagatccactatcagcatgattggcagccaatactggagtaatgactaatatggatttatatccttaggacatttcatgtacatccactataagcatacttaatcgggcatctttatagcctaaagagtaattcattaatatttattaattctcttatctccatcaaataattagcacaacatgcatctttcccctcctcacccttaggatggaagtggtgtatgaccatggaagcagagtgtccttaaaaaagcaagggggatggaaggttggggcgggagtcggcacacactctccagaagaaaagccacttacaaagagaagtcacatattcagtgaactgaatggtcttttagaagatcatcagttagcccaagtatttcctyggtctctaaaaattcacttttatcttgcattgccaaatttagaatagtaataatgctgacaacatgaactaataattaaatgatgctcaaaagagacttttggttttctctttttttcagtttaaaaatctagaggataggcgtatttattttgtaggtttccagaatctggaagccttacttgatttgataacttgttacatttagagatgttggtaagttgatttaaaccctggaaataccacccctttttctgtttttaaacagtgtggaggatgctgggccttcagcgtggtgggggcagtggaatctgcttatgcaataaaggggaagcccctggaagacctaagtgtccagcaggtcattgactgttcgtataataattatggctgcaatggaggctctactctcaatgctttgaactggttaaacaaggtgactagtctctcaacctcttaaactctttatttccttttttgcttgtttactgtgtgttcaaaattcaaacagtttgttcacatatattaaataatgtttccacgttcggaaatgtagatgatcaaagcatgaagtaattaatcagaatatttaaaaatgaatcacttctaggcaaagcagttgtcaagaaatcaaaaggggaaaaatctgaagtctgtcttcagagaaatatttatatttatttcttaacatttcttaatatatacatgcttttttgcagatctgaatatctcataatatcccggaaagatgagaatatattttttttattttcatagaatttctgaatgttaaggttaaaaggaacattagagactaattttttagctcttttttgttgttgttgtttttgagacagagtctcactctgtcacccaggctggagtacagtggcacaatcttggctcactgcaacctccacctcccgggttcaagtgtttctgctgcttcagcctccggagtagctgggaactataggtgcccaccaccacacttggctaatttttttgttttttttgttttttgttttttgtttttgtttttttagtaaagacatggtttcaccatattggccaggctgatctcgatctcctgaccttgtgatccacccgcctcagcctcccaaagtgctgggattacagacatgagccaccacacccagcctgtagctctttttatagatgaagaaatgaagcctgagaagtgagatcattttgtcaagtcagtagctgagccggagttgtaccttcagtccccagcctctcacagtagggctttgctcagtataccccagtgtccctcagcgttcttagcacttgccctgacagtgtcccagatccgatatcaactgcatgaaatttgccaatgagggtgctattagtttctgtagaacgtcatcaaaccagagttccccaaacctgaattctcttccattatccattggttgcatttttaatcacgtattccaggacctgctctgtacacactgtagacgacaatgaattatgagtctcctccctttcattagcctagcattcaaaaagggagggttttgtacagataactatgaagtatttgacatatgctatatgaatggcataaaagtgaagtgatagaaagaatgcttggcctaaccgttgcctgtgtataaaccactggatggaatctgaaagacttggcagaaccagaagcactgggaggaaagtgagctgccctatagcaccgtcaggagaaagatgacaagactgttactagatccatggaggatctrcaaaaggatgctgtaagataaagagaagtaagggagaaggaaagatattgactccaaatgtctagactatccagaacaagcacctaaagatttaatttataatattaaaaacccaaagtataggctgggcacaatgcctcacacctgtaatcccagtattttgggaagccaaggcaggtggatttcttgagtccaggagtttaagaccagcctgggcaacagagtgagaccccatctttacaaaaaatacaaaaaattagcctggcgtggtggctcatacctgtagtcacagctactggggagacggaggtgggatgatcactggtgcccaggaggtggagattgcagtgagacgagatcgagccactgcactccagcctgagcaaccaaacaaaactctgtctcaaaaaagaaaaagaaaaaaaaaagaacgcaaagtatatccacatgatgaaggtgtgtgaaattgaacctgttttgacacagtgaagtaagttctatttgatttataaaacaattgacagtaaacatgttcagtgattgttttcttttagatgcaagtaaaactggtgaaagattcagaatatccttttaaagcacaaaatggtctgtgccattacttttctggttcacattctggattttcaatcaaaggttattctgcatatgacttcaggtaaagatcttattgtattatgtttttctttatacatttttaatttatgatctattgactggttaataatttgtttgaaggcatcactgcatactcttaatccttgtaaaacatactttttactagaaagagtagcaattacaatgaaatgttgtaaatgttgtttcttaattataatctacttattttcccaagtgtcattacgatagaaatgaaaaattttaattctgtgtaaggtacaatttatatgtatatttatttgttatattttatattttattatacttacaaattattagtgcataatttatatttatatataccaccttcatcttatcaaatttaggtgttatattaccattagcatatttcaatcttaatggtgagtccatccagaattgctttgtacagactgtgcagctaatatcacgtaggctacatatcaggaagcatattttgaacaccttctatgttctttgcatttttcaagacatcagccatttgaaaaatataacacaaaacttcagattagagaaaagagggaagcatatactactgaagataaattatgtagcatacactataagcatgatgggaatgtagggatagataaagacaggctgaggaaaaggacttgtgttggaactgaagggcaggataactttggatagttttggggaaaacaatcattaaaaatgctttaaaaacacatgaaaaacacagagctggctggagactcatcatgaccatttgatagagtgcaaaataggtgttcatgggtgaaaaggacaaagggagacccaaccaactcctggcttcattaagaaaatatatgatgggaactttgcagtcttttgaaacagagaaaacaggaactaaattaaatttggataaggtaacagaatcccctatgacttagtggtcctgaatataaaataatcccttgatccagatggtatctacccatgggatctgaaagaaatcaagggtgaaattgcgtccttgaacaaaatgtacccgtttaaatgagcataagtgtgccagagaactgtcaggttgtcaacacagctcyggtctgcaacaagggtcctcagggtgacaccaggaaccatacaccagacagccttaattccacagctggcagacyatgtaggatttataataaaatgtgcagggtcactgagtaccgtggtcaacatctcatttggggataaaggtaatgtgctttctaaaatcagaaagtatgccctataaactctgacttccttgagagtataagggaaggatgtgtacaagaaaaaactagatttacaaaatatcattaaaagggattaagggaatcccttatcatggtaggaaattgaaaaaaaaattaagaagaagcaaaagaataataggcattagtctgaattaagggaaagagagaatgcargagttgytggcattgggcctttgattaggaaggaagaggtcccaatcaaaatctcttgtttatattgaagattaaactctaacagtgcaatgctaaactgatagcatttgactgcaagaagatctttctttgatttatttattcattcaaatatttactgacttttttttaagttctggggatttggcagagaacaaaacagacaaaaaccttgccctcattagtaattgagacagacagtcacaaaaaataaaaatacatgtggcatrttggctgtaataattaacaaagagaacaaatgaaaacagtgggaggaagagaaacgatctggtagtagggggagtgtacaatttgagaaagggttgcctggcagggcctcactcactgaaaaggttatgttcaagtgaagacttggagaagtgcgtggacttaaccacgcagatatgtgggggaacatggttccaagcagagaggctgtaaatgcaaagatcgtgaggcaaaaacatgtctggcatgttagaacaatgatgaagccactgtggctgtagtgtggagaagaaagacaagactagtaggagatgaggtcatactgtccctgtattagtctgctttcgtgctgctgataaagacatacccaagactggaaagaaaaagaggtttaattggacttacagttccacatggctgaggaggcttcagaatcacggcaggaggtaaaaggcactacttacgtggcggcagcaagagaaaatgaggaagaagcaaaagcgtaacccccgataaacccatcagatcttgtgagacttattcactatcacaagaatagcatgggaaagaccagcccccatgaattcaattacctccccctgggtccctccacaacatgtgkgaattctgggagatacaattcaagttgagacttcggtggggacacacccaaaccatatcattccatccctggcccctccaaatctcatgtcttcacatttcaaaaccaatcatgccttgccaacagtcccccaaagtcttaactcatttcagcattaacccgaaagtccacagtccaaagtctcatctgagagaaggcaactcccttccgcctatgagcctgtaaaatcaaaagcaagctaattacttcctagatgcagtagggatacaggtattgggtaaatacggccattccaaatgggagaaattggccaaaacaaaggagttagagggcccatggaactccaaaatccagcaggcagtcaaattttaaagttccagagtgatctcctttgactccagatctcacatccaagtcatgctgrtgcaagatgtgggttctaatggtcttgagcacctctgcctctgtgctttgcagggtacagcctccctcctggctgctttcacggtctggcattgagtgtctgtggcttttccaggtgcatagtgcaagctgtcagtggatctacyattctggggtctggaggacagtggccctcttctcgcagctcctgtgggactctgtgtggagcctccaaccccacatttttcttctgcactgcgctagcagaggttttccatgagggccctgctcctgcagcaaacttttgcctgggcatccaggcatctccatacatcttctgaaatctaggtggaggttycccaatctcaattcttgtcttctatgtacccgcaggctcaaccccaaatggaagctgccaaggccacagcctgagctctatgttggcccctttgagccatggctggagcatctgagacacagggcactaagtccctaggctgcacacagcacaaggaccctgggcctatcccacaaaaccactttttccttctgggcctccragcctgtgatgggaggggctgccgtgaaggtgtctgacataacctgaagayattttccccatggtgttggggattaacattaggctccttgctacttaygcaaatttctgcagctggcttcaatgtctcctcaaaaaatgggtttttcttttctactgcatcatcaggctgcaaattttctgaacttttatgctctgttttcccttttaaaatggaatgcttttaacagcacccaagtcaccttttgaatgctttgctgcttagaaatttcttccgccagataccctaaatcatctctctcaagttcaaagttccacaaatctctagggcagtggcaaaatgctgccagtctggttgctaaaacataacaagagtcacctttgctccatttcccacaagtttctcatctccatctgaaaccacctcagcctggacctaattattgttcatatcactattggcattttggtgaaagccattcgacaagtctctaggaagttccaaactttcccacattttcctttcttcttctgagcccttgaaactgttccaactgtctgcctattacccagttccaaagtcacttccacattttcaggtatcttttcagcagtgccccaatctastagtaccaatttactatgagtccattttcatgctgctgataaagacatacccgagactgggaagagaaaggtttaattggacttacagttccacatggctagggaggcctcagaatcatggcgggaggagaaaggcacttcttacatggtggcggcaagagaaattgaggaagaaggagaagtggaaacccctgataaaatcatcagatctcatgagacttattcactatcacaagaatagcactggaaagactggcccccatgattcaattacctccccctgggttcctcccacaacacatgggaattctgggagatacaattcaatttgagacttggatggggacacagccaaaccatctcagtcaccaagcagtggccttagagcagggtgttaggagaatggccttggagatgagagatgaggggtatgtatagattaatacccctcacagagggtaaagccctacacagttttttaytggagaggagataagagagaagagagtctaggaggattcccggccttttgatctgaatgactgaaaaatagaattaccattaatgaaacttgaaagtctaagacaggaacagatttagaaggaaacagtaagagttcagttggaacacctaggaagtgatcccaggaaagactggtaatggggtggggaaatgagagaaccggggcagcagggtttcttgattaaaccagttagtgctgtggctaacctcatgcttagtcctgctggggaactctggcagccagggtaaaatgtacacttcagtgccatcccatccaagttggtgattgtcgtcttccctgattcattagttgagggtgcatctggggatggaaatggggactgggcttgctttcctggctctaggaggaaaagggctcagggaaagaactgcaggatctcattgttgcaagttgggtgagtgtgcattgcagtggtgacagccttaggatgtgtgaaggtcttccaaagcatttgctataactgggcacaagacctggtcctttgtacttcaataatattatttccatgtatggtggatgcctgagactcagggagagccatatagctagtaaactgtggagtcggattagaactcatatctgttcaactccaaagcttgtgcttttactcccaacactattggtaacgtcatgtggtcttaggttttcagccaaacgctccttaaaacattgtacagaacctgaaagcatctaagaagggaaaaaaataatctaaaatataaaaacataacctaattttaaagcaaaatgaccattcccacccagggttcttcatgaatttttgtttatcagaccccagaaatttcaggactcaaactagaatatgagaatgactatgtaaataaacaaaaactgtaggaacctactacmtataacagtagtcagaaaaattcagacacagtataacacactgaattctagggaagatgagatgaaaatccacattatgaagcrtcagtaacaggtcagacttgccttcatcgccgcatcttgatgacaataaaatttaggaaaattatttgaactattattattattccattcattataataataatgaataataattataattcattaatcaatgattaataataattataataataattcgttataataataacgaattattatttccaaaactgtaggttttggaaattattaatctgtgaaatgaatagtaagctcatggaatcaatgtttgataataaagccattataacaatgtacatgttgatagtagttctatattgggttaataatggaaattaaaatgctgtctggagcattatttgaactctctaaaagctgacatctttctgaaagacaaatgatagcaatgccactcaattctggggccaaatggaacatttgcctctgcttatgactgaggcttgtccttctatttcttacttctaatctttgatatcttttttcagctctggcccaaatcagggattattactaaattgtttctttgattctgcaatgtcagttaccctttgcattctaaaaatattccttcttcttgatctttctgcttttctcctggtatccctgaaactggatctttgatgagatgaacttccagtaatcctttgttttcttcaattgatggagacggctgtgttctggttgatagaaagattattatatatatcatgtttaaatcatgaactatgctaagaattttgatacaataagatatactttatacactaaatcctatggggaacacaattagttattagataagttagaaatgagggaaataaataatccttattgtaaacttggagtaaaacttatgtgctgggcatgctacataatttatgtcttgcaaaattgtatgccataattttatccttgtattgattctgcatggtaggttgaatggctgcagtgtatagttggaatttgaacccaggtgtgggacaattaaaaacctataacctatcatgatgccttttaaaaattttacaattttgcctgtctcaggataatcttagttaatatgaactgttttacagtagcaaaaattagaaatatctacttatagatctcaaaaagcagatattcatgttaatagttaacatgaataaatgtataaaatgaatatatagtttctatttcaatcaattccattattatgcagtcaactttttgctcctctgtggacaaaatattccctctctagaaactggtctccagctggtcgtcatgaaagattatttacttacttattagtggattattaccactaatccacccatggcttgctatagcagtaaactatcaaatgttatcttaatagtttgaactattaggaacttggtttcagtatccttcacccacaaagctgacctttgaaaagtgtaaataatgatttgatcactcacttgtaagatcaatgaaggacaaatgttgtataatatgagactttatgtccatgtgtgaaaacaataattgtgtattttgcagtcttcacagttgaacacctagttctccgggcatcctaacatttcttctctttttaaaatatttgcttaacattgcttctattgtataattatattagccacttttgagtagcccttccctataatttctatatttgacaatgactaacatgagttagtctcttgattctcatggtgtggcagagatggcaaggtatcgccaaatatctagtctttccactttccttaataaaagaagccctatgtcttaactaattttccagccrgctacagaactcattccccatcttcctttaagctagacttagccatatgactgagttctggccaatgagatccgtgaagatatatgtggaagtgttgcgggttatttctgggaagtcttctcaacagagatgtatcacttctgctttctacttcctgctgtcttaaatatgtgttaaatggctggagtcccagcaaccatcttggaccatgaatggaccctgaaaatggaaacctttgaatagcaggacaatgatagagaaagagcttgggttcctgatatcctgaaaccctatcccagccatagactaccagtctctcagacttagcttccattgtttaggtcctttgtaactgcaaccaaacctactcagaatcatacacagattatatagatcattgttatttttaccttaaaaactaaattttctaaccaaatatttcctcttttggtagtgaccaagaagatgaaatggcaaaagcacttcttacctttggccctttggtagtcatagtagatgcagtgagctggcaagattatctgggaggcattatacagcatcactgctctagtggagaagcaaatcatgcagttctcataactgggtttgataaaacaggtaagtgctgataagactcagttgactgctttccagcatggacactgagtgcaaaatgatcaccatactgtagaacattgaaatttggttctgctatgattaagtcctcataagaccttcacaacttctcaacaatcttataggagtaaatgtgccgagaccagctcagttgtggagaacctaacccagcggcgctagaggaattaaagacacacacacagaaatatagagtgtggagtgggaaatcaggggtctcacagccttcagagctgagagccccgaacagagctttacccacatatttattgacagcaagccagggataagcattgtttctatagattatagattgactaaaagtattccttatgggaaataaagggatgggccgaaataaagggataggtctgactagttgtctgcagcaggagcatgtccttaaggcacaagattgctgatgttattgtttgtggcttaagaacgcctttaagcagttttctgcccagggttcggccaggtgttccttgccctaattccggtaaacccacaaccttccagcgtgggcgtcatggccatcacgaacatgtcacagtgctgcagagattttgcttatggccagttttgggaccagtttatggccggatttggggggcctgttcccaatgtaaatgtcttgtcagattccacctgtcaatttttgagtggatatcctgttaaaatgatgataatttttgttgatataaaactgtatcgggaacatttagaataattgttgggaaaaggtaagtgcatattattttatcatacgtatctaaaagttcttttttctttttctgattccttggaaattagtgtttgttttcattttatgcagtccctgtataaagggaagtgaattcaaacatatatttctactgattggagagtgtccgtaagtactgctcaggtttacttagttaaaataaagtagtttaagttaccattaaattacatttttaatcttcttctcagagctactatccttagcaagaatccaacttaaaataaagaaacttaaacattcataacaaatttgagttttcaggatttgttactatttatgtttcactgtaggaagcactccatattggattgtgcggaattcctggggaagttcttggggagtagatggttatgcccatgtcaaaatgggaagtaatgtttgtggtaagtcatgagtttgtgtttaaaacctcaatataaatattaaggagattatttgaatattttagagttacaatctactcaaaccactttagcagtaataatttttgtcctttaaccaaatgataaaaaaaaaaagtgttttgcaagaggaactgttaaacatattagtatttgaaaaaggaagagggaccttagtaaaaaatatatattacatatatatctcaaaacataagataaagtaataatttaccaaggttaattgctttaaaaatgagataaacacacagcttaggagactggactcctgcagaaatgtcttcttgttccaaatttacatttcataactataaatttttcttaatttctgtattataatatctgctcaatgatkatcaagagtttttctttgttttaaaatatacgaaaactaagcattagtattgtttgtgatttaatatgccccttgccacctacaaaattctagcaaaacacccactagaattgagaggcttaggcaaataccaaacatgcttttttattgagtgacaacttttttttttttgagatagagtctcgctctgtctcccaggctggagtgcagtggcatgatctcggctcactgcaagctccgcctcccgggttcacactcttctcctgcctcagcctcctgagtagctgggactacagactcccgccaccacacctggctgattttttgtttttgtatttttagtagagacgaggtttcaccgtgttagccaggatggtctcaatctcctgacctcgtgatctgccctccttggcctcccaaagtgctgggattacaggcgtgagccaccacgcccagcctgaaacacaactttttaaatgaaccaccaaccaaactaaaatagctagttaagaattttaaccgtgttataaaactatattcaaacctatattctaaaacttttggtctagaaatcaacatattttctgaatcaagctagacccaaactaagttacatattagagcaatcatgtcatttcttattataatttgttccaacatatatacaatttttttaaatgcagaatctttcagattatgagactgattaaatagttacagaaaaatttgaaagtttatgttcaatgactattaaccaatcattccataaggcagaatccatgagagttcatgagtgatctgttctatcaccctgatgagacagtttttataagttattcattgaaaaaagtcaacatcacagaaatatattggccagaatactagcaaccccatcaggcctccacttttcagcatcactggggactcgtacatctttggaacttgcagataaatgactgatgctaatcattaacccttgctgctgaacatatattatgtccgactgcagcagtggtggatcctggatttgggctgaggggtgactgctttcaaatctcttacaggagtgttaaaataacataattcaaatattggttcataattgcctcaattataactacgtccctcaccacaacctttctccatccctcagctactaagggtgagtggagataatttctgctctctacctgctttcataatgtaaatctttaagggcatgcctggttggtaatcatacagggattcaaattcttcctgaaagtgagtattccctgaaagttacaatgatgtcatattactcttatgagcaatggcataaggcagatagtatttcatagctgcaagagatttcgaagatacggttagttataataaaaaccagtcttcagataggctatttattgcttttgccatgatgttgcaatctgtgttctcgtgtgtaaagaaagcatagcacactcgtgatttattaaagttttacccacattcaaattttagaatttgagttatgaaattgtatttaaaataatttcttaagttattttgcctctaagaaataatgtattagtttaatacagcttccagatgcattcatttattcagttaacaggtagtttttgttgtggatttttaaaatctttaaaattattttagtttcttcaaacaaaaatattaggcatacttctaatatgcctaatctcttctaatatctgcttttgatgataccatgtttacattgacaagctgtgataagcattacattattttctcagtagatactctttctgaacccaaatgaaaaattgctttaatttacaatttcaaaagcatctaaagaggaaatagactaataattctttttttycccttaggtattgcagattccgtttcttctatatttgtgtgacatgttgggcagatcaagagacagctacaaaaatgaaggttttcataatgcaatgtaacatagtacttcaaagtattattcaacttcaagtttcagcaactacctacaaaagattctaaggcctagtagtatttaaactaagtttcagaatgttcccttcttgtagagagatggacaaccaaagtcagtgggacaaactccagcacagaagcctgcgaggaagcctatggaatagtttcctgtcctgagacgaaattcagattaggagatattttaggcccctgcaactggggaaggctactgtttgtttttgtttgcttattatttatttgtttgtttattgtgagatatttcaggtgggatcaaagaggtcataagaatttattttcttttgtggggtgtaactactagctttagattacccctatacacaagaatggccaacctaaaattatgtgtgtcttgtacagttagttatattagcagccctctgagatggcgtatctatcggaaggatttcaaacaccaattgctttacctgaacaaatggtgcttaccctttgaacagcagagtgaccaygtagaaggaaggaaaagggcaaaatcgcttcagttaaactgaaattaaatgaacaataaggcaactatataagtaacttctagtagcattgcctgagagacaaattattgtttgataattttcattgtgaataggaatccaatagatcatattgcttactttgttctttttatactatagaataatattttgttctctagtatatcaaaataccaaaatattatctcatattttctccctctttctcttactcttaccaagttttcctggtggcttggcttccctgactaaagaattaagtctcatttttactttccatttctattttcttaccacttggttggctccctttgtctctgtacctttaccaacattaggatctcacctctttcttcctcccttaattcataagcaccactcctatcaaagtcccatctcttaaccctgggtatcaaacaaactgtgagttttccagaatctgtttcccagttttcccctcagctttcctggtctcccatcygaactgcttctttgtgcacctcttgttctttctcttggctcccagtcttgattcctgtgatcactcttgcatcactaattgcacaagtgatttcaggtgcaattctgattakcctgcgtccacacagtgatcgatgatcctatgtgcctagaaaggacactgtgtgctgctcatgacctgcaacaggaaaaaagccatttcttgttagcagtgtaagaaccttagagcaaaggagttgaccttctgattgaatataagcacaaccatattaaatgaatcaatacaagaaaattatttctgatactatgtatgtacatatttcttctctaaaatgtatcattcttttctaatgtatatgatctaacaaaaatgaaacatgaaatgcagtagcaaccactaaaaaaaaaaattcaaggacatctaactttttctctcacttttgccctttgtttatccttccctgtgattagataaacaaaataaaaaacaaaatgctgtatttctcttcttacgccagtcagaaccaatccgaaaagaatgtgtgttgactcaggtttggagttatttcaggaagacagatattgaccttttaattgataaatattcttattatcctggaatgccagaaaagaactatgtcctgcttgtctagtttgtattcgctgactttctatgtgatatagatgcatttgtaatactctttttcaagtgctaaaggatttctaaaatttcaaactgattaatatgtttctgctgttctggattttgatgacatttacaataaaacaacctacatttgactttggtttaaaaagaacctcttcttaagtgtatggcttacattttgtcaacacggtattaatgtgctttatatttacagttttctcagctctaaattaatatatccagcttttggttttctccataggcactttaacctcagtgtttccgaaactccattcgtcatcctccctaacttctcccaccacccccaacaaaaatttcctttacctctaagagcctctattttggttaacagaatcaacattatggaatcacccaatcaataaaattaagacaaatcctaaacatttaagcaggtcatctgcaccttggtaacccatcaatgaattacctacctcctgtggctactgtcatttcttagttgcatgttctttagtgtcatttatctccattattcagtagcctactcattattctctatgtcccttagtccagacccaaagtctggtgattcagattgatgttcttatagtccatctactgtatttcccctgcatttacatttctcaaagacgttatcagtttctctgttcacaaccgttcaagggctcccaatgccttatgataccatgtgagctcttttaagtgagttttcacgaagaagcccctctctaccttttcaaccgtgattgctgctgtgctgcatagtttgatcactcttatgctgtgatccagccataacaaactacttgaagtcaaagcaacaaaatcctcacctaataattagaagtcataatgaaagtcatcaacgtgtttctggatgtggtttcacaaagatctcaaagtgaatactaaattagcccaccttacagtgattttctagcccatttaaaagttataaagtgggtcatcagcactagaagcaagtgtgactggggagggtgggaacttgcagtctaaattattttgatatttacatgaagaatgactgatatatcctttgataaaactcttgcaacttctagcttagtcacaccaagaaatataggtgtaaagaactaaatataaccatatagtctatgatatggtttagctatgatatggtttagctgtctcttaacccaaatctcaccttgaattgtaataatccccacatgtcaagggcagggccaggtggagataattgaatcatgagggtggtttctcccatactgttctcatggtagtgaataagtctcacaakatctgatggttttataaatgggagttcccctgcacaagcactcttgcctgccaccatgtaagacatgactttgcttctcctttgctttccaccatgattgtgaagcctccacaaccatgtggaactgtgagtccattaaacctctttcctttatgacttacccagtctcaggtatgtctttattagcagcataacagcagactaatgcaacaggctaagaagggagttacagtattggccagggtgattgacctggactatgaagacgaaatcagtctactactccacaatggaggtaaggaagagtaggcatggaacacaggagaacccttagggtgtctcttagtattgccatgccctgtgattaatgtcaatgggaaactacaacggcacaatcctggcaggactacaaatggcccagatacttcaggaatgaaggtttgggtcactccagcaggtacaaagccacaacctgctgaggtgcttgctgaaggcaaagagaataaggaatgggggtagtggaataaggtagtcatcaatagcagcttcagccatgtgaccagttgcagaaatgaggactgtaattgtcatgagtatttcctctttattttgttgagaacatgtttgcacatatatatacttgtactaagaaaatatattcattttatttcctttatttttcctttatcatgtgatgtaagatttgttgacttcatatcagcatttaagtgttaactttaggtaatagcatttggattggggattggtgcacttccagttgtacaaaggatagctgtattgtgttagrtgtaattatgaccttattattggcttcagttgaagattatgtgtgatttcaggagatgtggatgggttcaagttgacaaagttgtgatggttaatattgagtgccaacttgattggattgaaggatgcaaagtattgttcctggatgtgtttgtgagggtgtttccaaaggagattaacatttgagtcagtggactgggagaggcagacccaccctcagcctgggtgggccctgtctaatcagctgccagtgtgaaaggaggcatggagagaacagacctgctgagtcttctggcctccatctttctcccatgctggaggcttcctgccctggaataacagactccaagttcttcaacttttggactcttggacttatatcagtgatttgccatgggctctggggccttcggccacagactgaaggctacaatattggcttccctccttttgaggtgttgggacttggactggcttcctggcttgcagacctattgtgggacttcaccttgtaattttgtaagtcaatactctttaataaactccccttcatatatacatcgatcctgttagttttgtccctttggagaatcctgactaatacagtctattaaaataatgataaacgttgacaaataacatttacaccaatattctaaggcactttggtgacagaatatctattaacacatgtttytcctgggaaatagcaaagcttataaaataagtacttttatccccagatggataggaaactaggcttcaactggtgatagtaccagatagttaataaatggcagagccagaatttgccctcgagcttgttgatttcaaagctagtgccttttagccaccatgccatttgcctctgtattatatcagcctagccaccatcagatactgtgtatacacacatacatgagcacacaacagtcatggagacaaaaacaattatatgtaattctgagacaaactagatgatataatccttataagaccttataagaaaaaacttgcaaatgaaaccaaagaatagttcaattccatcaagaacttactgcttgctagtgataatcactctaggtcaaggttgacatacattttagatttcttaaataatattatgtacttcctcccataacaaaaatttaagttttcccaataacctggccaagctagaaaaagaagactaaaactcatgtctgatctaaactcttagcttagttaatgtcttattagaaatgaactgggtcactgtccagtctgtgtactttcttctggaaagcacatcttctttgaggggactgttccttgcttttacctcagttctgcatgcattagagttcactccacctcccagaccacaggcatgggagctgggggaaagagaagctttgccctgtgtgagtctgatggtgctggaaactgggacccagcctgagacagaagctgttctactgcaggaaagaataaagccaacacctacagagaagagatgagacaaaaaagatctcagaagagtgttccaggaatatagcactccaggaactggacccagtccttgtggcatcagagttttcaggctcctctttcaaggctttttggacagtgttcatttgaattctgcaagctagtaattcttcagtatatcccctctagacaaacttcagatagatttctgtctttggtcattaagattcctaacaaatacaatcaatatttcaaaaacaatacagggagaaagattaatactttattattttaaaaattttgtttgaaagcctttgtacagaataatataatgtactgcataaaatatttgaaatagatgaagtttacaagtttataaagatgaaacaatgagatagtgattacattaagtggttacattaagtctcaggggaaactgaatttttaataggaaaacaccctatgtacaatgttactatttaaatgtattctttctcatcttaatgcttagtcttgtcacaaacaagaggtaatcaaattgtttctagaattaaatcagagcatcgtggtgctgaacaatatatgcatacatatattcaaactgtatttatgaaaatccatagaaaataaaaaataggctgtgaaaccagtattcttcatagattttgcagacgattttaatctgattcatcactgctgaagtaggagctatcacagtattctgctgtatatagaaatttgtgaatggttgggttcatcttcggtatccagtgtcggggaatcaggtatgttgaaagattaaataaatctacaaataccttgtacctatcactggaaaaacatacatgaagatgtgttacattggttgacatgaaatatttaaatttttcaattagaaaatttatttctcagatattttccatagttagtattcaatattataatatatattgcatgttgtatatatcatatattaaattaggtattatgtagtattagtattgattgtctgctttttattccattttcaaagtttatgcccataaaacagtattatgtgttttagaacagggtgtttcctattaaaaccgagagtcttattgctgacaccttcataaagataaagatgtgttctcatttcctacttctgaaggatgctatgcaaggtaatacatttaaagcaaacagtcttagatgctcatttggaaatatttccaactgaaaagatgccaaataactgccctgaagggtttaataaattgaaatgccatcttagactcataataaatgtccatgaagtagttttaacactaaaattgcttttgtgtggttagtcaacaattttaactgttgcagttttatggaggaagaacatttgcctttgaagttaaataaatctgggttcaaattctggttctatcacctacaattcaaggacctttgacaagttgtttaaacttcaatgccccagtttctaactctataaaatgaaaactttagtccttccttttggtcaggtctttttaaaactgagataacaacacactagagatgccatttgtgttcattattcccaccacccactgatgtgtgtgctcatttggtataggcagttatcaactgttttgtgcttacagaattcatttccagggacagtgaaaatgtctaaaaatgatgaaaatttaaacctgtgtatttcagaaaccaaccaatctggtaataacagtagggacgaaagcaatgtgctgtaaagatttgaggtggggctaaatgcaaatgtctaatttattcttgaattgattcttctttttcaagggaccacagaagtttttcagtttcccgatgtatccatttgtccatttatctrtgatattgtgaatatcaaaataagaatgtacatcccttagaaacctctctagcatattttaagtcctcaataaatgttgatctctttccttgtaaacactttaaaaggggcactctctggagtagatggaaatagttttataatataaaatagtcatatcagaaaacaagacgctactttaactgtgtcatttatctagccaggaagacattagtagaattaatgataaatgttttagtctggtcaaaacttgagccacaatgagttgaagacttttctgcctggatgtaagcactgttaawccctttgtgtcctcacatatcatgcagccattgataccatatcccttttcatacaggatcaaaacagtgaaagttcataattaaagattttataaaattaccaccaaaagtctgaactggaatattctaactacaaacgtgttgttagtagttcagacaggagcaaataaaatggctttttttagatarcaaatgtataggtggagaaacaaattgttggtgactgccaccaggaagaaaggagaatttccccacctacctcacagttgatcgcaggtagtgatagcctgaggaaccaccggtgccagctttgctgcccagcattctgtgcaccatgcacacatggttatctaggcaaacatacaaatttactccatggatatttttccaccattagttccacaatgttctaacaatgaggggttggtaatgataattgcttctgagaaaatgttgacaactaacacttggccatatggaaggctcatacatgagagccagatgagactgtgaggttgcctagcgctccacttgcttcaggctacatgcatttcactccatccttcactgcatttagcccatggatacaatagaagagaccaggatcataatatgactcatgagtccatgccacctttgcctttatggggtccttcatttaaaaaaataaaaaaactattaaaattaaaaatttaaaactgcattggcataatggcaaataaattactcttatgtaataaaacttttatgacctaaagtttaatttttcctttagattttaaaataaaacattttcgtgagcccccaaaagtattgtgggccttaggtactgtgcctagtgtgtatatgaataagttggccctgggagagagtgatggccaagctgatttgtataaaagaatgcacccacacacaaaggagggggaaagagagaaagtgggcaggagggcacacagaagaccaagataaagagcacaggaacagcatgtggggaagcaacatggggtgagtgggaaggacttacatctccatttggtcatcagtgaatctatgtccataagagaagtcagcaactgaaaaggcacctggaacctaggctcttccctaaaggaaaaaaagaagaaaaagaagaatatattcaagtaaatcgagtgtgttaggaggagcatgagtttgacaatcagttggccctggaaacaaatgtcagctttgcctgtgaggagctgtggcagctttggcttattctctcagtctcagtttctccatctcaaagatgaaataatactactcaacttgcagtgtttgtttgaagcctagaaaagtccatgtaatatacatgaagtaatcacctagagtcacacctaacattggttcttattaaaagcgagacaggtgcactattacagatttcccagccgaaaataatcaaacacttctaggcaaagatattaaaacacaaaaggaaaaaccactttttatttcttttcatctatttgtttttttgttttgttttttttgttgttgttttgttttgttttgtttttttacatctatttcttcacctttctcagcatattttctagttaggacacatatgcctaattggcatacatttacttgagtttaggaaaaaagtcaaaagattttgtttatgttgccattttgaagaaagacttgagaagattttaaaaattaaatacacagaagcatgacagcctgtaaatataggtatttttttactagtgtgatgtttattgttctgacacatttaattcatgaaccctgaggatgggaccttcatacaatagagtaggagtgagtcaatatttcaggaatacttcaaactttttagacaatgaagctaattttacttgaaattgctgaataagtggtacagtttgcaagttattttcacttcatgcattttttattttcttaaacaggaataatcttagagcattgtttaatgatagaacacatttcatgagtgagtctctgagagagtaaactggccatttaggacacttagtgttacatagtgctttttagtagtcacgcttgtaatcccagcactttgggaggccgaggcgggccgatcacgaggtcaggagatcgagaccatcctggctaacacggtgaaaccccgtctctactaaaaatacaaaaaaattagcctggcgtggtggtgggcgcctgtagtcccagctactcgggaggctgaggcaggagagtggcgtgaacccgggaggcggagcttgcagtgagccgagattgcaccactgcactcccgcctgggccacagagcgagactccgtctcaaaaaaaaaaaaaaaaaaaaaggatatttgattaatttgtgtagtgtttaaccccttttaaccctgttcagggaaaaagttatgcctttactatttaaaagaaaaaaaaagggacgggggcataaaacttcattactaattatcttccaagttttctacaaaaactaaattactgcattaaactatgattgtaatttttaggctttatactggacatgttatccatatccacccctcaattttaacttcagtctctcttcggatttgctttacctgtaaaaatatatcatcaatgctccctgaagtgctctgtatgacagccgtctttcacctgcaaaatacatactaaatttaaattttttaggtcatttaaggtaattttgtattaatttggcatcgtcatcttaaaaaatttaatggattacatgtgtttagaaatcaatataagtttcagtttacattttttatcccttaggttgaatttgtaaacatatcacttaaaatacaattttaacattggattttaaaaaacaaactaaaaatgtacatattttaaattttcaaaaccttcaaatagcatgttaggaaaacctgatttttctagaaaacacttgactttcataataaaattcattttccgagtaaaagaatatgtgtctttcatttcaaaaaagtagtgatgtgttataagcatcatttcaaagtagttttcattaattcacttgacattagttaacttgtttttaatgagcacaattatgtaaaatcatacatgtgtgctctaatgaaagactttctccctgctgcagcgaaacaagattttgctattctttactgagatttgttttttttagaaaacagaagctaacaacctttaagcttataaaacttaataccaatttcacgtattgctatgtttcgtacttgtgttataaaagttaatttttacttttattctgcatatttccaaaaaggtttgggatgcgttacaataaaagttctaagtcaaaatgaacacaaaagtttagaaatgaaagtactgattttatggctcaataaatttcaggaactaacagctcagtactaattgtgccgaaagtctaaatgtatgcttttcctggtatcttggtcagtcaagcagatttgtatgaaagaactcacccacacacaaaggagggaggaagagagaaagagggcaggaacattccaagcccagagaacacataaaaagactctttgatgataaatccaaataactaaacttagctaataaaagaaacttagtatggctggaccacatgaatatgagatcataaaaggccttatagaccacgttaaagattttatcttaattctaaaacaatggggcgacatcaatacttgctctcacggtagctattccttccttttcttacctctaccatagtgtttactgttacaatgatttgtcttcatttctgtccctattaggctgtgaactacttgagaaactatatgcaattcatcttgatatcccgtatatctggcagagactataaatttttttctaatgtttttcaaataatctgggcatggaaacccgttaaaataggtttatcaccaaaaacatttactccatttttgtttctatcagtagaatatcaattttcattctatttctcccaagtaaggcttgatagtcttataaaatgatgtcttgatctcatattcacacattccagggaaaagattcataaagtaaaaatacctgcctttactaaggagatgttcatgacgtttctcatcaaataaggacagtagcacctctttttgcttctgaaattcagccacctgttcctctttttcttcagactcttctttagcctttaggaaaaatatggcattaatagtcctgagagagaataagtagattgatattttagaaaactttgcttatgaggaaaagacttatggttgcagaaatgatgtacttttaatatttactgtatcttctaatattactatttggaaattatgtcttatgagaaggaatcttccacatactcagtggttctatccttttatttaagtttaaatgatttctcaatattaaatattatcttcataaatataatgagcaatggactcagatggacaaaattggagataactaccagcagttaataatgatataattttaaacaagaattaaacacaggaagtaaggtaacttcacttagaaaaagttaagaattcctagtcagaagaactattaaacctattgaaattctatgttctatattcagtgttgaattctgtaaatacaatttcttagatatttctcactcatgttttattcattttctatctatctattgattggtttaagaaaattcttatttttctgcctacaacacatattctgcttataagccaattaattgagctggggaaaattatttaacccaattatttccaattcatcagaaccaccacactgtgtagtactaacctatatgcatattatttcaaattaattatttatttattcaatacatgtcatgctaagatgatagagataaaattgtgtgcaaaaattgagagtcgtgatattatacaggaattatctggtaggaataagacattgaacaaataataacccagtacagtcattaaattacaaccatagactatgctatatgtcataacttaaagtaataaggagtttaggaaagacctttctaaagaagttttcctcgagccaagatcttcagagtgggaaggagttagttggggaagaacattccaagcccagagaagaacacataaaaggactccttggtgataaatccaaagaactaaacttagctaataaagaaacttaatatggcttgaccacatgaatgtgagatcataaaggccttatagaccaggttaattttatcttaattttaaaaacaatgaggtaacatcaaaaggctttacacaaaagggagacgtgatcagatttgccttctgaaaagattattcagactgcaatgtggagactaaattggaatagaggcatactgggaaggtgggggagcacagttcagatattattatagtccaggtgaaaaacgatggagggttgcacttgagtggtagtggtagattaaaggatgatatttgagagctaataggtaacattggtaggacttgatgatagcttgaagaagtggtgaaacaagagggcggagccaaggatcactgattgataagagtctgacgacagcctagatggattataggagaaaaaattctttaatgcagagaagacaatgttggtacaagagtggatggaaggggaaatgttcaagtttggttttattggtgtgtttttgagaggaccaggaggaaatatcaagtaaggtattatatacatgttctgaaatctaaggggatatataaaccagagataaatgtttgagaattatggtggctaagtagatattgaagcagtgggtataaatgacaccatctaatgaaagagtatagagatagaacagaaaggatctaagccaatggactacaaaactctaccatttattggtctgagagagaaataagagcaagtaaaagagatagagaaataagggccagagaattagaagcaaacataatggtatatactaaatccaagagaaaagaatgttcaagaaagaataagtagtagtcattagtattgaatgtttctgcgaggtcaactaagttaagattaaaaatggccattggatttatgtacatgaaggccacatgagaatgatggtacaggaagacagcttgaagtaagctcaggattagctgagagataactattctgacttctgctttcaatgctttacaagtatttatttaatttcctgttcataataatcttatgagttagatattcttatttttctattttgccaatgctgaaagataggctaagagaggtgcagtcacttgttctctgtcacatagttgtttaagaagtggaagtggaaatggaacccaagtagcatgacttcaaag

SEQ ID NO: 97857 - DNA, 22828 bp, Homo sapiens
  misc_feature (1)...(22828): n = A,T,C or G
caatcttggggtctgaggacaaggtgagcagggagaagggatgaaggctgcctgggaagccctgggggcctgtttgctagagctcagagcctatatgggccaagttagagggcatagcttccaggaatggatccagggtagaggcccctctcagcagggtgccctgcccagatactatgaggtttgagccagagatgaaggccctgagggagcttgagtggggaggaagaggatatgcgtcttgggcaggccctggagaaggataatcctgccagtcacgtcacagagaagggcctgggagagggcagttctggggacctggaggatgggctgctggctctagctctgaagttcctaccttctctgcagagcaagatggagaaggggcctgtggtccagcagctggggtggaaatgagaaaagtaaggggtggggaactgcccctgtgcacctcagatttcctgtgataggctcatggaggagtaattttttttttttgagacagagactctgtcccccagagtctggagcgcagtagggcgatctcggcctgtctcctgtgttcaagcaattctctgnnnnnnnnnnnnnnnnnnnngcctcctcttaatatatcttgccctttgtccactgtcgtacttcctcccctccattacacctcctctcccacctacctctctcctacatcttagcccccaatcacatcaccccccccccccgcaccctccccgtctttctccctcccctctctatctccgtaccatttccctctccaattcttccccgacatacccctccttcttactcctcactcatcgtccctcgtccggttccctttctatccatctccctcccccccccctcttcccctacctcccaccgcctctctccaaaaaaaaccacctcttgctcttttctatactttcctccatccagtcccccccccgccttgccctgccaaagtgctgggattataggcgtgagcctcggcgccaacctcagggagaagtaactgatatttctattttaaagtggaaggtgggccgggcaccgtggctcacgcctgtaatcccaacactttgggaggccgaggcgggcagatcgcttgagatcaggagttggagaccagcctggccaacatggtgaaacctcgtctttactaaaaatacaaaaattagcctggtgtggtggcgtgcctgtagccccagctactcgggaggaggagaatctcttgaacccgggaggcggaggttgctgtgggccgagatcgccaccgcactgcgacctaggcgacagagtgagactccgtctcaaaaataaataaataaataaataaaaataaagtggaaggtggagagatggtttctatgctatagtttcaggcagagaatgtggagggagggaaggagagaaggttgcgggaagccagggacaactgcttgcctgggccaacatcccctctctccccacctcccttctcctatggaaacttaagctgccgcagggcccagcggagctagtccattagctgtggtcagcaggggagtgtaggtggggagggccctctctccctccaggtcttcttgccaaatgaaaggcaaagcgtttgctccctctactagagtcaaaacaaaacaaaaccataaaaacctccacacgcatttttaacacacacaaataacataacttctttcctctgaatggtcgaagctgagcaacttggaggtgggtgggtggtaggggctccgtgacccactagactagactacagagggagtgggggaggaggtgccttctcaaagcactttccaggttaaatccagcctcgggaggagggagtggagagagaatttactctcccccaacttacctccctcagaaatgggggcaagtggagggtcagctgagcagagagggaggaacagtctcccgagatcccggggatgggaggattgaggggaggggtcccggaaactcccaggggaagtgggttaaaagaagggccgggaagaagggtgggacgccctccactggaaaggggagagcgttctagttaatgctgaggggaagttggggacctgggtcaatcggagtcagcgtgtgtctgtctccatgaaggggggtccgtctctccccgccccaggcgccgtctttggtctggagaagggtccagcctggggtcgttgggggtgtgaagggaccaatgagcggtctgtccgctcagaagggtccagagagagagccaactggaactacacccccgctcccccttcccccgccagaacttgggcttgtcctgtttgacgcacccgcagaaaggggcgggaggggtactgacccgaggagcggtcccgcgactctgtactccctgctgcccagtcccggccaggacgctgcccggcttagctggggcgcccctcgagaccaggatggaggtagggacgggctagggtcccggaagggcgcgggtgtctcgaaggagccccacggggtgggaataagtagagcgcagcctggggtctcctactgggggtctcgagctgggactgcagttcctggagaaaggagggggagaggggttcgtcctgggcttgggcggtgtctggatccggggtgcgtcccccctgctctggcctgggcagcgccgcctgctggcagggccggaccctgcggccccgggaccggacaccaggcggtgccgccacctggagggcgcgtgtagccgccgggccagcgagcccaaggggcgctgcagcgggtcgagaaggagccgcgtcgcttcgcctcgcccttccccttcgcggagctgagacccgctgcaccagaacccaggagaggggggagacggcagagactccgcgggcgcggggcgatcccagctgggctctctccacagggatgccgatccctctggagacacagagccgagccggggaggggtggatgggcgccttgacgcttgggcgggcgagcagagcaccagcactcttgcttttcggtcctttcccccgccgaggtcggggtcgcagccgccgccggaggatgggcggccggcgcacggagcagggccgggagggagcagaagcttccgccaagagctcaggagctggggcagccctggagctcttcctgcccttctgcccgcggcggcggaaactccagagtccctactctttctcgggaggactttagggaagaagcagagcggcaggggaagccgaggagcgagggtgcgacgtggggatggaaggacagtgggaggcacacggaaaaacagaacgaggaccttagacaggagagacggaagtggagagaggctgggctgaaaggcagggagagccagagactgacagaggcggcgagaaaggaagggagagggagggagggaggagggaggagaaagagggagggaaccaggggagagggaagggagcaggcggcggagcccggcgggcgtggggcgaggccaggcgtgcaggcgggagcagcgtgcagagcagcggccgggttttgctcccgcctcggagcccctggcccgggggagggggagaggccgctagcctggtctatgtctttttctgactccagtgcaaccttcctgctgaacgaggtaaccgtggggggggtgtggggtcgtgggaagggggttccccactgggtgggaggagagctccgctccaagctaggaagggggcacgcgtttgggggagactgcaccgatggggaggcagggaaaccggaggaagtgaggccaggggtggaagaggcaccgggttagagaggagggagcggccagagctggcagcttcctagtactgggattggatgagaggagaggactgactgaggagccagaaaaaaaggggctagattacaagaagggctctgccaagctcccctagcgcctgtccctgagttccctggcagcctagcagccagaatggtaggggcctccacctggtccagatcttaaaaactgctggggaggagtctttaagtcttcccagaaggcctagcttctgtctcagtttccccattcagtgcccagggactgggatctgcccagcttcctggtacacttagaggagaagctagaatatattctgaaacctcccaagaaggtttcaatatattccagctcccaaacctgattattcaggcttttcctcttatgtcttgcttctatgacttgggtacctgccagctgccagtctaacaactctctcctagaaagaatcagcaggaggagcctctcccctgatcctttattgccctcagctctctccctttatgcccagccatgaaaaagaaaagaggttagggctacatggacactgacaggcacatgtcctgtcacaggacaagaagtcaccaagttggtattagaactagagtaggcaggtgtgggtgagaaatgaaaggaacattgggtagcaacccagagatatgagaagaaggagggaagctctgaagctactgcaggacccaggggatgggcccaggtatgaggagcttgaacccatctcctggggatggttggcatggcaacacatgcctcaggagcagacttagacaaccttgtcgcaggagattacaaggagtgtgaggaaggagtgctgccgatggcagatccgctgttacctacagccccaggaccttctgtgggtggagagagtcccaaaaggagaggccaggagagtggatgcagggatgggaagagaaacagctgcctccaccactgctttcttcactagagccatctcccaggagaagagcaccttgagggtcttactctttgacacctctccaggcccctgaaagaaggaattgaagagaaaggatgaaagagggggatacaaggaatactgcgtaactgggtgagggcacaaaagtgggcagtgtctgggaacttccaatacagaagaatccagtatatgaccaaaccccagttggtgctggactcaggagaggagacagtcccttcagccacaggggctgcaacaaagttgtttgtcaaacccagcatgaggaaggtgctgggcagggctgctctgggccacccacagtagacagactaaagatgtcagtctgaagatgcagctcttctttgtcttgccaagataacaccgataagtgacccaggtgggaagccacttggtttgggtgggctttctctctcccatgcacagtgctttctaccatagatcttactaagccatgtcagagttttggatttctgattctcctcaagccaaggagggatgagcagattgctgaactcccgggtgtgagaaattgggaaggaaaaggactgagctcagggccaagagcatgggcaccaggaggcctccaagtgtaacccctgtctacgcacatcctcctcgtggggcacaaaggtaggcagtcaaaaatcaaagaaggaattttgctcaggagatgaaaaaaggaaagagctcaaatgggtggatctttggggaaagtttcctcaagataagggctgcggctctcttaccccaaatctcaatgctcctgtaaaggagactgagtggtgcagagtggtacaagcccttctgctaaggggagaatctggccttaccctagtgactccgaggagactggccctttcctctcccaacccgagtgtagccaggatcccacccacaactatccccctacctccaccctctggcttctttccccttccctttaggctcacctaaaacagcccctttctgccccagttcccacggatgccttggcactgtctggcacaatccttggcagggaagtggggaagggaacccccatcctggcaggactaagacaaaatctatccgtgcaacaggtgtggggaggcctacccagctcacggaaagttccccccttctcaagggttgggcaacaccgcctttgccgcagcgtccccgtactgagggggccgggcacctgttggggcaggagctgccgtcctgtcattagcctgggggcaccaagcccattcctccccgggaycactgcggggtttgctttcggagcctccgggacgcacgggcccagacccgccctgctgtcgcctgggacccctcccccgtctgccgctcgttcccgcgcctcttctgtctcccacggtctccccattttcctgtcctctccgtcctccctctgcctctctctctccggtttcctcgacacctgcgccctctccagtctccgcccgggtcgcgtctccctcgcggtctcagcgccccctccctcccccgccgcagccctttgtttcccggcggagtagttcctgggttgccgagcgtctctgtctccgcatctctcctcgccccgcctcctccctgcctggatccgccctgcccgcagcctctcctccccttcctccccgccgccacggccccgtaggtgctcggggacccaccttccacctagcacgggttcgttcccctctcccggcctggcccgggctccccggtggccgccgccccctcgccgcccccgccttctcccggggagggggtcaggtgggcgggcactattgttgtaggagccggcgccagattcctcagccgcgctcggggtgggaccggctgggtttgggggggtggggtggggggagcggtgatctgagctccgagcagctggtcttcgcggctcgctccctccttcgcgctctctcgctccctgccgccgcccgcagggctgcggggctcggtggcatctcccgggcgcggcccgcagtccttgcccctgcctccgggccgctcccgcccccggcgccgctcgctcccccgacccggactcccccatgtatgacgactcctacgtgcccgggtttgaggactcggaggcggtgagtgcccacgatgagggtgggggcggggaagttggggtgacacctcctctcccttcaaccctttccccggttcaggactttgaaaaacgcctcagtggcagggcagggtttgtaggggggcgctctaagaacgtggggagatggattttcatgccaagcgttccccagcgacccagactcagaccctggggcatcgggtgtgtgcagagagggggcagtataggggaagggctcaagcaggtggctccacggcccaggaaagaggggtgggagaaggcagggctggaggccgagggcacagaggctctggagagggaacacgccatgtctggagttccaaattctggatttctggggtctgaacacaacagctaggagagccgccgaggtggttggggaggcagacattctagacctcttgtgcctcaagcaaacgacacatcagggagctgagaggacatcagggagccaggggccaacctcttcagacagacggatcctaaaacttgaggagctccattattcccttccaccccctccatctctgcgcattgcctcatctcctcaccctttctctagcccagtttctctcccaggctgaaacctgggcgcccagcacatgggtaggccaggtgactgagccccatctattccacagccccctgctgaggcttcctctgcagcgggcatcctgagctcttgcccagcatggagggcctggaggtgaggccagaggagctgagggcctggggatggagaggaagcgctttgctcagagaaacaggcaaccgataaatatttaattctcctctttgcttttatctcctgacccactgagacaaatcagctcattaagcagtgattcccggagctcagacagcagggagagtgcctggaaagatggggcaagaatgcggagcagcttctcagccccttggagctgacaactttccctcaaatgtcctgtaagaaggcctccttaggagtggaccactagatggcttggaaggggccccaataggttggagcacccctgggtcggaaagaggagttcatgttcaagtcttctcccatcacttactgccaggcccaggatagatgaatgctgatgttcagaataggcaactgtccttttctgggactggtctccttctgggcccaattctccatggggcctctggggctaattacattgccgctagatcagatcattttcaaggctctggtggacacctctttctgacagttgaagggacagctggtatagcccagggtgccaaggtgagcttgaaaacaaacctctctgtggggctggatggccctaggaggttcttcccatccctggtgagaaggcaagggctattgcaaggagcagactgacatgtggatggtgttggagggcagcctgctgacccattgctccctcccatctctctctggctctgatcaccctcccccacttccctttctcttgcctggctccttgctctccctgaggccccctctgaagcagtaggagggagatcaggctctaaataaatccaacggctcatctccctcctctccttcccccgtgccaggcaagagaggagctgcagcctgcccacacactcactaggcaaggggggcaccaccagggcactgtgccaactcctggcagctccaaagtactgaaactctggctattttggcgtagcagggtacaggaaaggtaagaccctagatcatgcttggcagggcagccctggcctccccaagtaatactggagcactagagatgagtgagcctggaggacttgggagtaatggagagggggttccattctgagcacaactcattaaatatttaggaagagatcctgtgattcccatcccagggtgagaggtcaggtaagccagatgcctcaggcgttatgattactaaattaggccgccagcggtgcctcacacctgtaatcccagcactttgggtggccgaggtagatcacttgaggtcaggagttggagaccagcctggccaatatggtgaaaccctgtgtctactaaaaatataaaaattagcccagcatggtggcacatgcctgtagtcccaactactcaggaggctggggcagtagaattgcttgaacccgggaggcagaggttgcagtgagccgacatcgcaccattacattccagcctgggcatcacagtgaaactccatctcaaaaaaaaaaaaaaaattactaaattaaaccaggcatagagactcatgcctataatcccaatgctttgggaggctaaggtaggaagatggcttaagcccaggagtttgagaccagcctaggcaacatagcaagatcctgtctctacaaaaaactagtaggcatggtagcgcatgcctgtagtcgtagctactcaggagacaggaggatcgcttgagcccaggagttcaagcctgcagtgagctacgattgtgccactacactccagcctgggtgacagagcaagacctgtctctaagtaaataaataaaataataaaaataaagattactaaattgggctgagagcctggagcacaggcagaaaaggtcagactcctcttttagcacagttctgggcctctgggaggtacccaatgtatctgtaccaaagcgagtggtcatctgccttgcctcctgcctcccagtctgttggcccctgtctggttgcttcagacaccaacatcccacagaggtttctcttgtgtcctaagacccctgggaaggaggtccctcaccctgtgcaaagattatttctggggttcatcccccacttatcctgctgccatccagcctcattttgttctcaggagagatgaggaacagtcggcggactactcttctgtaaaatgaaagatctttcccccttgtgctatcttcaggcctttggtctactatagacactgtctttagcctaaggctcgagagcctgggctgacccctagctgaacagccctcttgcccacggcagggtaggggtagagggcatggttgacagcaggtatgtgattttgccttcttctctgagagtctggcctctgctgccttccgtaggtggtcatgcccagtgagcttgagagaatgttcctctacctgaggacattctaaagccccttcccctatacacacacacactcctgcatgaaccccttatctaggcttatcccttctctctgccactggcatctcagaattgtgggaagtatcacttgaggcttctccccacagagagggaaaactgaggcaggaaacgaaagactccctttccctgacagaggaggaaacccagacattgtaacctctgggctcttgtctcaaagtccagcgtcccttactcatttgtgcctctccctcatggtcttgaggctgaactctgtgaccgtcaaatgcaccctcattgcccaagacctttcctatgggcaggactcagagactctccttgctcatgttaccccctccccacatccccggggtcctgctccgtagctaggttgcctggcactagcatagccttcttctagggctgatgtcccctgggcctgggaaaggactagggagatgtaggccaagtggtaggtgtggcccagcctcacctgcacccagggagacagctttgtgttcttggtctgtgtcttgtttgctgcccacacctggctagttgccccagcaggtgtggaaggaagaaaagtagggggtggggagagcaaaggggaggtaacttctaggagctggcagctttgtgtcctcctcttcaccctggaagggtaagggctcaccatttgggagccttcagagccttgttggagtagggaaagtggaatcttagggggcagatggctggatccccacattcaggactggtgctgtgccaaccagcatctcttgactgttgcggctggctggactcctgacaggcatcttaaagggatgatgtccaggctgctttgcaggctgctatgaacaagagggctgggtctcctggatccagaatcatctctaatacatcatcttcagcacacctcccttccctcggctcagaggacatgttagaggggagaaaagggaggaaagagagaagtgaaggctctattcaaagctgcagtattaataggcttgggggaggaggggcccagatctttgcacctatggattgggccagctttcctgtagcctcagaggcactggggcccttctcaggggataggaggggccatagggacccagctatccccttggagatggagaaactgggggcaatagaggcaacactgtaaggtgaggagggtgcctccatggcrtccttcatgccggagcmtgggagtcacagcctctttcccaacccagggttcagccgactcctacaccagccgcccatctctggactcagacgtctccctggaggaggaccgggagagtgcccggcgtgaagtagagagccaggctcagcagcagctcgaaagggccaaggtatactttctgggcatggggcaagacaggaggccaagctaggtggaaacctgcactcggtcctaagtcccaaggggtccttgggcaggatgtccttgagtgtgagagggtgtgtgtgatgggcagaggccacggccttctgctgttggggcactgaagctggaaggggtgcttcgagccttctctcacttgcactaatgggcaaattctccagcacaaacctgtggcatttgcggtgaggaccaatgtcagctactgtggcgtactggatgaggagtgcccagtccagggctctggagtcaactttgaggccaaagattttctgcacattaaagaggtgatcgacccccctacttccagaagcctctaacttcattttcttgctcttgctccagatcctaatgcttctgacttgaatcctcagtctaattccccaagctaatcagctcttctccttaacacacacctgtccacccctcatatctaagatctcatccccagggtctccatccttctgagacctggcttgggcatcagtctccatgtctgtcaagtgagcagttagattagctgcctccgaggtcccctgtgacagctgcaatgcctcactcagaaatcctgggtggcccgaacttggctgtcctttcccctggccccttctgcccaccgccccttgcattgcattcctcagaccagctcagtgactgcctcgctggctccttcacattgaagagccaggactggggcggggcgcttctctcaccaccccttcctgctccacctgcccccagaagtacagcaatgactggtggatcgggcggctagtgaaagagggcggggacatcgccttcatccccagcccccagcgcctggagagcatccggctcaaacaggagcagaaggccaggtgagagttgggccrtgagtcagtaaacacaccccaaacacttgcactgtacccacaggacacgtcaccatgcatgccatacacatgcatatccccctgaaatacacatacacgtatgcccagctctacacactcaacactaaacaaatctacaaacacacacacatattgcatgtacacctgtctcactagataaagcatatggaattgtgtacaattattaaataatgcatagaacatacatacacagagacacattcttctctctctctctttcacctccctttmttctcaggagatctgggaacccttccagcctgagtgacattggcaaccgacgctcccctccgccatctctaggtagcctccccccaacccacccattttggrtaggtgggtagctaagacacagggaaagaggggatcctgcccaagtgaactgtgtgggaagggtttgtggagggattggaaggggtggggagaagccagtatctcccctggggacggggataccatgcccccagggacctttcccccttcaccaactttaatcttgtatttccttttccaaaaagccaagcagaagcaaaagcaggtgagtcaaggaagggacctgggctggggggatcatggcttatggctctggggacagtgttctaggcagtcattgttggagggcagaacagagaggggagggagcccagaacctctggatctgccctgacgccaaccaggcatgagacaggcaccagggccatggtttctactgacctcatgtccattctgcaggcggaacatgttcccccatatgacgtggtgccctccatgcggcctgtggtgctggtgggaccctctctgaaaggttatgaggtgagaggaggtccttgaccccaaagagtcacctctaccaagcctgccacaggaagtccctagggaaagtggaaggggtgtgtctcctccgtccagggtgtgtatgtggagsgcattgactctggggccatgcatggggaggctgcttctctccaaaggggcccttcatcagtgccatgccttcccccaggtcacagacatgatgcagaaggctctcttcgacttcctcaaacacagatttgatggcaggtaagctgccstggcctgaggtggcctgagaaccaaggagaagctcatggcctacttccagatgcctgtagctagtcttctctaagggaagagttagtgggagctgagtaaggagaggctgaggcacaggtttagaagcaagctgtgattctccactcccaccccaggatctccatcacccgagtcacagccgacctctccctggcaaagcgatctgtgctcaacaatccgggcaagaggaccatcattgagcgctcctctgcccgctccagcattggtgagaagtccccaccrcctgcttctgtgcccactcaagtgccagtgagaaccttcctcctcccttttcttttttttgagatggagtctcgctctgtcacctaggctggagtgcagtggtgagatctcggctcactgcaacctccacctcctgggttcaagcgatcttcccatctcagcctcctgagtagccgggactacaggcgcccatcaccacgcccagctaatttttgcatttttagtagacrtggggtttcaccatgttggccaggctggtctcgaactcctgacctcaagtgatcggcccaccttggcctctcaaaatgctgggattacaggcatgagccaccatgcctggcccctcttcccttttctcttccttacctccttgtctttctgcccaactcctctacctgcccccaggattggcaagaacacacccctcctcctcaattcccattcctctgcctgtccaggcttsgatgaatgcccttttcctccaattccttcctgtccaccattcgggagccctcaaagcctgctggagtgagcagtgggcagagctcctggtgagcactgctgctgcctccctccatagcggaagtgcagagtgagatcgagcgcatatttgagctggccaaatccctgcagctagtagtgttggacgctgacaccatcaaccacccagcacagctggccaagacctcgctggcccccatcatcgtctttgtcaaagtgtcctcaccaaaggtaagtcagctgggctcatggaggaggcccacagggctatcctactagaatgtggcatgattctacttggtccctgcctggggcacctgagttcccttttcctgctgcccttaacacaactctgagtcatcctcacctgctactgatgccacaagtggaagaaatgcctagctctgcccgggctcagctctrcccagagtcctgagagactccaggcctagctctgccctccccgctcaggtactccagcgtctcattcgctcccgggggaagtcacagatgaagcacctgaccgtacagatgatggcatatgataagctggttcagtgcccaccggtgagtgcctgggtcagctgctcctgtgcccactcccccagggctgcggcagtgatagagatgggtggggggctgctactgaggggaaaccaacgttgcgccttcctccccctccccaggagtcatttgatgtgattctggatgagaaccagctggaggatgcctgtgagcacctggctgagtacctggaggtttactggcgggccacgcaccacccagcccctggccccggacttctgggtcctcccagtgccatccccggacttcaggtaaccatttccagtgggcagagatgctcaagctaagccagccaaggcactgcccctccctgcccagaggactgtccttggcctccagttcagcatgccaaaggattgtagaactctcagctctgctgtacagagctagcacagacgggcaaaggaacttcctgaggagagagggaatcaatcaatgagatggatacgtcagagattagtttcctaggggtcaagagaaacacaatctccaaaccttctcccaggctgccttgaaggcagagcctgaattttgcgggagtcgaagctccagttttctctctcggaagaggaaaaatgctccagcatgctttttccttgcactatttcctttaccggggaattgagagttgaggggggaagaatctcgcacctcaccagaagacaaggtgagrtctgtactgcctcactgagagctgttgtatggcccccagaaccagcagctgctgggggagcgtggcgaggagcactccccccttgagcgggacagcttgatgccctctgatgaggccagcgagagctcccgccaagcctggacaggatcttcacagcgtagctcccrccacctggaggaggactaygcagatgcctaccaggacctgtaccagcctcaccgccaacacacctcggggctgcctagtgctaacgggcatgacccccaagaccggcttctagcccaggactcagarcacaaccacagtgaccggaactggcagcgcaaccggccttggcccaaggatagctactgacagcctcctgctgccctaccctggcaggcacaggcgcagctggctggggggcccactccaggcagggtggcgttagactggcatcaggctggcactaggctcagcccccaaaaccccctgcccagccccagcttcagggctgcctgtggtcccaaggttctgggagaaacaggggaccccctcacctcctgggcagtgacccctactaggctcccattccaggtactagctgtgtgttctgcacccctggcaccttcctctcctcccacacaggaagctgccccactgggcagtgccctcaggccaggatccccttagcagggtccttcccaccagactcagggaagggatgccccattaaagtgacaaaagggtggggtgtgggcaccatggcatgaggaagaaacaaggtccctgagcaggcacaagtcctgacagtcaagggactgctttggcatccagggcctccagtcacctcactgccatacattagaaatgagacaatcaaagcccccccagggtggcacacccatcygtttgctggggtgtggcagccacatccaagactggagcagcaggctggccacgctygggccagagagagctcacagctgaagctcttggagggaagggctctcctcaccctgccaggaagcttcttaacatgtgacaggaccagggaccaggagcatggtgaagccaagtggcagatgggagccaacctggatgggggtttggggaaggagggcatgtgtagcagagaacttaggggggcctccttgcctttctcattcttttgccctgcatcctgtcatttctgttcttgtccctcatacatctttggagaaccgggctccagactttgttccctgactcatagctgccgcttgttaggttagggttagatggggagagacagggcacaraggacctgtctccccggctactcttgccttatggctctagtgtgtgacctacagagcatgctccacaagcccctgcctcacctcactgtcatcactaataaacatcatgcacagtccctccggcttctgttctgtctgtgatgcggcccaaagtctggtggagggaaagatgtgtttgggccgcccttctctcagaggatctgtccagcgggaaggggacaaaggcagagctggggaggcactccactcccaggcatccccactcctcatgcccaggtgtcaagagggagacatccagcagcacggaagggcttgtcctgggatgtggggaagacgcttggtcacggctttacagtatccttgcgccaggccaaaaaggccctagaagcagctacaacttgaactctatgtactaggccaactctttctgtggggtaagaagagcatgtgaacaagaggggtatggggggaggactgcagccctgcgttcctctcaccacagcctgatacagctgggtccacccgttctgcaccatcccctcccaggagcaatgggtccaactagggagccacaagcaaagctcccgagaccaggcgttgggcacacagcggcagagtggttccaactgcctcacctgccaaaatttcacaactgctttcctttctcacctttgcctaaagctccctagagggtgtccaggccagggccacacattacgcgaggctagagcaggggcggaagatgcattacagtcctgcgtggcttctgcatctcctctcaagtccacctacagactcaagactatcagcagagacccctctactcttctcttaatgtggctgtctctcattttccaagccaacccaccccgcacccagtggtgtccctcctgccagggagaagctgggaagtttaactagaactagatctaacagtcttaatattcatgtatttattctcagaacatacaaacttatcttctcagagaatagaaaacagagatttcactcagtgacaaagatggacacagccagttcaccgtgtccccccatctacttagaaaatcccctgggggaggggatgcctagagcatacagcaccccttggtgcggggctgtgcacaggtctaaagactctcaacttcctttaccatccaaacaggaaaacagctgtccagatgacagtaagattccactgtctgtaatcctcatggtgccaggtctcctggggcatctagggcaatgatgctactgcagtttatgcagttacacagtcaagtctgtgccaaaggaggtcccatccggcggccaggtttctgttcagtctggggagcaatgccaactggctgcccccatagcctggcatgagctgatggcccagtgcaatcccaaagcaaagaagggcagaactgggccaagaagctgtggtaatttgctctccctgcctccgacagcgtcgtcctctccttttgcagccccacacgcaggcctcctgacctgagggtctgggctagggagttggattgttttcctaagcccccatatcccaagagtgaggacctggaaagagggatgtgagggttctgaaaaacaggcatcaggcagctttggagatgccctcagcccacaggaagagtgctgtgtcaggcaaagatggtctcttcccggcgcttcttggtgaggatggtgcctggcttatgctgggcatctgggtggttggctagttcggggggacaggaagacactgggctttccaggatagcttgcttcagctcgtagaacacagcagagtcctcttttgtgaggaaggtgatggccaccccactcttgcctgctcgtcccgtgcggccaatgcggtggatgtaatctggggaatgggaagaacgtcactcagcatagcccagatgccctggggagccgtgtctgatgcctccacttctagaggcatccttcccaccccatctccaaaggcaggaatacagcacatgctgcctgaacctgaggcgcccacagtgccctctccaggtgcccatctcccctgtcctcctactgactgtggtccctaccacactaagacccacagctgcctagcttcattcttcacactcctgaggacacaagtgtcatcccagctgctgggacaacaaacccaggtaagataaaggacaggagtgcttctcatgggagcaagcaatcccagacttggaactgagggaggcagtaacagccttccatggacagcaccctgacttccagtgggacaccataaggaatctgacttcaccctggattgaagctgctttccctggaacttaccttcaatatttttggccatatcatagttgacaaccatagacacatcttggatgtcaataccacgaccagccacatctgtagccaccaaaatatccttggccccagccttgaggttggacaacgcaaactctcgctgctcctggccttttccaccgtgcagtgtgcaagcattgtactgttggaagaatggtgaagtgaagagtgagcaatgcaatcaaggagagacacaggagttcagaggaatgggacacagatgaagggagggttggagagagcagcagagtacgagaaaggaaaggaaacaagagaatgattgcagtgaaagaaggagagaacaagtgagctgaagagagggatgagagaaaaaggtgtggtgtggcagggacacacagagtaaggtcaaaggcaaaacagctgggagagcggtggagccagacagatgaaaagtcctcaaagagaattaggggcgagatcagggtagaaagcagggatcaagaagtttaaggaagttggagagctgagtgacagggacacacccctcccctcaagcaccagtgacaggagtaaaggacactgattatcagctcccttctgaccatatcacctcctctcaacgtacctaagcagttttcacctactcttttctacatcctcagactgccaggatatgggtctcaaacctttccctggctccacctcaccaggatgaagacccaaggcagctttggctggcattactgcagcagacagggggtcccagcaattgattccattctctttattccctcaaaccacccttcaccctggtcctaacttgttgattgctggacaggctaaagaaagggtgagacttgaaaggaagagcctagggggccctgctagattcagaaagcagtgccacagaggctagactttgttctcccctgccagacacacccccatcttctccagggatttggccaacacgtcgcagcccttcttctggttgacaaaaataatgatgggtgggtcaaagccttgctccaagattgccagcagctttttcctggaaggaagaggagaaaaacaagatgcataatacctcccactccaagtgaaatgcccaaccctcatctatgaacactactttcagggtctttaatgcccatgacattctgcccaagaaaacagcagctcttcaacacagcagagcaattgccctgccctgcacctgcactaaaaaagttctcagagccattttattctccaccctgtttcccctggctcagctgccctcatacctcttttctgactctgacatgaggaagaccttctgttccacacgctcatggggcttgcctgcggagccaatgtacaccacagcaggtcgccgaagatagctcctggccagacgctccaccgctgggggcatggtggccgtgaacatgactgtctacgaaaacaggaggctcagccctgcacccaggcaggaataatcatatatcccactgtcaccgaaggcaggtcagcccagactaaagaatctaaaatgggccacagtataggctttgatagccaccaccttagaaaatagtgtcctctgaattcccatccttcctgagtacctgctcatcaaggcactttccatcttatgatgacaggaaggattgagagcatttgctagcacctgtggtcccggtagcagcatgagtctttggaatcgtttttccagggctaagctaaatggctccacccttaggactgtcagaggactgtacctaggcacacttcattctagaaacatgtactctgagcccacctaaggcaagaaaggcccaaaaggaggttggcaaccttgtacaacttttctttttttttgagacagggcctcactctgttgcccaggatggaatggagtagtggcacgacctcagctcactgcgaccactgcctcccaggcttaagaggtcctcccacctcagcctcctgagtggctggcaccacaggtgtgcaccaccaatgcccagctaattttttaaatttttgtagagacggagtttcgccatgttgcccaggctggtctcaaactcctgagctcaagtgatccacccgccttggcctgtccaacttttcccagcccagggaagcagccttacttggcggtacttatgttttcccgactcaaagttggccagcatcttctcagggtcctcagcctcatccgtgtctggcttctggttgctgacaggcatgtgctccaggatcttctggacatctggctcaaagcccatgtcaatcatcctatctgcctcatccagaaccacataggtacagcggctcagcaccaggtagcggttctccagcacatcaatcaaacgcccaggggtagcaatcacaatctgaggagtacagtataatcatttatagcccagcaggtgccccttcttttctttcctgtgaactatccacccacttgggtgacagacctccaatgctgaggaacttggaccccaacctctggttatgtttagcagtaaaggctcctgcaaactggcatgaaatcacttgttgcctggattttctcaggaatgaatgaggtctctgagtaaggtgcaaggattagacagaggaggcaaaatcagtagaaacttttttttttttggcaaatcatttcagatcctgaagaaggaacttcttagatgggagagactaaggggtactatgaagggggttgtataaagactaaatttttttaaaaaattgtaaaaagactaaatttctacagcagacttctcataaagagctctcctccactttcctgagatgaaggcaatgcacaaagtcaaagatttggtctggcagagtaaagagtaactaaaagcacaggctatggatatgagtctcagctctgcccattgccagctgtttgtgacttcaggcagttattaacctgaacctcagcttgatctataacaaggaaataccactctcatacattattgtgagaattaatgagctaatatatatgatatatactatttgtgatataaaccctggtgcataagttctcaataaatagcacatatatataaaccagctcctttcttcatactactgcacatatattccagaaactagaaacaaagccccaagatagccttcccagacagcaggctggctgctagatagaaaaacaaacctcacaacccatgcgcagcctgaagccctggtcttctctggagatgccaccaatgacagccacagtgcggatacctagcggtttcccaaacttgatggtctcttcctcaatctgttgagccaactcacgggtgggagccaggatgatggcataagggccttggtctgactcttcgatcctgtggtaaacagggtgccccacagcttcgtgagctttggttcttatccaaccacaagccagagcaagacaaagtcactcttacggggagcaatgggaatggggaggatgatgagaaaagaatgcaatgatctcacttaaaaatcagaggccagggctgggcatggtggctcatgtctgtaatcccagaactttgggaggctgaggcaggcggatcacctgaagtcaggagtttgagaccagcctggccaacatggtgaaaccctgcctctaataaaaatacaaaaattagccaggcgtggtggccggcgcctgtaataccagctactcgggaggctgaggcagaagaatcgcttgaacccaggagacagaggttgcagtgagctgagatcacgccactgcactccagcctgggtgacagagacactctgtctccaaaaaaaataaaaa

SEQ ID NO: 97858 - DNA, 17303 bp, Homo sapiens
  misc_feature (1)...(17303): n = A,T,C or G
gcgacagagcaagactctgtctcaaaaaaaaaaaaaaaaaaaaaggagcagcagccaacttctcatcagaaagtaggcaaaccataagaaaattaacatctttaaagtactgaaaaaattaaaaaaaaaaaaacctgtcagcctcaaattctatacctagtgaaaatatatatatattttaatacagactctttcaaataaaagctgaaagaattaatcaccagcagagctgccattacaagaaatgtcaaagaagtttccttcaggcagaaggaaaatactagatgaaaaacaggctgggcacagcggctcacacctgtaatcccagcactttgggatgctgaggcagcaggattgcttaagcccaggagtgtgaggccagcctgaccgacatggtgagaccttgtctctacaaaaaaaaatacaaaaattaggatttacaaatacgacttcaggcccagcgcggtggctcatgcctgtgatcccagcactttgggaggccaaggcagatggatcacttgaggtcaggagttcaagaccagcctggccaacatggcaaaaccccatctctagcaaaaatacaaaaattagctgggtgtggtggcgcatgcctgtagtcccagctattcaggaggctgaggcaggagaattgcttgaacccaggaggtatgggttgcagtgagccaagatcacgccactgcactctaacctggacaacagagcaagactccatctcaaaaaaaaaaaaaaaaaaaaaaaaaaaacaaatatgacttcaacatattgcaaataccttcaacaactccgatatccctttgcaaatatccctttacaggctgaggtgggaggatcagttgagcccagaaggtggaggctgcagtgagttgagatcacgccattgcattcaaccacaggtgacacagtgagaccctgtctcaaataaaaaagaaaagaaaaatggatctgcactaaggaataaggagcaacacgatagtaaatacctgagttcataagactttttcttaatttctttaatctgtctaaaaactttggctatttaacatgcattgtggggctcataccttaagtaaaaataaaatgtgtgacaataatatcacaaagaatagaagtggggaaatgaaagcattctgtggtgcagttcttacactatctgtgaaaggatatcgtagttgttgaaggtattctgcaatatgttgaagtcatatttgtaaatcctagagcaaccactcaaagaatagaacagtacagtatagctaataagccgacggtgaagacaaaatgataccattcaaaaccctctaaaagtggttatgacaagagaaagaaaaggaagaacagatgggacaatggaaaaattggtgacttacaaatagtctggagattaacagtaatgtgctaacactggtgttttaattttgataaatgtactacggttatataagatattcacgagtggaaactgaattgggttattcagagagaaagatttcatcttccatatgtttatattttctgctggaagcaagcatttataatcaaaatttacctgggatacttggtaatttataatcaaaattacctgagatacttgaaacagattctaaagcccccacgccagagctactggatcagaatccaaggatggagtcttataaacgtgcataaaacttatgaagctttcctcatgaatccaacacaacccaacacaggtctgtatctggaaattgagacgagatggccctccaagccacgtcccaccctgaggtcgtcctatggctcttagcggtccatagactaaaaggctggatgatcagcaacgctgagacaacagtttcagtacagcagtggggatgagaggcaaggtcaagttttgaggggccaggacacagcaaagaagaggacacaaggaaaggggaaggaaatggagatggtaacacgaggggagggtgggatcggtgcacaacagacgttttcaggattaggaacctgggtgtattttaaggcagaaagcagaagccactggaggggaacagaagacacgagagaggcaaagtgttagagctttggccccaagatggccggaggctagggaagccccagtgagagaggcagagcttggcgaagaggagggatgagagagcatggctaaggtcagggaggatttaagagcgatggccgcctatctagaatgagccgcatgtggctgctgagcatttgaaacatggctagtccaaattgaaatgcactgtaagaacacacactggatttcaaagactacacatctgtaatcccagcactttgggaggcaaagtcaggcagatcacttaagccaggagttcaagaccagcctaggcaacatgtcaagactctgtctctacaaaaaatacaaaaattaactgggtgtggtggtgtgacctgtagtcccagctacttgggagcctgaggtgggaggatcatcttagtccagggaggtggaggctgcagtgagccatgatagtgccactgcactccagcctgggtgacagagcaagaacctgtctcaaaaaaatatatatgtatattcatttagacatatgctgttgcacacttagactatagtatggtatcagcatacgttttatatttactgggaaaccaacaaaattcgtgtgacttgcttcattgtggtctgggaccaaagctgtaatgcctccaaggtatgcctgtatatttctattgcaaaatgtgaatctcgaaattataaaagctacaactaggacaaaaagcaaccccaccaaatagccctatatcaaagaataaaatctctttctagaaccccagaatttgcctctttcagactgaagtttagccaaatctatgaaaaaagagcttgctaaaccaactaattatcagtacaaataaaattataatgaaaagtctatgaagataatttgttctcagatgcccttcacatatagcaattaattcacaaatgatgagtcactcatgtgccttcatgaaggcaggccctcaagagacccgcaacagaaaggaaagccaccgactggagagaacctgcttcctgagccccaccaagttccaaaaaggagaatggggcttcgtcctcaccctcaaggagttgccaaactgggcttggttattattcacacttgaaaagaatgaggaaggtcagccagtcccctccaggtcgctcgggcttcctccaagctcctcttggttcaaatttgctgtgtcctccagccggcatctctcctctgttccgtaactgacagggcagcgaggtagcttccggatgactcctcccgccatggttcttccgtccatcagctcttccttcctcaactctgtggtatgtggctaggggagtttccaactcccaggggacatttcagttccccaaagataacacagctttgcacagtggatgtttacttgctggtggtcttatctaagatcaacattggcagctgtgcccggagaggcctccagggtccaggtaagtggaggcttcatgtctcaggaggtacctggtcaccacagttaggatttttctgtttggggatttttttttttatgggttggtggctctgaaaaagctgcaagtcttctctgaggactacagacctctctccaccctctccacattcagcctctctgggctccagggccaaaagatgtctacactcaggtggcagacaggcctgtgaagacctcctggtgacatgctcatatgttgctgggactaaaggtgggattttagccaccacagtgggttggtggtgagatgtttaccaacaggaggtactttgtccctcatgtccacttaaagattcagtccaacccggcctgtgcttctgctgtcccaagagactctagaaagctccaatcctccctgaggttgatcttttaagtcagggtaggtggtcattcggcaatcaactgctctactgcctcaatgtcctcctcactggacgtcctgccccaattccatcctgttcagcgcagactgattttcctggaacacaatgttcattatggagccagatggcatatcagaaagagcactgtattaggagtcaagagatccatgggggaatcccagcattgcccctgatggctgtatagctttggggaaagtgaggccctcttggcattcagtttttcttccagcgaaataaaggattcagcctcccagagctttaaagtctttccaactctttcattcattctatggtctctctctcctcaagaatcctcagtggctgccctcctgcaaaaaaagcccaaacttcttgggctagcagttcccaaggcatccatcacctggccccaaaccaccttcttatgtttttgttatgaccccatcgccaccctcccccaagccacccagccttctccatgctgccctgatgtactctacccacgccttcacctcccctctgcttgccgcaaagccctccctccaaagccctgccccgagttcaccacaggcctctttcctggagcctttgctaacatccctgccgcaagccccagcctaaggtgagctcctctcctgaactgctagaacttctctgcagacaactcattggcccttaggggttcctgcctgggcacccagttggatgaagcactccagaaaggaagaaattcctggggccgagggaaatgaggcagtggccttggcctatgctgggaagtcctatgggcctggtatgaaaccattgtcatctgcagggtgtttcacaggttagaagccactttccccccatcgcctcatttcaccctcaaagactctgggtaaggggaattatttgtggtcggcgtaaggccagtcaatgagagaggagccaggcccgtgctaagcgtagatcttccacctccaggtccaatgcacttccctctcagaagaggcatccgctaaaatagggaccaaagctgctggagggaggcaaggcaagctgctatgtgaaaaaacgccaggccaggcagtcatgtcacacctggcagaaatgactgaagcatagccactggctgaagttatccccacacccactctctggagaggatgatcaggagcagtctgctcaaccgggaggtgggactcctcctcgggaaggtgtagaatcaccagcctggctccctgcggactcccggggctcacagaggccagagcagcaacagcacatgggaaacaacggggcgctggactggggaggtctcagagctctcctagtgatgacagcctcattttacccagggagaaagggcgagtaagctaaggtcacacagcaacaaagctgcacccagaccccagagccactctcctccctccctcctccaccagggccatgcccacttggggcaccccgccaccgtgttccagggacagctggagcacatgcttcttccctcgccaacccagcaattccgcagggcatctgacctccactgttgacttctacccagaggacaagaacatttttagttcccaaggaatgtacatcagccccacggaagctaggccacctctgggatggggttgctggtttagaacaaacgccagtcatcctatataaggacctgacagccaccaggcaccacctccgccaggaactgcaggtaagctctctctactctccgtgtgcgtttgctgacaggtttattgtccgtgactgctgcccgtccgtttaacctctctgggcctcaggagtcccctctaaacacgggggatgtcggactgtctggctggaagacagagcttcatttaggagctacctctaaccccctccctgctgagtgccctggggcccttgctggttcagcttcctccctcctcatgaaaagactcgccatgagctctcagagcctgggacaaaaggcaccggggaggacccccagcccctatcaagtcctgctgccaggtgttctgccctgaacggccttggagaagagaacacacatccatcatcttctaccttgggaggtggaagcgggggtcctctctacacagcagtcaggaccccagatggtaaagcccttcacgccatctgctgggctcctacctgagcaagctcagaggcacatgagaaggggaggcagctgcctggagaccctctctcccccaggcccacctgtctgcaacccagctgaggccatgccctccccagggaccgtctgcagcctcctgctcctcggcatgctctggctggacttggccatggcaggctccagcttcctgagccctgaacaccagagagtccaggtgagacctccccacaaagccccacatgttgttccagccctgccacttagcaaccagctctgtgacctggagcagcagcgccatctctgggcttcagtcttctcccagagcacaaaggactctgggtctgacctcactgtttctggaaggacatgggggctyagagtcctaaacagactgtttcccccttccagcagagaaaggagtcgaagaagccaccagccaagctgcagccccragctctagcaggctggctccgcccggaagatggaggtcaagcagaaggggcagaggatgaamtggaagtccgggtcggtacctctgcagttttatgcttctgtggcagcgaggagggtggggtcaggggagagggagggcagggagaggtggcagtgaacagggtcccaactacaagctccccagaactataaaaccagtaccacaggagttgagctctgccctgggctctgtgaggtctttacccattaagagaaaaatatctagaagaagtaactttgctacaacagaatagggacggaaggagcctgggcagaggagagagggtgccagagcctccaggcgactcaaaggggacagaaaatacagtgcccagagacaaagacacccagaaataaacggcaggcccagactgaagatgttgctctgcagaaaaccatgttttactcaggggcttccagggcctggactgtggggtggagtgcttccgaacagcaccctggatgggagggctggcgccagcccaggctccggcacccactcacctcgcctggaggcaaggagggggcaggtgtgggtgatgtgctctgacaaatcgtgcgtggggcaaggagaaagttaagacaacccaaggatggagaggaggagggagtaaaggattttacggggttttctatgcaaccttcctgtggctgtggttcagggaatggtttcttctaaatatttggttggtgacaccatttcgcagctaaggcaggattcccccaaggtagcacttaataatggcagctattagacgctgtgcccgaggataccaacttcacctctaactgccccacctcctccctacgacaacctgtgaggtaagcagggctggcattactcccactttagagccaaggaacagttcagaggtgaactcacttgcccaaggtaccacagcrgtgtgtggaagrgacgcgacacaaggtcagggctgactccagtccccaagccctcttcctcctcactggtctgatggacagagacagcgcacagtggcccaggggaggcctcttccttccagaggagtgaaatgtgcccgccttggcctctgcctgcctgtttaccatactcttctccagtcgaggaataaagccgtcrgaagctcccccagcccctgctcgctttcatcctcaccagcacctggcggtgttcagacctttcctctacacggtgggatccactagattctcatctgaaagagctgcatacccttaggccaaaaccaggatattttgctggtgagacggctagctccacacatggtcatcccagccagaggagctgcccagtacccagatgagaaagaggtcttggtggctgacgacgcaaggtggggctggtacagcgggaactttgcagtttctgtgaaagctagccttggagcatgtgacccacactgccttggctggaaccagaagtcaaacgcctggggggtgttggggctgccagaagaggagtggctgcagagacctggagcgccccactaccaaacccctcacaaccgagtgtcccacccacctctctcatctcaggcccctctacctccccccaaacgtttccctcccaaaatcaagtttcagagtagaagactttggagaccaagtcccactcccattgaacagatgggccactgaggccaggagggaagctgccccccaccagccagcactgtgtcaccactcacttgcctgcaccacagcgccaggtgttaggccaggccagcagtttcccagaccggtgctcctgtttcctaagatgtctgccaggtgatcagccaccccgcatttgcctcagcggtggaagaaaaacaagtatttactggagggaatggaaggccccaactctccttaaaaaaaaaaaaaaaaaaaaaaaaaaawtcaatcatgtcattccccactgggtccaccttcatggtggagttaaggggagggagatttcgaaaagggaacgcatagstattggttaatagcttctctgcgcctctgtcctcacctgtaaaatggrcacagtggtagcgcctaccccacagggaggcactgaggacgcctggcctcacacagaggaagggcaataggactaaagcagttttcagggccangtgggtttaaaagtcctgcattctagtccttggcctccaactccttgggcttctactgtgaggaccaaatgacccagcactaagatccttccctgactcagataagtcagtgcccaatatggccaggcaccgaggtagccactggcagagacaatctctgctctcaaggaaagtctgccatgtggctgcagcagagctccttcccacttacccaaagctttgagctccaataaatcatctcaggaatacctggaaaatggaagagatgaggcgctctccctgtagaggggaagaaatggaagcacagaaaggacttggctcagagcctctttctaggaaaacatcaacttccttttgattttccaggcatcaaagaaaggtctatgcatatgagagaaaaaatacctagggaaggagaaaaaggagaagaaacagacaagagagaaaggagaaagagctgggagcagggaaggaatagaaggccagcaggccagtgctgagaatgctgggcagaccccctgccagggcctgaaatgctgccattggtgactcaaccttttgtcttcaraactgcaagggagaaaaaaaatctcayactagggggcaccacagcttttatcagcaatcccattagaggctaaggctgagaggcatgagagtgcaaggtaagtgtctgaaagatggtgagtgggaaggtgagctgtggtcctgagaaaggaagagaacctggctgaggtgtcactcagcagtccctgctggggcccaaaggccattctccctctccactcctgaagagaggcagagagcccagagccccctttgagatggggatgggcatgacctctgacatctcctgggtcctccctgccctgcctcctagttcaacgccccctttgatgttggaatcaagctgtcaggggttcwgtaccagcagcacagccaggccctggggaagtttcttcaggacatcctctgggaagaggccaaaggtgagtcctgcctggactgggtttgctcggtttccttgcagccccacatgggagttcactctgtgggtgatgagttttccccaacctctgcctctccaaaagaacttctaatttccctttcccaaagatctgcaggakagtggttggctagtatttgtgagtggctcagaagggagttcatcatagtctttgtgttcaaagaatgttctaagaactagtacattaactagctttggggcctcagttgaacctcagcttccttaactgtaaaatggagctattttacctattgtgagagtctacaattatttggtgttacaccgtcttcactgcgtaactttactccacaaacaaaaaggaattggtgccaaaatagcactcagaacaggttctgcagcctgttaagcagttccttcaaatattagagcttcctgagttaagcaaagggtttgctttgaatcccctcaccttgtaaaagaaaaaaaagaaaccgcccaactgattgaggtggcagaaacacctgcacatctgcaaagcactgtcctcaccaaggcggtgacccgtcacccctggggaacagcaggggtagcattcaccccgctgtgcaaacgaggaaaccaagactcagagctttgaggtgacttgcccagggcacaacagtccacacttgagtgccgccctctgactccaaggccagtgcttccccacaacccccaccattacatcccacctccaatctcaccaccgtggaagaaaagcactagcaggacggtgcacccagcattcttactcaacctcttgctttccagaggccccagccgacaagtgatcgcccacaagccttactcacctctctctaagtttagaagcgctcatctggcttttcgcttgcttctgcagcaactcccacgactgttgtacaagctcaggaggcgaataaatgttcaaactgtatgctgatgttccaaatgggaatttatttcaaagaggaaaagttaatattttactttaaaaaaatcaaaataatacaaataaaaataattcttggtttatggtctgtgggaagggaataaaaggacaagtagcaaggccaatgtgcatgtttagaaaacctaatcacaccagctcactcaagcagagaagctactgcatgtgcatgcattgtgtggaattaagactgggtttcttagagaaggaggagagaaagggggagagtaggagggagaggggaaaaggaggagggagaggaagagaaagaagagataaagtgggactaagagaaagagggaagagaggaagaacaaagacacagttcctttaaacatcagggcttcctgagtgcaaggctgcattaacagcttattaacaaccagccagggctgtgtggacaaagaaacttcaggatgacattatcgaagccaacatccattcaagattggagaggaagacaggaatgcccaagagtgaatctgaagttagacgttaagtgaggtgcccaatcacggctcttgggcactgctagacagcactgaaagagctgcattctccttcctcccttctccactactgagaaggcctgacaaagcaaatgcctcacatgggcaaggctggccgtcgccrtggttcccttactgataccaggtgggatccccaaacattccctcaactccagttcacagcagacacgagccttgactcttatgttccacaacttaattccagttacgacactggtcttcccgggggaaggccactcggtcatgcccaccttagcctaaacatgtggactgacttgactgtaggcaacggatgggacacatcgctaaggggagggaaaggcaaagaacgaggtggccccaaagagcagcaccacagacttgccaattcagccatctgagcgcttgtgggaaacatgcaggaagccgtctgcagagacagttggggtaatgcccacactctggaaaacccctaccacagagggtgctaggagccgagcgtctccccaagtaaaattctggccgccacacatgcaggcactaactactgatcaggtgcggcaggcagacagaaacccaactgctctccctcacatagaagctgtggtctgtgaatgccaccgtcatccagggactcttagaaatgtagaatcttgggcagcaccccagccctaatctatcaggatctgcattttaacaagatccccaggctacttagtaaacggctgatgggaaatggcttagaatccccttcccaggcgtcacagcacactgcaggccccctactcacccctccaccctcagacagccatgcccctacctccccaggcacctggcacaagtgggtacagagatcaacacacttgtcctggaacttaactgtctcagctctgtcacttagttgggatacgaccttgattatcactaactgcccacagccctcttatcaatagctacagaagaggagcaaaggcccaatatggccaaagtggtcaggagatggtttctttttgagaaagcaccactgattgggcttgggagaggatgggtaccaggctctggacaaatgctggtcacctgatgcttcccccaccaaagacaagaacttacttctctctcaaagaaatcacaagcattattaaccgcctgcctgggtcattcaaatagaaacagatattgcgcacccactatgggctgggcactctcacctgtgccaggcaacaaggtgtagtgcaaagatctgggctttggcctcggacctgaatttggataccagctctgtgatccaggccaagactgaatttctcaggctcctcacatgtaaaatgcctaccttgctgggttactgccaagactgaacatgaggtctcacatgagctgtagctggcaaagggcccggcacgtagctaagcattcaattactacagcagccagcactcactgtcacacccctgatgtacaccaggcaccgtgttaaatgctcatgcagattaatgtgatttcacttcattttcacagcaagcctacttatgagggagaaaactaaagctcagagaaattaagtaactttcctaaagcacacagcaagcacgtggccgactcacagccaacgccacaggactcaggggctgctttttcatccggttccacagcctctcagccagtgcagcttccctcgctctactgcctaggatgagagaggtttccatattcattcattttccttcagaatacactgggtgaacttggtagaggggtgaggacaatttcaagtcaacaatgggcagaaatataatttatcaaagaaaatggttggaggacacccttgagaaaatgtattatttcaaacatgttcctgtatcagctttcttaaacccactcctttatggatcgtttaatgataccactgtaacttgagggtctctaaagtggggtgtatgtacccctagggtgagcgagctatttgctggagaaaaaaattctccttgtgaaaaaacttttactttgtgtataattagcataagagcacacgtatttaagttctcatgcacttatagttgtgtgttcagaaatcatcttgagagagtgcacagaaaagggttgagacgcctcaactaagctacccaccttaatctgaatccacctacaaatgtcactggcatttggggggccgaggcaggtggatcacctgagatgaggagtataaggccaaacaggccaacatggcaaaatctcatctctacttaaaatttaaaaaaaaaaaaattagccagtcatggtattgggcgcctgtagtcccagctactcagaaggctgaggcacgagaatcacttgaacctgggaggtggaggttgcagtgagctgagatcaggccactgcattccagcctgggcgacagagtgacactcagtctcaaaaaaaaaaaaaaaaaaaaaaaccaaaaccaaaaaaaaatgtcactggcaaatgagcactttttaatacagtgatcctgagagggactggctggccactaatcaccatctttgacagagtttgcttctttaatcactgtacattccggtggccatttgcccttactttacaaaaatgaacaaagcaaaattaaggtgctgaaagcaaacgatgagtatcggtctcaagcttcctatagaaagatggaaaaacaacagaaaagccaagaacagtcacaaggaccatcactgagtggacaaagccaactgcacattcaactgtgaaggaaatgaaacaaagttcaggacgatgccaaaaatacataatcaatgattgtatctaaaagatgaggcagcaacagagacttcaaaggtgttcagcattcttggaaggaagagagcctttctttttatgcgtaagtttacttttttggccggtgcacttgtattcaagaataccttagtacaaaataggagggctgagtgcaagtaatgaaacagaatttcctccagagtttacccagaggcatcaggaattcacagtccaacgcccaccatccaactgattcatcagtacccccagggactagatttttcttcctcctacagccttgagctggaaacaaaaaaaaaacaaaaaaaaaagaaaagaaagtacctacataggtcagaaagaagcagtgcatctgagttcccagacagtaaaattacttaacactctaaggctgtagaactttaagaattcttttctggggggaggcggggggaggggaaagacagagtctcgctctgtcacccaggctggggtacagtgctgcgatcttggctcactgcaacctccacctcccgggttcaagtgattcttcagcttaagcctcccgaatagctgggactacaggcgcgtgccaccccacccagctagtttttgtatttttagtagaaatagggtttcaccatgttggccagcttggtctcgaactcctaacctcaagtgatctgtccgccctggcctcccaaagtgctgggattacagaagtgagccaccatgcccggccgaactttaagaattcttatatgcagtttaattttacagagagccacatagatactcaagaaagtctccagctggccgggcgcggtggctcacgcctgtaatcctagcactttgggaggccgaggcaggtggatcacgaggtcaggagatcgagaccatcttggttaacacggtgaaaccccgtctctactaaaaatacaaaaaattagccgggcacggtggcaggcacctgtaatcccagctacttgggaggctgaggcatgagaatggcgtgaacccaggaggcggagcttgcagtgagccgagatagtgccactgcagtctggcctgggcaaaagagcaagactccttctcaaaaaaaaaaaaaaaagaaagaaaaaaagtctccagctacctggattcttgggttacaatgctggccaacaaccagactaaaccactgcatcactcaggtaagtctatacaaacacggagagactgggttggctagaggatccatcactttattttcagaaaaagatggccaaagaggggaaaaaatacagaggcattcccacagcacagtgaaaacaattagccatccaaaaagctgaatcaaaaacaatgccaatcagctttcacgcccacacaggtgaggtttcactgtgcaacagcacataaatgataatctaaatcctagagagaaaagtagatagcaccttgtgcttttccttggcaggtggatggcacaggcttggagacttccatgtcatctccgcttttcctcctctaacacagggctggttggtttcacctgcaggcactactgacttcagggcttgctggagaggagatggttgtgctgcagttcacttggtgactataaacactttgatatgctcggcagtcccccaagtcttccaagcaggaaatcaggtcccccccgacttcccacatgggccaatctgcagcacagacaacataacagcacagctaatccgtgaagacggacagtgaatcaaggctgagttccaggccagtgacttgtgtaccaggggcaagatggaaatgccagataggaaatattaaatccattccattttagctcacaaggctcaaatgcgccttccaaaaacacctagaggaatttaggattccataagggatgtattttacaatttaagcctccaagaccacagacgagggactccaggtgatctatccacctcactgcagatcagggtgaaggatcctttgaaacaaagtacagtctcctctcacttaaccctggaccattagaacctctagggcctgtaacgagtatacctttacaaggcaccagcaggcggcagagcagagctcaggacttgagatgactcagttgctcaaaaggtgaaggagaggctctcacttctaaaacgcagaaagacaggacacaggagaggcaaagccaagggggcacccaggagatgcgggagaaggactggtacatttgcagacaccaggcctgcttattctgcatagacaatgtaacatggctgagctgcccagcagagcttcggagaattacgctgattcacctctcaacctgggcggggtacacaaaggactgtacacaagatgaaatgaggattatttttggtcaaatgttcccaagaagggggcaaaagtgaaacaaaaggaggctggcagcccctgacacaagactagcaggtagtttccgccgcaaactgaaccttatcagcttaacacacccacacagcagccctgagggcatcagtgaggaggaagtacctcctttggggtcctcttccccaagaaagcctcttcccggagtcccccagtctgtcctggatctccatcatggacaatgagtgctcctctgcacccccccatatcaatggcagtggaaccaatgagaccagcagctgaagtccttctgcctgtgccgacgctggagttgacaccagaacagtgacagtcaaactgaagagttatccagggaagggaggaggacgacttcactggttgcaagaaaataaacctccgagataggtgtccagttaatttcccccaaaaagtttcccagttggaagtctgtttttagaaccgagaaccaggaactgagttacacacccacatgtgcttagacaagtaggcgggtgactttattcacaaactactcaaaaacaggctgcagagaacagaatttggactgccaaactcactgtaccctcatatcgcactctttcttctttgctgcctaccctggagcattttggctgggaggcaaaatcccagtgctattacaggcagtccccatacccctcattccatgcccaccccaccccacccaccacccagaagctgaagccttatgacccgcttggaggaaaacatcctgtcctggttttctgtgttccaatcagctctctaaacacatcctcgacctgagacacagacttcaagccagcctgtgttctgtcaggctgctggtcgccctggagggtggaagagaaaaagaagaaggttccaaaccatgtcactcaaaacaaatcaggcttaatgctcatactatgtttatattctttacattaacaaaatgcaacaaaagacttgtcctggtttttaaaaaatacagaatgtgagttttacgaccttttcta

SEQ ID NO: 97859 - DNA, 32901 bp, Homo sapiens
  misc_feature (1)...(32901): n = A,T,C or G
ccagccttttagtctatggaccgctaagagccataggacgacctcagggtgggacgtggcttggagggccatctcgtctcaatttccagatacagacctgtgttgggttgtgttggattcatgaggaaagcttcataagttttatgcacgtttataagactccatccttggattctgatccagtagctctggcgtgggggctttagaatctgtttcaagtatctcaggtaattttgattataaattaccaagtatcccaggtaaattttgattataaatgcttgcttccagcagaaaatataaacatatggaagatgaaatctttctctctgaataacccaattcagtttccactcgtgaatatcttatataaccgtagtacatttatcaaaattaaaacaccagtgttagcacattactgttaatctccagactatttgtaagtcaccaatttttccattgtcccatctgttcttccttttctttctcttgtcataaccacttttagagggttttgaatggtatcattttgtcttcaccgtcggcttattagctatactgtactgttctattctttgagtggttgctctaggatttacaaatatgacttcaacatattgcagaataccttcaacaactacgatatcctttcacagatagtgtaagaactgcaccacagaatgctttcatttccccacttctattctttgtgatattattgtcacacattttatttttacttaaggtatgagccccacaatgcatgttaaatagccaaagtttttagacagattaaagaaattaagaaaaagtcttatgaactcaggtatttactatcgtgttgctccttattccttagtgcagatccatttttcttttcttttttatttgagacagggtctcactgtgtcacctgtggttgaatgcaatggcgtgatctcaactcactgcagcctccaccttctgggctcaactgatcctcccacctcagcctgtaaagggatatttgcaaagggatatcggagttgttgaaggtatttgcaatatgttgaagtcatatttgttttttttttttttttttttttttttttgagatggagtcttgctctgttgtccaggttagagtgcagtggcgtgatcttggctcactgcaacccatacctcctgggttcaagcaattctcctgcctcagcctcctgaatagctgggactacaggcatgcgccaccacacccagctaatttttgtatttttgctagagatggggttttgccatgttggccaggctggtcttgaactcctgacctcaagtgatccatctgccttggcctcccaaagtgctgggatcacaggcatgagccaccgcgctgggcctgaagtcgtatttgtaaatcctaatttttgtatttttttttgtagagacaaggtctcaccatgtcggtcaggctggcctcacactcctgggcttaagcaatcctgctgcctcagcatcccaaagtgctgggattacaggtgtgagccgctgtgcccagcctgtttttcatctagtattttccttctgcctgaaggaaacttctttgacatttcttgtaatggcagctctgctggtgattaattctttcagcttttatttgaaagagtctgtattaaaatatatatatattttcactaggtatagaatttgaggctgacaggtttttttttttttaattttttcagtactttaaagatgttaattttcttatggtttgcctactttctgatgagaagttggctgctgctcctttttttttttttttttttttgagacagagtcttgctctgtcgcccaggctggggtgcagtggcgtgatttcggctcactgcaacctccacctcccgggttcaagcaattctcctgcctcagcctcccgagtagctgggattacaggcacctaccaccatgtctggctaattttagtagggatggggtttcaccatcttggtcaggctgatctcggacttctgacctcgtgatccacccgcctcagccttccaaagtgttgggattataggcgtgagccacggcgcctggcctgctgccactcttatatttgttcttctggatggaatgtctcttttttttctggttgctgggaacatgggctattcccacccctatgtgagctccagctgcttggtctattggtttcacccttcatatatgaaggttagtacttgtccaaagactccaggagactcttcagctctcaggagcttgctctgtgcagcttcctcctctcgtcctcttctgccttcagttctgccttggtcttttttgtttgtttgtttgttttttgagacagagccttgctctttcgcccagggcagagtgcagtggtgtaatctttgctcactgcaacctccgcctccctggttcaagcaattctcctgcctcagcctcccgagtagttgggattacaggggtgcaacaccacgcccggctaatttttgtatttttagtagagacagggtttcaccatgttggccaggctggtctcgaactcttgatctcaggtgatctgcccgccttggcctcccaaagtgctgggattacaagcgtgagccaccgcgcccggcctgccttggtcttcctgaactctgacttctgtctcttcaactcctggagactactagactctggagtctctctttaccttttggcccagaaactgcttctgggtagtagtaacctggtgcatttgttgtgcttacctgtttcccttttcccaaacactgcctgttgtcctatgtctgaaagcagtagttgtttcatgtacttttcatgatttcctagttgttgttttttttttaaatttattattttattttattttatttttttattttattattgttatactttaagttttagggtacatgcgcacaatatgtgggttagttacatatgtatacatgtgacatgctggtgtgctgcacccattaactcgtcatttagcattaggtatatctcctaatgctatccctcccccgtcccctccccccacaacagtccccagagtgtgatgttccccttcctgtgtccatgtgttctcattgttcaattcccatctatgagtgagaatatgcggtgtttggttttttgttcttgcgatagtttactgagaatgatgatttccaatttcatccatgtccctacaaaggacatgaactcatcattttttatggctgcatagtattccatggtgtatatgtgccacattttcttaatccagtctatcattgttggacatttgggttggttccaagtctttgctattgtgaatagtgccgcagtaaacatacgtgtgcatgtgtctttatagcagcatgatttatagtcctttgggtatatacccagtaatgggatggctgggtcaaatggtatttctagttctagatccctgaggaatcgccacactgacttccacaatggttgaactagtttacagtcccaccaacagtgtaaaagtgttcctatttctccacatcctctccagcacctgttgtttcctgactttttaatgactgccattctaactggtgtgagatggtatctcattgtggttttgatttgcatttctctgatggccagtgatgatgagcattttttcatgtgttttttggctgcataaatgtcttcttttgagaagtgtctgttcatgtccttcgcccactttttgatggggttgtttttttcttgtaaatttgtttgagttctttgtagattctggatattagccctttgtcagatgagtaggttgtgaaaattttctcccattttgtaggttgcctgttcactctgatggtagtttcttttgctgtgcagaagctctttagtttaattagatcccatttgtcaattctggcttttgttgccattgcttttggtgttttagacatgaagtccttgcccatgcctatgtcctgaatggtaatgcctaggttttcttctagggtttttatggttttaggtctaacgtttaagtctttaatccatcttgaattaatttcctagttgtctatagtgtgagggaaattcttatttattattaaagagacaggctcttgctgtgttgcccaggctgatctcaaactcctgggctcaagagatcctcctccctcaaccttccaaagtgctggccactgcgcccagccagggaaatttttttttttttagacagagtctcactctcttgcccaggctggagtgcagtggtgcaatctcggctcactgcaacctccacctcctgggctcaagcgattcttgtgcctcagcctcctgagtagctggcactacagaggcacacaccactgcacctaatttttgtatttttagtagagatggggttttgccatgttggcaggctggtcttgaatttctgggctcaaacattccgcccgtcttggcctttcgaagtgtgggattacagttgtgagccaccatgttggctgggaaattcttacaatcgttaatcctttatatgcagaagtggaaggtctccccttagtgtttctgggctcacttgtaaatggaagcctgtgaatcttctagttttgggagttgttttcacagtggcttgctgagttttgcactcagaatggatgagtatttgatggcaatttttggggtctctggcttatagcaccataaaaactcccttttcttcaccctgctgatctctcagaggtattgtgtctatgaaggctttggcctgctccatgttctagggtctgtgggtttcttttgctgtcccagttgctttgtttttgcaaaaggattaaaaacatatggctgctagcgccatctggccctaaccagagctctatgccttttaaatttcccttacttttatctcatttgggcttgacaactgcccggcaagttttacagatagtatttctatttgactaggctattttgtggtaataaattttggggtctcctcttacccaggaatggttaatgtgttgccactctaagtataaacaactattatggtgccaacttcataattatcttaaccaatccttggtggtgggagttaaaatagagcacacagtcagggacccattaacctaccaccaacccagagtgacacgggactagttccttctcggtattttcttggcgacagcagctggcaccataggaagcccaggcccaggcttgaggagcacagagcgtatcagggaggcagacgtggatatggttcaaggattcactgtagaactcgacactcagtagtgcacgtgaaggtgccttcctgggctttgcttttctgagtaagggaaggaaggaagcagctgttttcatgttggtctcagaaggcttgggctttgtggactgactggaggctgactgggccaggccatggcctctctgtcctcacctttaaccaaagcagtttcactttcttctatgttacatagtatgatcaaagatttttttttttttttaaaggggattttgctgctgaaaaaggagggaaggacaagaagtaggcagactagggggcctgaggcaagtgggctgaccttttatctgaatctattcatacaaaggtttggtgtgagaaacatccttgtattacagctgaggagagccccccagctcccaccctgattctacagtggggagtaactgttgagatgggccaggccctgacgctggctttacgtttgcacagtcctgggcagggcttctaccttctgagcgcttcctcatcagtgaactgggtacacccacacggggttctcgtgttgcttaaattagcgaatgtgtgaaagatccagtgtagggtctggctcaccgcaggctcactgatggctatggcgattgtcagggtcacagggcctccgctgaaaggtgatacctggttcagggtcagttaggtctcccatcatggggccctccttttcctgacagggtcaataaactaaatgaatcgtgcccactttctgggccagcatcttaactattggtgtttggttaataccacgttgcayctgcgtggcattttgtaggtcaccagatgcactagcgtgtttgaatcttgcagccatcctgtagggcagactgtattagtcccattctgcagaacaggatgtgtaccgagagggtaagtagcagacccagggctacagtccttgtcaccaaaggctgagtccagtgctctgtatggtgctttcagtataaactgaatcagagatgctcatgcagtgacaagccacctttgtgcgtggggttaagccaggccatcacagccgtggcctttgtgaatagtttgttctagtgcgtggaccgacaagagtcamactgagctggtggggtggggtggttaggataacgcagcaggaattataagcaatatgactttatttagttcctttggaaacaaaaccccccaaataatgcctgaacccaaaggtacataaaaatgacccaaaatagatttgaacatcacttgtagtttcttcctcgtaacatgagtgctttcagctggacagtagattacaaagcatctccgatcacgttaaggcagatgatcaatctgtggctgcatctgtaactcctcctgggaaaataatcctgttggagttgggggctcttcccagttgtytggttagttggcccaggaaggggcagtcctggagctggcgggtggggagccaggccccacctgtcttgtcactgctcgttctgctggccctctgtcactgatgctgatacggagccctggcccttgttgacatcactgatgcacacccactgcccatcaactgactccttccacagggtcacctgcgagtcagtgcacaagcagattatcacgggtctgtgcccttccctctgctgtcccctaaatatgagcctcatcctcatcaagaaccactgcccagaggcttgtgggtgaacagagcatgtccctcctccactgaaatctcaccaaaatgagagtccaggaataaaaactcacagaaaaaaagragtaacaataacagcagctgtggatgatgatgtcaacacaggatactgttttcagcaaactgtgacagagctacagcgagaggatatggggtggcggggagcagggttcgcaaagtgtggtccccagaccagagcagagcatcggtcacctgggagcttgctacaactgcagattcttggggcctggaacaactgattaggaagctctgggggtggggctggcaatctgttttaacaggtttaacaacactgcagtttgaaaactactgtggtagaggaaggtaacagttcaatatgttgtttctacactgaagtaaactgtataagaaatagctaagagctgaaaaggtttgcccctggagagaaaattaggaggctgcattaaaaaaaatcagtctaggtcgggcatggtggctcacgcctgtaatctcagcactttgggaggctgagatgggtggatcacctgaggccaggagttcgcgaccagcctgaactggtgaaaccccatctcatctctactaaaaatacacacaaaaaaactagcagccacctgtaatctcccagctactggggaggctgaggcaggagaatcgcttgaacccaggaggcggaggttgcagtgagccgagactgcgccactgcactccagcctggacgacagagcgagactcgatctcaaaaaacaaaacaaaaaacaaaaacaatctaaacctatgtacatatattagtttgattaaaaatgaaaataacgattttgattttaagaactcttgctttagggacaaactattcactcaacacactgcagaatgctctgggattgaaaacatactaagtcctttaggtaagggtgctatggagacagcraaaggaaacaggcttgtaaagaagagcaagaagcctaaatgcacagtgacgggccccacaacactgcgtgcacagccaggcacttgcttacagccttgtaaaaaagtcactgggggcctgcttgaggcaatctgggtcccttggtctgccctgagtgccatcaacctgggttctggtcctgactctggcactcactagaaatatggctttgagagggggcctgctagatctttctgggaccactgtagatgaaagggaccctcggccagaaaagccgcctgcagaggctctcaagatctgcacacccatgttcacagccacactattcgcaatagctaagaggtggcagcagcccaggtgccctttggtggaggaataagtgtagaaacagggtgtgggctgtctatacaatgcaacactacttagctttacaaaggaaggaattctgacacatgctacgtacagcatggaggaaccttaagggcatactgctagtgacatagtcgcaaaaggacaaatactgtatgattccacttagataggtcgctagagcagtcacattcacatagacagaaagragaagggtggctgccagggctggggaggggcaatggggaagggagttatttaatgggtacagagtttcaattttgcagctgaaaagagttctggagaccagctgcttctctgccttgcctgtgttggttgtgccgtgagccacacaaatgaaaggtaagacatggagccaaagtggccactgggaaacagtaaaagaccaacataggcaagggagagaagcagcaagggctggcaggatccagaccaactcgcacttcaggcgcagagcagatgtgcctgaaaacgcagcacagccactccacgtggaactgaccctgcggcgttagagatcctctgtcttataggggaattcagctgggcagatggctatggcttgttactgcttcctttctgcgggtagcttttttccttctaattgtaaaatacacgtcacataaaatgaccttggccacttttaactgcacagtccagttgtgtgaagtacatttgkgtccctgagcagctggtctccagaactctttcagctgcaaaatgcaaactcttccagtgcacccactgtgtacctgcctcttaccagcataacaagtattcataaactctaaaggtttttaaaaagccttttcagtgttatggacaaaaaatatccccaatcttcttctgtttatgggttcttatacacttgcctttttggcacagctaactgaacatcaccatgaggtgaccaaatgcttagtagggtgatgggcctgactggctctgccacctcatagttttgggacccccatgcaagtcaaatcgcctctgtcagcttctttcctcatctgtgaaagggggacrtgttaatactacctcaggggctgtgacattaatgatgtaactaagaggcacactcaaaacgcagtcctggctaaggctcctgcccagcctgcagtcagatgggaatgtcaagtgccctctctagtgggcggggtgaagaccaacaggctgtgtccaccatgccacggggaatgggtatgtaccttattgtctccaccagagacagccaggatgttggctgtgatggaccagctcacatgccacaccacatcgttgaacttgtgcaacaatttaggggaccacgtattgcttgaggcatcatcacaggtccaaatgaacacacgaccatcctaggaagaaacaggatagagtcaggaggtggagtcaagactcctgcgtttgtgatgtgatgtcytcccagtctagagccacccggcacctctctgcaggaacagggtgggggattcaaaggggagccgaggacctctggggcgtccacagctttgtttctgtctcttcacactggttaagagtctcccggattccttttctcatccgggtttcggaggtggactctgtctgcattgctaactcagattttctctggggttttcctcatgcctgccaagtcacttccactggccgtctataccttctcaactgaatgggcagagctctccaaaaaccaagctccaagaatgagaaggcacaagtaaaaaagcacaaaaatcccaagtttagaaccaaaccaaacaggttcccatgatgtgaaaggcctagctggctccctctagggtggtggtgtataactgaaggctcayccttggccgtccttgctgtctgggaagggtggcttggtagctaagcgtataattcccatccaaccccatcgttgcttgggaacacttggaactrcacctgggcacctcggcgccctagtctcacatgggtcagaagggaaaattcatcccgaatccgcctccttcttggtgccggttctgttgtagctgtctcatctcagtggaggcaggccacttgtggcttctgaccaagacttccccacacaatgacctgactccctgtgctctgggccaaaggtgcctgttgctctccctttaccttcccagaggactttctgctaaggagactaagagctgatgggcctgactcgagactaaatgacaagggatactcatggccctgggctgacctgggagcagctggcgatggtgctggtgggcaggccgatggagggggcccaggccacatctcgaacccagtcactgtgcgcttctagcttctgctcctccttccactggccgtcctcctcctccctaacagtggggacagaaagagaatcagcagggggcygttcccacacctcamctcctccccaacccaacaggctctgcctggggtggagaagcgattccatctttcttctttcattcatggagtttgtggcattttattcccttcaccccagctgtaaaaaaaaccctccagaaaatgctctgcttccacagccaaagagtcagctccaacagttgggaattaggtgaacaggtgttgtgttgtttttcaaggatgtcctccaacagaytgaaaacagtattttactggcaggagggagaaagaaaggtgaccttgtttcttgtgagtgtggctgagtcatggtgagtagggtaaagggtagaagtgtcccctcaaagagaaggccacacatccctacttacttccacagcttgatgaggttgtcacagccacctgatgcaaacctcttgatgtaattgggtttctgccccratgggtggtctatgaggcttcyaggtacaacagcaggggcccagctgacggcattgcagccaatctgtaaagatgggacacatggtgactctgccttgcaagagaacactgcttctgcagacccaagcctgctgtccctctcccctccgcttctcaggactggagtgtgtgtgaaggctgacatgaagcactcatcatggggtccactgctcagaattctccctcaaggatcccaacagtgtgtgcatttttctgcagtgtgcgctaaaagtagaaattaagaactcccacaagtttaagaaacaggacattttctaaacacatgaaagaatggtacattggagcttttttttaagaaaaatcttttattataaagtaatagatcaagaaacaaraattctgccacctgcctgaaaagccctgtcattatgcccttcctaatcacagctccctcttccactataagtaaccactgccctaacttctaacccattttccccccattttatcacccaaatgtgcacccctagwtactatagtttagtcttgtccattaaacatttttttggatgttttttacatctcctactttgcagattcctcctctgatttttttccttacaatttttctgctgaagagagcctagtctctcggtctgggttttgctgcttcatatgcagttcaatatgttcctctgaattcctgaaaactgtcagctggagccaagactggacagactcaggtgtgatccctttggcaagactagagctggtgcgttctctcatcaggaggcacgttagattgtctcttatattaacagctgtcaataactcaggcctctcttaattcactggggcttgtaaaatggtgatactctaattccatcctttctttgtcatttattccatggaatgctccagatagggacacttcttctcattaactattcagttacccagggatagaggtctgatatggtttggctgtgtccctactcaaatctcatcttgaattcccacgtgttgtgggagggacctggtaggaggtaattgtatcacaggggcaagtctttcccatgctgttctcatgatagtgaataagtctcgctagatctgacgattttaaaaatgggagtttttctgcacaagctctctcttttgcctgctgccatccacgtaagctgtgacttgttcctccttgccttctgccatgactgtgaggtttccccagctacgtggaactgtgagttctccatcctctttcctttgtaaattgctcagtcttgggtatgtctttgccagcagcgagaaaacagactaatacaaggtcaaaaaggaaaggctggataaacgcttgattctttctgaactggttctatcactttccaaagatgactgattctcctctttatttattattaacaatttttttttttwaaaattgagacagggtctcactgtcacccaggctagagtgcaggctggtaagatcatggttcactgcagcctcaaacttcgtaggctcaagtgatcctcccacctcagactcccaaagtactgggattataggtgtgagccactgcctttttttttttttgagacagagtctggctctgttgcccaggatggagtgcagaggcgcgattttgactcactgcaacctccacctcccaggttcaagtgattctcctgcctcagcctccygtgtagctgggactgcaggtgtgtgccaccacgcctggctaatttttgtatttttagtagcgtcggggtgtgttagtccattttcacgctgctgataaagacatacctgagactgggcagtttacaaaaaaaagagaggtttaatggacttacagctccatgtagctggggaggcctcacaatcatggcagaaggcaagggaggagcaagtgacatctcacatggatggcagcaaaaagggagagagagcctgtgcaggtgaactccccttcataaaaccatcagatcttgtgagacttattcactatcaagagaacagcatggaaaagacctcctcccatgactcaactcccactggttaccccctacaacacatgggcattcaaaatgagatttgggtggggacacagccaaaccacatcatggggytttgccatgttggccaggctggtcttgaactcctgagctcaggtgatccgcctgcctcagcctcccaaagtgctgggattacaggtgtgagccactgtgcctgccctgggcccagccttttaaccctcatttcgtcttagttctctacaagtaactatatatttatgctgaagtctttgtagtcattttagttgtgtgacttgtatcctctagtagatttctcaggaagggctcctagaaacaatagtccctgaattcttgcatattgataatagttcatatcctttacactcaaaagctaattttaaaaacagctttgatatagtataattgacataaactgcatatcaagtgcatgatttggtgaattttgacaaaaatatatcctgtaggatcatcacatcacctcaatcaagataaggaacatgcccatcattcccaaaagtttcctcggatcccctggtaatccatctccccatcctgcagcccccaatcgtggtgaccatgggcctgctcagctgcatttcctagatattacagcagtggaatcacagtgtgtcctttttcttctttttttcactcagcataattattttgaaatttattcttcatcttattttgttaagtcatttctttttattgcagtcatttctttttattgctcgcagtatttccaaagtatggatatatcacaacttatcatttacctgttgatggacatgtggactatttccagtttttggctattaaagctgctataaccttttgtgtataagtctttgtgtgaacttcaaagtcaattttcctggttataaatccttggctcacactttctttcctggagtattttaaacatgttattcttttttcttctgcaccaatccttactattgaagagtctgacaataatctaattgtctttcccctttaagtcacaaggttccttttctctagaaccccccaaaattttctttaaagtctaataattttactagaattatatctttttgttggtgatgctgagttgaattttttttttttttttttttttagagacggggtctcactatgttggccaggttggtcttgaactcctggcctcaaacaggagttcacctcgatctcccaaagtgctaggattacaggctgagccatcacgcctggccttgattttttttttttttttttttttgagacaagtcttgctttgtcgcccaggctggattataatggcgtgatcttggctctctgcaacctctgactcccgggttcaagcaattctcttgcctcagccttccgagtagctgagattacaggtgtgcgccaccacgtctggctaatttttgtatttttagtagagacggggtttcgccatgttggtcaggctggtcttaaactcctgacttcaggtgatccgcccacctcagcatcccmaagtgctgggattacaggctgagccactgcgcccggctgatattgttaagtgtggggtatgatctctcaatctcaagtttcaaatctttgttttttaattttaagaaagttttctggattactttttggtattctgttttcctttccagggactcctggtattcgtatgtctgacctttctgcctgtctttacttttggtcaaaacctttttacctcttcatttttttgctcttgaaatgtttcctttttcacactgtttatccttttcaggcaggatctgctgtgttcatcgacacttgcatttcgtcttagtctttctttacttctgaaatgatttttaattctaattcttycctgagttctgtcaccttatttctgatttttaaaaagwtgatttacactattctctcttgttttgtattgttagaatgtcacctggcttgatttgaaatagcaggttacagcttggctcggttatgtgggcatgtctttctaatgtgctctcattgtccgcagggaggttattttgcatattcttgtttcttatataacaactgtatgcaatttcacttcaaatacttttctgttatttttaggtgagatgagttttcctgataagaaaggctcaggaaagtctaagctcagaactctcccttgtttctgtgtggtgttaaaaaacgtgggagatggctttcaggagttcctgtctttgttcctcttccccacattggtctacatctcatccttcctttcctgtgtccctatccagctcaactgtgatttcatttcctgcagttcttcctcctgaggggccctgtcccagaggcttgctctggaggatcacagagctcagatttcttcccgccccttcagcctttcttattgtgggccgcttccactcactcggtgttacagagtgcaaacccctcctggtcatttctccaaargcccccagaagatgctcaccatcatctttgattagcaaaatgcaaataaaaatcacaataagggccgggtgtggtggcttacacctgtaatcccagcactttgggaggctgaggtgggcggatcacttgaggccaggagtttgagaccaacctgggcaaaatggtgaaaccctgtctctactacaaatacaaaaattagccgggtgttgtggcgtgtgcctgtaattccagctgctcaagaggctgaggcatgagaattgcttgaacctgggaggcgggggttgcagtgagccgagatcatgtcactgcactccagcctgggtgacagagcaagcctccgtctcaaaaaaacagaacaaaacaaacccaaaaaatcacaataagataccacctcacattcactaggacagctgtaaccaaaatgacagacatatgttagtgaggatgtggagaaattagaaccctcatacactgctgatgggaatgtaaaagggtacagttactttgcaaaacagtttagcaattcctcaaaaagttaaacacagaattacsatatgactcagcaatttcacacctaggtatagacccaagagaattaaaaacatatgttcatgcaaaaacttatctgcaaatgttcatagcagcattattcataaggccgagaacatccatcatctgatgaatggataaacaaaatgtctatattcacaatggagtattatccagccataaaaaggaatggagtgctgatacacgctatgatatggatgaaacttgaactcattatagtaagtaggagaagccagtcacaaaagaccacagattgtctcattctatgtacaactgatcctcaatttcatttcattataatgytgacaagattaaaaaaaaaaaaacaactcccagcgggggcccctgcctgtgtggagtctgtgtgttctccctgtgtctgcgtgggctctctcctggtactctggtttcctttcacacaataaagatgtgcatgttcacttcaatggtacgtctgcattgtcccagtgtgagtgtgggkgtgtgtgtgagtgctcctctggtggaatggtatcctgtccagggctggcttctgcctcatgccctaagctgccaggacaggctccaaccacctgtgaccctgaactggaatgagtagattagaaaaagaatagatacaaattattgtagaattaaactcataaaatatccaataatcatacagatgcatgacagcaaacgatgtggcattagtcatatgagccccccacattggttattgttggtttttgaactgtgtggkggtaggaggtaggacattgatgttcgctttgcaaacatttattccttgattgaaccaccaacatcacgaccactgtcactcgctgattcaccaaaagttgggtaaagaatgaccttgtttatattaatctttcttwaatgtatgcatagctcacatactttttaaaagttttaataacaccactccawtctacagggtcccaatgactactgcagggcatgtcacctggaggcaaccatagctaaggtggcagtgagcaggctgctgctgcaccagcyctcccctgcttgggagcacacaacaaggaagcagtgccaagccctgcctggtctggcttcagggcagagaggctcaaagctgctctagagcaatcatgtctggtcagctgaccactccccggcccactgyccagcggggaccctcccgtgccaccctctagggaggctgcagcagacacggggcaaggcaggcgctctcactgcaygaaaggcaggggatggactcacggtgtgagcgttgttgatcttctttacttcccattggccttccccggtgtaagtcagcagggagatggccccatccgagctcccacaggccaggatcaggccgtagtcatggggggcccagcacaccgagttcactgcgggaagagggagagtgcagtgagcaaagcagggagaccgcggccccaggtcccgccttccacagatttactgttttactaaatgtctacaacaaacaactgtaggagtcaccgggggaagctgtaacttggtcaactgaggacacaaaaaaaccccatcacctactaataccacgatttcataacctacagtctatctaacaaaaaagtgggtaggaaaacaatctgagaatgaagggtagtccttgcaatgaataatcctgaagagaaactcacctgtcttttcttatttgctttggactggctttaggtcttagggccttactcagctgaggacagagtagcagaaaagccaaccaaagctcaagagacagacaagaggcaccacgaggggcagggagccagggctccagccgggacagagtccttttttacccagtggtccccttgcccgctctgctgccaagctcagcatacctgaggagtcgtgtcccgcatgctcgtggctcttctcccaggtgccgttttcctctctccagataatgactttcyggtcataggagcacgatgccaggatgttgccgtacatggggtgagcccaggccacttgccacacaggaccctcatgactacaaagggagagataggccagaggaacccacagtgcctctgcaggcactactttggacagaactaaatggctccctgagacgatatatcagggcagaattgcttaagaacttcaaagggagaactatacaatgccattgcaaaaggggtgctcagtggacagtgaggagcctgaggtcctaagaggttaagcaacctaaggtcacagagcctttgagagagagttgagcctctgggtcagccttcctgtcctggccaggcaggagcctcacttgcccagactgcagccagcactgtctgtatgtgctgtctacagcatagtcattaattggtccaaggtttccagccagaagtgttcaggaaatatttgtagactgaattgctattcatccttcccgacggtcagcttcctgaggaggcattattggtttcattttgatgttttccactactcttttaatttgttcgaaaggcatgtctttcccttctcttctgatctttatccattcacctgataacaggtgctatctgagcacatgctctgtgccaggctttgtacggtgaccatttctctggcccagggaaggttttgcaccttagcactcaagaggtagagtagcatggtagagttagtggttaggagaccagacccattctcccattcactagctcttgactttaggcaaggatatctttgtctctttacctgaaaatggagacatcaataagaattctttcataaagtttggaacaatgcttggtagaaggaaagaaaaaagccactcaatacccattagctattagtgctgctcctggtttactccttcaccgtgggctgcacacactcaagtctcctcctccctctggctgggacaacaggacattcccagtccctacaaagctgctgctaatgaaactgagtagactcaatcttccaacaactagcacagtttttactaaggggaaaaaagaatggggtgggaattttttttatccctccaatatttcacatcctttgaatgtaagaaaaacagcagaaaggacagagtcacagcaaacataactgccttggccaacacgctgcactgcagcagctctctgcctgcctggggggctcctgcatagagaagcttgatttggctcctcagtcacttgatcatttgacactsagacagaggggagcttctaggcccatttccccaaatggacactgacttagtttatgctttttaattcagtgaacaaacacatgctgagcacccacctgtcatggctcttaatcttttctgtgcattctggggaaggttatggaccctcatcagactaatgtacaaaacacacagaactaggcttataaagaaaattcaattataaattatacagtaatcaactttttttttttgagaagggtttcaccctgtcatccaggctgcagtgcagtggcaccatcgtggctcactgcagcctcaaactcctaggctcaggccatcctcccacctcagcctcccaaagtgttaaggattacaggcgtgagccaccttgcccagcctgttatcaaaatattataaagcaatttatgagatagtgatgcatgtacttctttgttaacacttcaagcaacaaaccctagcggcaggtctaataaccactgtaatttcaaagttgtgatgagcataagtggtattttgaggtagctaagtaaccgtgatgtgtgatgacaatatctgtgamttctactggtgacaaagtgacaggcactacaaatactactgaagtttctggcctacatccataattgaaggaaatgctaaatatcagagtcactgaaaatgcatttttttccccctgtcccaattcatcaacccctgaactctattcacagaacccttggagatccayggcacccaggcaaacccacaaatacgtgaaaggcagtgagctgagggaaagcagtagagatgtggccataaaaatgagccaggacttcctcaagaatctcagtagggagcagggcaggtcaaacatttgtaaataatcactgaacacgtgccacgggcatataggcagaacaatgggatttataaaatgatagcattcttacattattcttacggtgatgcttttgtgacactttaggtcatactggctaaacttgaacgaaatggtactgtttaccacttttaaaagtagcagtagctgcctgcactaaagacttactgtgtcctgggccctgtgtcagggccttgcatacactagctggataggaggtagcattggcccaattttgaggatgagcagatgaaggctctgagagagaaactgagwcacttgcccaaggtcttctrgtgggtacacataaagtggcagagctgagattcacacctgtatccacctgtgcccttaacagcatcatccctggggacgtccgctgaggacagccaggctggctgggatcccagcgtcctctccgctaaatgtgctttggggttgctctgaatctgggctcccatgctttgctcccacgcttgaagcagggcctgagaacccacaccattcctggagcccttccctgggctcgccagcacttaccccctgaggtcggcgataaggatctgccctccattgcgcacatcaaagattttgacggacctgtctgatgagcaggttgccaggcgggtgccatagtagtccatctgggcgtcgtgctrcaaagggaggacagctcgggaagcctgcaggctgggtgggtrgrtrggtggggtgagggctgtcactacacagagtctagtttggaccagaatctccctgaaatcaatctgatctcaaagtatcatcaccctcaggcaggaagctagcatgtggacattctcacttcacctatgggcagtgtctctctgaaatggacaaagcaagccatgcccagctggtgtcacagaccctttacatacctcagggaagggctcttccattcctgttccgcagggtgggtatgggagaaaaaaagttggcctagctgccctcttcttcctccatcctctcaggccctattcagttcttaggctctgtgggctaaaggggaatacccctgggttcagctcagccctagcacctgatgctaatgcatgggagcaggccaaaggagtgggcctctgactgcctggagtccccagtcaggtcttctgtgatgcagctctggcctgcacacagggttccattcagatatttgggctctttccagccctggccctggatcctttgtggacctttgttttggggcttctgctcgaccttttccctagtagtgtgcccagagcttcccagactttccacccaaggaacacaatgccttaagtgtcgctgctctcaccacttgtgaaccgaattccttgatgctgactgagcatgcagaactaggcctggcccctacctgcagatccttgtccgcagggtgatggtctctgaggcaccatgcctcctgcaccactgaacaccctggtcccttctgcttgctggccctgcctattccaatggatgtcnctttccccagctgtcccaccctgggagtttcaggactatcagctgcactcccatggccaccaggggcaattatgcccattcaaaggcactcattctgtctggctcagatgggaattctcacctccctacgcaaggnacacatcstgatttttctttgggaactccctccactgtatcaggccttggtttcttggagggcaggcagtagaggagtgtttctgaagcacttctcatgcttctcagtggaaggaggcaggacatagtacctttcagatctaaatcctatctccttagtttacctgctgtgcaaactttgaaaacacttcatctccttgagcttcagtttccttatctttattatttaccaacatcctatgggccttagttcccttatctttaaataaggctaaagatagcatctgtctcaacagttgttatgaaggttaaacaagatattgaatgaaaactcacrcctgtaatcccagcactttgggaagctgaggcgggcggatcacctgaggtcgggagttcgagactagcctgaccaacatggagaaaacttgcctctactaaaaatacaaaatyagctgggagtggtggcgcacgcctgtaatcccagctactcgggagtctggggcaggagaattacttgaacccgggaggcgtaggttgmggtgagctgagatcacgccactgcatgccagcctgggctacaagagcgaaactccatctcaaaaaaaaaaaaaaaaaaaargaaaagtacttagcayggggcctgacactcagtgagcatgcaaatgtttgtcattactacttggcctcatctagttctcaaaccaaactcatacgagtaggtagcatatccattatttttcccgtaagtaaattgaggctggctcagaaaagttaagatattggctagggagtctcagactgggtcttcctgcccatgattccatgctatctccaaggaggtgtggtcttacagctagaccactcatgactgaatccagagaacatatacaactctgggaccagacaacctctcagaaacccaaaagcaactgttggtggacaggttgtgagggcaagaaccctgacatgaaacactgtcagccagctgtcctgggtcttgctcaaaggctgcttggccctgaatgaagcagagtctgtgtttttcctgcggtagactttaacctctggaccttctcctgcagccctgtcctcttatactgagccttgtgtttacctctcaggaaatgccctgagtgtggacttctggttcaaagggccttgtytggcctattgtcttggtggtttgactgggctctgcctggggctttcactgtggctgccctctgcctttgtattgagtcatctttctacactctcttcttttcacccccctttccagtggggctaagaagtgacagcaggaggaagacaggtgggaagactattgtcaagcctccgtacccactcagccttcatccgagagcaggttattgtrttggctggaagactgacagcctagaactacaaattattcccaggttcctcccagcagagagtgattagactgccacagtcctgacaactcagagggcactgctagggagcctgccataccccgagattacaggctgataggcaaccactgcaaagccaccctggawccatgaatgatcaacagaaaggggtaatgaaaaccccaaattgcttccctcccacaaaaatgcccatgtccacacccctccagggagggtgatattaatacttacaatcatgtcctcatgggaggtatccacagtgttaattactgacacctagaaccaaagatatcactggtaaattaactcatggcagttagaatacaaccatctcaagttcttgactgcatttgtttgttcactcactcaytcattcattcattcagtaagcattcattctaagtaccttctttctgccaagcactgtgctaggaactggatatacagacacaaataagaggaactttttgcccttgagaagctcgcgaataatgctagtgtcgcaarataaattatttaatggtggtttgtgtgtcctgtaggagcctgaggggctggggtggtagacacgaattgagccctagatgatgggtaggaatttgcaggtggcacaggggaaaataccagtccaagcagccaagcagagggaatacacgagtagagacaaagaggtctgagagagcctgatgtgtgtggggaaayggcaagcagtcctggctacccttaaggttgaggagagaccccaagggagctacagctggtgttcctttcctggatgacagagcctctgatgttccaggcagtttatgcataacggggttattacttcagactgggagacttgattcgagtgtttcctgaggctgctccctggtccgtcacgtagtgggatccagagttgaacagtttgtagggctggaacatggtgtcatggtcatctccctcctatctattctttgaggtccagctcaaaaagggccatccatcacctttcttgaagattctcagaccctcaaatggctggactctcttgcatatcttcagcaaggaacacatacaacactttatgctgtttcttctccccactagaaggtgagctccttggagccatggtctgagccatctgcmgtttcaaatcccctcaaatcatccagcacagtgctttgcaaatagaaggaactcagcgactatttgctgaatgaataagtaaatgaacaaaagctgttattttttttctttgctcaaccactcttctcttaaattcttgggatagaaaagaggacttaaaagaagtttcagtgtggaacagacatttcttaccattttccccatttcatcttttccagcacaagccctgyaggtataaagtttgacttgtgatttcagaaaggcagacagtggaagaggatggctgcaaagcagttcaagaggtacacaccaagtaagcacaggttctctcatcagattctagactctctaaaaaccaggtccccgaagtctgcaaaggcaagtaaggacaataaggagtttcctccatgtgccgagctgtataggttacaaagtgcacaggaaggcggggagggcagggtaccaagggcacagtcaatcagagacctgcgacagactaaggaaatgaagaagcccagagaagagaaagcacttgccaaagtcacagagctagttcaaggcagacctgggaaaagagccccatcccctaaccttctaatgctgagtccacaaaacttcactccaccaggctgcctgtctagaatgtaaagcagttgttacactgagttctgtaaagctgcggttaagtaggttcacgaagaaagtttactgagaggtagtttcaaccaggttaccaaaggaccttagaaataatcagcatttaattctaaccactctcacccaccagtcagggttgatgaaccacacttctgaatgagagagagagagagagagagagagagagagagaaggcgggggggggggggggggaggaaagagggagggggagagaaaaggacggaaggaaggaggaagggcgrgagagaaagggagagggagaggaaggggggaggaagagggagcggggagagagagagagaagagagggagggggagagagagaaagggagagggagaggaaggggggagggagagggagtggggagagagggagggtggggagagagagagagagagagagaacttcttagagtacttcttcccagggacctggtattatctggtccctgttaacacctgcactcaaaataattcacctctttgagatcagataatgagttaaaaattcatttaggatgagctgaatgtcagagcataaaagcctcaactctaacctgcagtggaagagccagaggtgagtgatttacacctaaccctctgcagaacaagaacacagtgttctgatttctaggttcctgcaggttccctcaaacctgctgctgagacacacccatgtttctaaaagaatgcatgtactagatattccaggctcagcccagatacttccattctttagttctccttcagtcattcattcactcaaggagtaagtgtggagtgaatgtacactgcagatgccacagagacttaaaaaaccctgagcccctgccttcggagggtcgttcaggccatctttacgtttcccgaggtgcccatcctacctgggggccctaccccgagcaacagttcaatcatctctgctgggagctgcagtaggcggcagaaaggaatggttaggagggttcaaatctcggctctacyaccacttaagcagctgtgcaagaggctccacgtctccgaacctcaagtgtcctcatctgtaaagtgttgagaagaatagcaccttcttcacaaggctgttagcaggcggagattacgaacaatgctgagggctcggtatacagtagctcctctgctgttcctcgttttgttttcaattgttgaccgaaaagaaggaagggagactggcaggagacgcaggagcggcgcgccccgcaaagtcagggaggttcctcggyctcacctctggactcccctcrgaatggtccgcaaggacggggccagagccccccaaatctctaagcggtggaggggagctgaacggctccagcttgggatttgggactcaggacggccgaggaacccgtgaaggccgcgaccgtggccttcaccctgctaggcctcctcagtaccaacactcaccatgattgcggcggtggctgctccaggtctcggacgtggcagctcccggcggcgcctcggaacagctcacttccggcgccgggcccgacgggccgtggcgtaggagcctccgggcagcaacgcgctcggctcgcacagcagttccgcgccttccagagggcgcgccccgccctcccgtggcccagcccctatcctccagtgacgtgcgagaccagagggctggggctctggttgccgcagttaccctgacccggagggctttggaatctgaagctctggtgggtctactctcccgaccaagtctgcccttttcctgagatccataaatgaaagaaaggattaatataactatcggccgggcgcggtggctcatgcctgtaatcccagaactttgggaggctgagctggggggtggatcacctgaggtcaggagttcgagaccagcctggccaacatggtgaaaccccgtctctaccaaaaatacaaaaattagccgggcatagtggcgcgcgcctgtagtcccagctacaggctgaggcaggagaatcgctggaacccgggaggtggaggttacagtgagccgtgactgcaccattgcactccagcctgggcaacagagagacactcttgtaaaaaagaaaaaaatctatctatctatctatctatctatctatctatctatctatctatctatcatctatctatctgcagcttcacccgcctcactacggctctgggtgcgactggtcttatgatgaatgttgtaggatgagtgacatcttaggagtaagtagactgtcctagtgcttccttgttgtagtctccctctcagtacccaaggactgggaccagggcagaggaggccagggaatgcccctcgccagaggctgggacctctggccctgccatccctaacccctatataggactgccccttccaaaccgatcccctggggtcctgagtaagtcccatcaaggagacccccctaggcaatgaaggatctcagccaggctcctgcagctagagccccagacctaatcctcagggtccccaaccccaggtctctggcttcacaaggtagggcagctgaaggctccccacaagcgcagtgagaatgccacactggaggacagagcctgggctccccgcctcagccacatatggtctagccctgggccccttgtgacattaaggaggcagatgagctgggggaggccttggctccccttgggcaagtcacagtccttcagtttcctctgctgaaactgggagtaaggaccctagctggagatggtcactgcttgaaggaagatgttaaggctcagagaatgtgatagacccaaactgtcaaggagctttggaggggaggccaggggagtagggtgttagaattaagggccaggcctctgggcaactcttctaccccactgcagctttcaagattttttattgccctctagtggagaaattgttgcaggggtgtgagggggtggtggttaggttagagcagggaacaaaggcaggtttcaggggatctcttggatctcctgttgttttttttgtttttttttttttggagatggactctagctctgttgcccaggctggagtccagtggtatgatcttggctcactgcaacctctacctcccgggttcaagcaattctcctgcctcagcctcctgagtagctgggattacaggcatgtgccaccatgcctggctaatttttgtagttttagtagagatggggtttcaccatgttggccaggctggtctcaaactcctgacctctggtgatctactctcctcggcctctcaaagtgctgggattacaggtgtgagccgctgcgtcctgccagatctcctgttcttcaaggaacaggctctggccttggctctatagctgcaccactgactttctaggtgataaggccaagtcacttttctctgagcctcactttctttgagtggaaaatgaggacaagggcatattagatgtaaatataatgcatcaggcataattgtgattaaaagaatttccttgtgtagacactgatgttgaagagattggggatttgtgacaagcaacagaactgtatcttattcattaaggtatttgctgtaaggtatttggcccataaggcgctgtaatatggcagtttagagtacagatgctggcatcaagactgctaggtatcagtgctggatctcctgcttaccaggtgggcatgctcttcacctctttgagatgctgtctcctgctcttttgagtgagaattataataatacctcctctgaaggttgatattgggattaaatgaacccttggatatgaaactgcgtatggaagtcagatgggcctatggcgcttgatttggggatcagttcaacctaagaagagctgtgtgagtgtgtgagtgtgtgtgtaactctcaacccttgggccaaccttagggattacttgttggtctgggcatattctctttctctgccaatgttcagcagaggtttgtgaagtccagactcctcaggtgccaggcttccctctgccttacccctctccccagtaggggggtgccacctagatccagtgtctgtattccgcatctcctccctctggttaatccagaccccaaatcaggccaactttccctgatttttgcccccccaccccttgcccccaaacctcctccgcttcgtcctgaggccccgttccccagtcttcttctatgagatggtcaaccattcctcataggttaatggctcatggcagggtgagcctgtctccctcaaatggtgggtgttcaaaaggtgtgatctagtggaaggagagagactgcccgctgagctgtgggcccttgggcaaagtgcatttccctcccagggactcagtttccccctgagttcaactccacgaagggcggggacccagctgtccttcagaaaaaggccttgtgatgtgtaccgtgtctgcatttccacgtgtgcatttattgttattgctcagtatagtgttgaaaaggcagacaaatcccattaattacaaagagcacaagccaaagatacagagaaataaagagtgtacaataagagcacagtcacttcccagccccgattgtcccagagccccccagagcccgggcagcttacggaagctggaggcggcaccattccctcgctactctattataaaatatgtgcacacaagagttagcaaagtgtggtgacccccgagaggaaaggtccaggagggagagcaccacaggcattacaaaacagacttagggggctgagaagggcagtcccaaagcagcctccaatattgttttcagtggagggggtgatggctgctgcctggggctggggaccctcctcccccacctgggttggtatgatctctacattaaaatcaggagagcttggtttggaactttgaaaaggcctggggacttcctgctattgtctgacttccctcctggctctggaaggcctaaaagccttcaagaaacgctcttccctacaagagcctctaatggtgggattttggacacaatggcaggagagagatttgggtgggaggcttgtcagaatgcaccaggttggcagcctcctgcaggtagcgcaagagtgggctaggggagtgagggttccgagaaggcccaggcaagaactgcctgcatcccaaaggtactggagactccaaattaaagagcaagaaactatccccccaaaacaaaatgaaacaaaaacaacaaaaaaccagttcaggaaagggagataggaataaaggtttctccatgatgagaattagaagtgcagacaactgggccacacattctttcccagctccaggcctaggagagactcctctttctcgtctggaccagggacagatggcgggtccaccccaacacaaccaaggtgggtgactttggttcccaagctgagattgagtgggggcctggtgacctctcatgacaactcctgggcttagggggcaggtgaaatgatgggaggaacagcaggcttctctcaagatcaggatgccctttttgtccctctttatagaacatagtctatttcacagccctgagtggacagtaattacaatggggggaagatgatggcacagggaatgacagagcccagaatttgggggtgggaatgggacagggggtggaggactgggcacaatttaaagtttatgtggaagaatagatgtgagagaataactaggaaattttgtaaaagaagagtgaagggactcatcccaccacataataagacattagaaattgacaatagttaaaattgtatggctggtgccagatgagacacccaagtaagcgaagagaagagaagttccagaaatagatctaagtctatgtaagacatcagtgtgtggtaaaggtggcatttcagcatggttggggaaaagagtggcttccaacaactggaggacccaggacaagacaggttcagagtccttgagccagtgcagtcattttaattggtccagtctcagaaataggactgcctctctcttgtcatctctatgctatggttgggacaaggggacaaggggccatggtgaggggttggcgggagcaatggaggctgctcctgagttaaagaaagctccgcctgagttgcaagaaggaaactcctcagagctctctctgctcacctccaaagatgagtgattctgcagcgccaggagtcactgaacgggctccctgcccttccctcatctgttgagggggagacaagttggtgagcttagctctcagaaccaaatctgccacttactcctggagcccttgtctagaggacagaaaagaagctatgtggatgatgcagtcccaaagtagaaaaaagtatacattacagatatatttactatgttctgtttgatgttgttttttgcttttttttttaaaccacaaacatttcagaaccacactgcacgagtcagaagagccagcgattgaaagcataaccattgcatagtattaaatgaacagagatggtgagttctttatttacaattattgtctagataaaaaaattcataaaaacagatgaatggtcataaattatttaccccctaatggagtgaactgccaaacgtaccccatgctgctagatataggacgcagagtgcaagctttatgtactacagtgagttttgacaaaccaaccatttcgtgtgtgtgtgtgtgtatgtgtgcaagtgtgagagtgagggggtgcatgtgtgcaagcatccttcattcctgacaagagaagaccaacgctaatgttggcattcttccatcgctccctgttccctaagccaggctccactgagaacccctcctggctccgaatgaacatggagcatggtgtgcaaacacagctatcctgatgtcatggaacgaggtcacggacacatgactgatcaaagaagtggggagatggaaaactgtgagaaaggaaactccaaaaaacaccatgttccaaggctgccccatgttttacacgtgcagatctttccttccttgtaggagagcagtgggctggctttggtggcgtttgtactggaatccaataagcacatctgagggctggtcacccctttggttatgcagttcctctcctggatacattcagagatacttcttcacgacattcaggtgatgcgctcttgaaggtcctccttccaggaggattttgccaggtgggatgggctgactttgaaccccaaaccctcaagtttttccaccgccatccagatgtaggccctcccagttgactatggctcttttcccgagtggctctcatcttgtttgtggaagagttctctgggcctggagaagggaaggggctgggctgacacagccatcgtgaggagggtcagcatgaggaatggattttgcaagagaggcggaaagtgtttggttttcctcgaagcatgggacatcatcgatcatggtattcaaaatgtcttttgcactgtacaagtttatggaaaaaagatcatatgctgaaaagtctcaaagcaaactttgtattaaatacaaaagttcttttatgaaaaacgctgagacccacaaagtgcttagcagttaagaggctgacatccaattaaataagctcttattaagtgggattactagtgctgttgtcttggggaaaaaataaccaccttttctcacctgtgatactgtagggtttcagaatggctttctgtttgggaaagcaagacttgctgttaaaaggctacagtatatattgtgactacaggaagacaatttggtttaaaatcacactgagtacatctcaatatacacatcataaggttcattcggatctaaatagtgcagagaaaaaggctattcttct

SEQ ID NO: 97860 - DNA, 51270 bp, Homo sapiens
ctgctagtaatggaagtaatagaagcttcgggtgggaagaggcaggcacaagcccctctccagactcaaagcatggtcagggttaaggcatctttatctccagagcggtacccagaagaatactgaaaggagtcgggatgtcagaaactatgtcccgttataaatggcagtacagaatattggtgctctagagaccagaagagggagcagtagctcccctgtgggtcaagggctgagaaaaggcttcactgaggagatagaacttgacattgttcaatctgaaaatggttgagccaatccgtgggcccttgaatactgagaaactgctgagagatgttgggtaatcatttctaatacctaccaggttgggcttatcaggtagtgtgaattaggattatctgggacgcgtcctgatatgtccgtgttagtagagcaggtagcaaatagattgctctcctcagcttaactgaaatctatgtagtctgcccacctctaccaaagttgagattagggcagctcccaagaactgaaaaaatgtgccactctacccaactccttgtgactgcccttgtggtcagatccggcctggcagttagtagggactctctcggatgagaaagattgtgtttcactgcccatgagttagcatgggaaggaattgtgtcacatcttgtcccacaggtggagttgtttgagtttaagggagaagatctgacggaagaggaagatggcggaatcattcgcagaatacagactcgcggtgaaggctatgctaagcccaatgagggtgctatcgtggagggtgagacagtacagtctgggctttcaattctcattctgatatttaggccttgtgtggctttgggcaagacacttccgttctccgagcctatcttcttgtccataaaatgaggggttggaccatattctcttcatatcactccagatttgagaacacaggagaatcttgggatgatgggggtgatgcagggaggctgatggcatccttcctcagtcacctgccctcttacaactctggtacactgcctctctttcatgccagttgcactggaagggtactacaaggacaagctctttgaccagcgggagctccgctttgagattggcgagggggagaacctggatctgccttatggtctggagagggccattcagcgcatggagaaaggagaacattccatcgtgtacctcaagcccaggtgaggggtgggcacttcgtagggtaggcaggcaggcaaaccaagatcaaagatataaaatgaattgtagaaccagctgtttgtatcctttttaactctggccacaccaaacatacaccattatgatatcctcagtgtacttagaagtatggcccaattgtctacatctccttggatctaagcccagtcttttcagtcatagttgctacagattctctcctctgccatcaagattttcctctcccattaattcatttcagtcattactgaaacagctactacatgccaggcactgctgaaaattcctatagggcttcagagactaatagaacattgtttctgccttctaattctagctcattgtttagtgaggtgctatttaaattagtaatcacactgctgcctggctgtaagttattagaagggtatgaaggatgctgagggaccatctgacagtgtgaagaggccagggaagatttgccaaacatttgaaccaagtctcaagggatgggaaggtactttccaggaaatggacaggaagccttttcagcctggagcaggttaagtgttgccaagatgatacatagtgtttttcacccctccagctatgcttttggcagtgttgggaaggaaaagttccaaatcccaccaaatgctgagctgaaatatgaattacacctcaagagttttgaaaaggtaagtttgctcagggtcttcccatctaaagtcaagttccaccctgtacgtgactctggggtagctgacaactttgtttctctcctggggtgtggcaggccaaggagtcttgggagatgaattcagaagagaagctggaacagagcaccatagtgaaagagcggggcactgtgtacttcaaggtgagccaacagtcattgtcctaaggacactcccaggaagagttgctctgagcctccccttcccttggtgactgagatcattttctgccaagaagtggacaggttggcacctgccatcttcacttcatatatgtgagcttgctggccttgccagtgggaagggtgggagcaggaacctcttgtggccatgtgtcactgatgtctgcagggtataagagcctagtaccactgaaactgtgccaggtgcctgagcctctctcccattccaggaaggtaaatacaagcaagctttactacagtataagaagatcgtgtcttggctggaatatgagtctagtttttccaatgaggaagcacagaaagcacaggcccttcgactggcctctcacctcaacctggccatgtgtcatctgaaactacaggccttctctgctgccattgaaagctgtaacaaggtgaggccccctcagaggtcatggaagcagcattcacaggcagagttgggtgagctgccagcatgtctgaaacttccccttggtgactagggcagggatagcagggtggatcagtgggagctctgaggttacagaccaaaggcacggatgcaagtattcatagcaagaaccttagctttggtgggaagcagttggcaagaaggaggaggacacggaatgggaagaatcacataaagagttttcttccaccttggttcttagcctctccgcttacctacttgctttattctaaagtgaatgttaatgtctgaagtctttatttcatccaaagacctgctgtcttccctctctgcctgttggattaaatgaggttccttcctagaccctggattgttccatttaatgcctcaggccttgttcttcctggggtgcagccagccacttgcattcctcctcatcctcctgaggggtacctttggaacccagtctaggccagatgagctacaagccctgagctcccacaatgtggcttcctctctgcattctttaggccctagaactggacagcaacaacgagaagggcctcttccgccggggagaggcccacctggccgtgaatgactttgaactggcacgggctgatttccagaaggtcctgcagctctaccccaacaacaaagccgccaagacccagctggctgtgtgccagcagcggatccgaaggcagcttgcccgggagaagaagctctatgccaatatgtttgagaggctggctgaggaggagaacaaggtgaggattggggtggggaacagttggaatagcatccctccacttaacctggctactgtgggctctttgtgcctttggttgtctgtgccaatcccggaaaccagaagttgccttttccctggagcattaaggagcacgtgttcctgctgttggggccagtgttctgtgatcagtgcgggaaacctacccacaagccccagaagttgggttggttgccctgagtgtaattcccgatttatgttttcttgtgggccaggcgccgtggctcacacctgcaatcccagcactttgcagagccaaagtgggaggatcacttgaacccagtaggtagagacctcagtgacttaggatggcaccactgcaccccagcctgagtgacaaaatgaaaccccatctcaaaaaaagaaaagcgagatgctttttgtgtgtgattaaataaataatacacttagttaaattcaaactgtaccaaagtatacagtcaagtctgcctcccccaccagaagcagctgccccttcagggtcttggatggtccagtgtattgcgtcaaggcacaggcagacgttcctgttgcttcctccctttcccctaacacaggcaacgtgctccacctatgatttggcgcatactatgcttttttcacgtaatagtagctggaggcttattttacatccgtatttaaagaacttttacattctttcttaggcttacattgtattccattgtatggatatggcttgtcttagtcaatcagtccctttttagtcttccagtggttttattttttttctttttctgagacagagtttcgttcttgttgcccaggctggagtgcaatggcatgatcttggctcactgcaaactccacctcctgggttcaagcgattctcctgcctcggcctcccgagtagctgggattacaggcgcccgccaccacacccggctaatttttgtatttttagtacagacgaagtttcatcatgttgaccaggctctcgaactcctgactttagtgatctgcccacccctgcctcccaaagtggtgggattacaggtgtgagccaccacacccagccagtcttaaacagtgttctaaaccagcactgtccagtagaaatacagtatcaaccacatgtaattcaaaattttctggtaaccatgttaaaaaggtgaaaaacaaatggaattaaattttagttgcatttgtgtatttttcaaaccatcttcaaaatccaatgtatattttgcactaaaaacacgagtttgaactagccacttacagtagtggctaccatacgggacagtgctgcttagaacagcattgcagtgaataacctcatgagttcataatttgtacatatacaagtgttctgttttgttttgtttgagacagtgtctcttgccctgccgcccaggctggagtgcagtggcacagtctcagttcactgtaacctctgcctccagggctcaagtgatcctcttgtctcagcctcccgagtagctgggactacaggtgcatgccaccacgcccaggtaatttttgtaatttttgttgagatgaggtttcaccatgttgcccaggctgatctcaaacttctgggctcaagcaatctgaccacctcagcctcccaaagtgctgggattacaggcataagccaccaggcttggcctatacaggtatagctttaggacagatgtaggagaatgggtgtatctgtgtaattctgctggaaattaagtgtgtgttttttcacttgggaagtcagcccgtttgctgttcatcttccttgcaggccaaggcagaggcttcctcaggagaccatcccactgacacagagatgaaggaggagcagaagagcaacacggcagggagccagtctcaggtggagacagaagcatagcccctctccaccagccctactcctgcggctgcctgccccccagtctccccactccaccctgttagttttgtaaaaactgaagaattttgagtgaattagacctttatttttctatctggttggatggtggctttaggggaagggggaaaggtgtaggctgggggattgaggtggggaatcattttagctggtgtcagcccctcttcccttcctccattgcacatgaacatatgtccatccatatatattcatcagaatgttaatttattttgctccctctgttaggtccattttctaagggtagaagaggcaagtggtagggatgaggtctgataagaacccagggtggagagggagactcctgggcagccgttttcctcatcctttccctctcccagtccatttccaaatgtggcctccatgtgggtgctagggacatgggaaaaaccactgctatgccatttcttctctctgttcccttcctcacccccgacggtgtggctgatgatgtcttctggtgtcatggtgaccaccccctgttccctgttctggtatttcccctgtcagtttcccctctcggccaggttgtgtcccaaaatcccctcagcctcttctctgcacgttgctgaaggtccaggcttgcctcaagttccatgcttgagcaataaagtggaaacaataaaacctgggtgtcagacaaccctttctgttcagccttggagtggtgggtatgggtgggtacataatgggtagtagcacaatcaaggggtcacccacttagttccagttgagcttaaataagtgcagcatctcatgtagatgccatagttgggcaggaagcagccccaccatgcatggcttcctgagcactgcacaggctgccgctgggatttgtgtctatggcttcgcccaaggttcccagcactccctccctccagcaacctggcagttttagtgcctctggttttcttccctgacacttaggaagacgaaagtataaagatctagaagactgggacaccatgcatgttcattttgaagttggaattggtcttctgcctacctctgatctggcagaggtatctgcattttggtttgttaacaaggtaaaactcctggtgtcactgacctcctcctgtcagataacttacatgattaaggttaagagtaaagcagagtgttcacgtccagcttccttctcagccttaacaggaaaaggcttgtgctttttttctaactatgctttgacccttaactcctatggcatgatggggccctgggagaagccaggcagcacaagccagtcatgctgagctgcctccagataatcctggctccaggccagagcccgtgtctgccctcatccctctctcctactgtgagctctccagtcctttcccaacagcgatgtggttgtctgcttagccacatgcctgtatagttccttccagaagaaatgtataatggtggaagatgtatttctgtgtgaaaattttcaccaagtcatacaacacagctgatgctggagccaggattaaaattggggtgtacaagtctcccagtgtgagtatcccttgagcccaagacaccaaggatgcagagaactgtgactgtgccactgcacgccagcctgggcaagagagtgagaccatctcttttttaaaaaagtccctgtgtaactgctttcttactgggcttacctcacatcacagccctgtgtttgtggtttgtgtctgggtcctcttggtatttcaaaagtagtagattcttacgcctgcagccaacaataatcactaactcaagcatttatggagtaagcctagcactgtactgacagcatcacatgagtgaaactgaatccttgcaaccatcctacaaagaaggtataactttaataaccctatttacagataagaaaaccaagactcagaagttaaatggaaaggtgaggtctctgaactaatccagactctcccatgaggttcctttggcaagtcctgggcttctgtcctcatctgcaaaatcgaaagcattcctgaggtttcttccagctctgcatcctgtaggattccaagaatgtaaaactgcatgtaaccgtggaacatctagagataagtcttagtttatgtaacattaaaactgtctagtgaggatgttttgttaaaatgcctacaagtctttcagcctaaaaataatcctgccacatactcaagtctgccctgggtcagtgctacaagttcatttcccagtcagttgtccctgcctaccgacacttaaatctttctatatgcagagaaatgtgcctgaagaaagaaaagttagtagcaagcagtactgtgagcttttaacaagctttgcaagtggtctctagaaaaatttaaaatagggtttatcttgccctagtgctggttctaacatcgagttccatgaattttatctcccaagtatttctactccctccatactagtaccgctccctcccatcaccatgcactccagcctgctctcctgcaaatcccaggctcctatctgggattccctcctgcccctcctgcagttcactctgtactgcatcccaatcgtgtccctccgagtacttaaatcactttcaatgattacccatcccatttaggctaaagaatccttatcatggcccacaaaaccctgcaaggcttggcaaagtgcacttaacacttgccctcactctatgccagcttcgccaccctgagggtgaatggaggactgtattccatttccattggagaaaaaatatgtgaaaggcactttatgcaggactagtaaagtgtagtatctttttagaaaatgtcattactggaaaaagttagaaagcagaacttctcaaaccttattcctgttacgtctcagtgactaattttccctttccaaatgcaaaacacctcagaaccttaaaacaagttgaaacgacaatgcattaagggcagtgctgaatacaaccaatgtaagagtctggacattgtaagtaaggaaaatttgttctctttctggaattcattattgctgccttatggctacagttccccagctgtttgccaacctcagatgatgtggatgcattaactatccccagttagaaaacctagaaataataaaaacattaatttatcctgtgctaaataacactaccaatttttttaatttaatttattttctttttttttttttggagatggagtcttgctgtgttccccaggctggagtgcagtggcgcaatcttggctcactggaacctccacgtcctaggttcaagcaattctctctcagccttccaagtggctgggaccacaggcgcacgccaccacgcctggctaatttttgtatttttagtagagacagggttttgccatattgatcaggctggtcttgaactcctgacctcaggtgatccacccgccttggcctcctaaagtgctggaattacaggcgtgagccactgcgcccagcctattttttttttcttttttttgtttttttgtttgtttgtttgtttaagacagggtctcactattttgcccaggctcagtgcagtgatgcagttacagctcactgcagcctcgacctcctgggctcaagagatcctcccaactcagcctccggagtagctgggagggactacaggcacatggcaccatgcccagctttttttttttttttccrgacagagtgtagctcttgttgcccaggctggagtgcaatggcrcaatctcagctcaccgcaacatgtgcctcccaggttcaagcaataatcctgcctcagcctcctgagtagctgggattacaagtgcctactaccatgcccagctaatttttgtacttttaatagwgatggggtttcaccatgttggccaggctggtctcgaactcctgacctcaggagatctgcctgcctaagcctcctaaagtgctgggattacaggcgtgagccattgtgccctgccatgctataccaatttgagaggcaaagtaagagtgaatggtctcagggatgatcaagaaaaagcaatgcctttgtgaatgtcaagggtcctgtggctagaagagaggatcagcatgtatattctatattccattggatcttcagtctcctgttttagaagtgcatcagacataaactgatttgtatttttttaggtgaaattcacatttttaggtgaaacaaagttaaccattttaaattcaacagtttggtggccatttagtctttacagtgttaatctagttccaaaacgtcttcctcattctttgtgttttaaccctgtctcctaatgtttaagtgacacagtgacagtgaacttctcatccatcagtagtcttgagcagacaatcctgatgagttagttctaggattaaagcgtcccagagttggtggtgcattttaacaggggcaaacttgaggaaggcagtgagacttagtagagctctgaataacagcatttcacmcggtgcagagctgccccacactactctgccagtttctaggacaaaaaacctaacttttccaacagtttaatatgctaaggtgtaccatgaatgagagaggggagggggaaatggtgatataagccaaaccaagcccattgagaagccatggaccctgcccccaaggtggtgaggctctgggcctcatgttttgaaagatacttggagaccctgtttcttacctgggcaccctgggcaaacacaaaccattctgtctactgttggaggatgaagtacacaaagaatcttcctagaaatgcttcccactggctgggcgcagtggctcacgcctgtaatcccatcactttgggaagccaaggcaggcggatcacgaggtcaggagatcaagaccatcctggctaacacggtgaaaccccgtctctactaaaaatacacacacaaaaaaaaaattagctgggtgtggtggcgggagcctgtagtcccagttactggggaggctgaggcaggagaatggtgtgaacctgggaggtggagcttgcagtgagtcaagagcgcgccactgcacttcagcctgagcgacagagtaagactccatcttaaaaaaaaaaaaaaagaaagaaacgctccccacttaatccccccatcccctcctatggagatttctattgtttgtaaagaatatgccactcatataactgtatccatgtcacctaaccaggaagataccctaattagacagttttggggagcaagacaaaaaccagcagaaagagtgcttggcttagacaagatggagtttagatggtgcccaaagagacctagcaaccttccaactagaaaggggccaagaccaggagtgctctttgtggagccagggatctgtccatatggcttgacaatgcctagtcatacaaaacactcactggacttaaagtaactgatgcaaggtggggagaggcacaggcatggaaggacttcacttgtgccctatttcttggagacctatctttcctgcctaactttatttggctctcttgacaaaagccaaaaagtgtggtatagaagttgtgatcatacgtctaggcatggtggcctgtaatcccagcactttgggaggccgagcactttgatcacctgaggtcaagagttcaagaccagcctggccaacatggtgaaaccctgtctctactacaaaaaaaattatctgggcatggtcgtggacacctgtaatcccagctactcgggaggctgaggcaggagaatcgcttgaacccgggaggcggaggttgcggtgagccaagatcgcaccattgcactccagcctgggcaagaagagtgaaactcaaaaaagtgaaaaagaaggccagacacagtggctcacgcctgtaatcccagcactttgggaggctgaggtgggtggatcatgaggtcaggagattgagaccatcctggctaacacagtgaaacccattctctactaaaaatacaaaaaattagccgggtgtggtggcgggtgcctgtagtctcagcttctcgggaggctgaggcaggacaatggcgtgaacccggagggcagagcttgcagtgagctgagatcgtgccactgcactcagcctaggcgacagagcgagactccatctcaaaaaaaaaaaaaagtaaaaaagaagttgtgatcataattacatgaccttcatggcaaacatattctacaattaaaaacagacaccccgtgtcacagaaagatccagaccaagaaacccaaatgatgaggaagataaaactaaggcactggggaatcctgggttggggtctgatcttagataactgggtcaggccaaggcacctgatgaaagaagctgggtgatctcatctcttgttctgagttatttagtaatatatttttttaaaaccacttcagaggccgggcgtggtggctcatgcctataatctcagcactttgggaggccgaggcaggcagatcacaaggtcaggagttcaagaccagcctggccaatatggtgaaaccccgtctctactaaaaatacaaaaacaattggctgggcgtggtggcagtctcctgtagtcccagctactcaggaggctaaggcaggagaatcgcttgaacccgggaggcggaggttgcagtgagccgagatcgtgtcattgcactccagcctgggtgacagagggagactgcctcagaaaaaaagaaagaaagaaagaaaaaaccatttcagaggtaaagttttttttttttttttttttttggagacagagtctcactttcacccagcctggagtgcagtgacaccaccttggctcactgcaacctctgcctcttgggctcaggagatcttcccgcctcagcctcctgagtagctgggaccacaggcatgcaccactatgcccagctaatttttgcatttttggtggagtcatggttttgccatgttgtccaggctggtcttgaactcctgagctcaagtgatctgcctgcctcagtctccaaaagtgctggaattacaggcatgagcctccacagccaacctagaggtgaacattttgatactggttttggttttcccaccccttaaaggcctaatatgaagcttaggatttgaactaggatgagagaatagagatggggtagaacacggggtgagggagcatgcaactgctctgtaaatgagaaaatgtattcaaagcaccaggaatacctgtgggacccagtgccttttaatggacctggccatcccacagtacacaaccagaaatatgaacttgtaacacagttcagcttcagaatatatctgcagtctccagtatttgtccagacttcctccagtttactgttctgacctgctgttctttcttacctggctgtcagatccactgggacatctaggaaaaaatctgccacccccttcccccaagaaaaggtcttgccctccagcctcctcccactatgtacagacatagaaagtagggacaagccgggcatggtggctcacgcttgtaatcccacctacctgggaggctgagacacaagatctcgagcctgggaggcggaggttgcaatgagcccagatcgcaccactgcactccagagcaagactctcaaagaaaaaaaagaaagaaaaagaaaaaaggggccgggcgcagtggctcacgcctgtaattccagcactttgggaggccgaggcgggcagatcaagaggtcaagagatcaagaccattctggccaacatggtgaaaccccgtctctactaaaagtacaaaaattagctgggcggccgggcgccggtggctcatgcctgtaatcccagcactttggaaggccgaggcgggtggatcacgaggtcaggagatcgagaccatcctggctaacacggtgaaacgccgtctctactaaaaatacaaaaaattctccttgagtggtagcgggcgcttgtagtcccagctactccggaggctgaggcaggagaatggcttgagcccgggaggcggagcttgcagcgagccgagatcgcaccactgcactccagcctgggtgacagagcgagactccgtctcaaaaaaaaaawaaaataaaataaaataaaataaaaaattagctgggcgtggtggcgctcgcctgtagtctcagctactcgggaggctgaggcaggagaactgcttgaacctgggaggcagaggttgcagtgagccgagattgcgccactgcactacagcctgggcaacagagcgagactctgtctcaaaaaaaaataaaaataaaaataaaaaaaaaaaagataaaaaggaacagcccctggtccaaaatcccagataaggyagaatcatttttttttttttttgaaacaccaagtgcgagtcagcctgggtttttagacctaaatctaaaaatgtattgaacacctgtatgatttcataaatattgccctgattgacgaggcaccccaaagaaaggcagaactggattcaacatggaaagaaagtatcccaagaagccagccatgagagtgacagtcccatctgtgctacaagagtaaggctactgaggttgagatgcaagagctttgtgctggggggccacaagacagagcagatccggaatccaggcaaccttcacttccagcctgaagactctcctacgaactatgatagtaaatgatggagaggccctagggtttgggatcaaacaattctggtttgagcacgcaccccgccccacaatccttccttctgccattttacttaatcttgctgaacctgttttcctcagccaaaaaaaaaaaaagctcgcatagtggctgaactaattatgtgaaatatgtgaaatgtgctttgcagcaggtggcttttaaactattgaccagaaaacacatacactgaaaaaaaaaattttttttacattataagccagtatacacatataagtatatacaattgaaacaagagtttcacaaaaactgtacttaccttactacctgggagtcacttggtatattactattgtatttaattttttatatgctgattgcaactcactacattgttttcactcctaatgggtagttttttaaaarcacttttcaaaaccatgcaattatcagttattacgaagattagtaagattctcaggaatggtctgatggctaggaatcytcattgccagggaaacaaaggaaaaaggtcaaggttattaggtcaagcccttgggagccctgttgccaagggaacagatcgacccccgtcagggttggtttacccacggtctgcagccctgtggagaaaaggagtggcccgtgggcctgtcactcacatcagagttgggaagcccgcctccaagcccggaagacccgcctcctctgtaaggttaaaggaggaagaggcagagattggagrttcaggcagtgacgtaacttgctgccttaggtggccttccgctctggcggctgtcgcgacgggggttcagggaatatttactgggcctctccgctccctctgctcttggaggtgccatgaggtcagttagctacgtgcagcgcgtggcgctggagttcagcgggagcctcttcccgcacgcaatctgcctcggagacgttgataacgatacggtaggtgcatgcgcaccgcaagagacagcctggatctgtgcagggacggggcaagggaagtggaagaggccgcccgagcgtgccacgtgagcgtgagcatgcgcgctgtggctagtttggagcgctagagagaaaaactttattgatagcttcagtgttcgtggttggttttgttccttgggaggttttgtttgttttttgagacaggctccgtctgtcacccaggctggagtgcagtggcttgatttcggctcaccgcaacctctgcctcccgggctcgagcgattctcctacctcagcctcccaaggggctgggattacaggcgcccgccaccacgcccgactaatttttgtgtttttagtagaggtggggtttcaccatgttggcccaaagtgctgggactacaggcctgagccatcgtgcccagcccttctcgttttttaaataaattaccacaggtcaagcaggtaaaacaatgcctggcacacagtttagtgctcacttaagtgttagtggtggtggtggtggtgttagtattttattctgtttttctgcaaatctttactgaactgctcattatgcaccaaggactctgctacattctaggaattcaaaaatgaacgagagagttccagtcctcagatagctcataatcaagctgtgtaatagtcaccggataataaaatgtaatgagatgcattgactaaagtatggagaggattctccggtggagcattaaagggaatagtgtctgatgctcttttttttgcagactttatcttttcatttatcatctatttcatagttctaatgcaaagcactgtattgcccccttctaccctctgccctatcttcctactcggcctccctgcttcacagttccttaactgtcctgtacttatttcccaccgccccctagtgctgtgatgcagaaggtatcttatgaggccttttttggctctaccctctctggggaggaaagagttattctcataaatttgtgttatgttttctgggctttcgtgtttcttcatgaactgccaagcagtccaattttatgagaaaattagaggaggaatttttaaaatttttttgttttttatagagacagggtctcactctgttgcccaggctggagtgcagtggtgcaatcgtagctcactgcagccttgaactcctgggctcaaatgattctactgccccaacctcctgcgtagctgggactacaggtgcctgccaccatgtctggctaatttttttaaagttttgtagagatgaggtctcactgtgttaaccaggctgttctcaaacctctggcttcaagcagtacactggcctcagtgtcccaaagtgctggaattacaggtgtaagcaacctcaccaggccatacttttaaacagtaaattgacaaagcaccttcagatatacattattttccattttatctgattgccttctttgtttaaaagcattccctttttttataggtttatagcaccagcttttttgaaattgtacttatctgaaagaattacactattacacactcacttctgcaatgttagatatactaccattttttttcacctgagttgtaagctccattactataagctccataggggtaggaatgttttaatctgttttttccactgctatattctcaacacttagaacaatgtaggcactggccgggtgtgatggctcacgcctgtaatctcagcactttgggaagctgagatggaaggatcatttgagcctaggagttcgagaccagcctgggcaacacagggaaactccgtctttacaaaaaaatagaaaaaattagccaggtgtggtggtgcatgcttgtagtcccggctactcaggaggctgaggcgagaggattacttgagcctaggaagttgaggctgcagtgagccatgatcacactacggtactccagcttgagcaacagagtgagaccctgtctcaaacaaacaacaaaaaaacagaaagaaaagaaataagaaacgtcaagtaataggtttgatttaaaaaaaaccagttttatgcttctgtgatctgatattctcaccagaaagtcccataacaattataacaattaaaaaataaagattttttttttttttgagacggagtttcactcttattgtccaggctggagtgcagtgacacaatctcggctcactgcaacctctgcctcccaggttcaagcgaaccttggcctgcctcggcctcccaaaagtagctgggattacaggcgtgagccaccgcgcccagccagaaatcaaagattcaaataaattccaatttgtttctaacttttccttactgttcacctgtttatctctgttgcctttagaactaaatttcttgagagtattagttcaatgtattctgggaacaggaaggggatgttggctgtacccccaagaggagatcataaagcagtttgcggaagtggggtttgaagccacttggttaacatcgtgagcccctgtaaagggcagctacccagatacaaatggtggagaggctccatacagggacctcccttctctagagcttagccatcacttgagggcactggaggcccagagtggggagcagccccttcaggctctgccccctcaggccccaccatcctttgtggttcccacatacacctcaagatcaaaaggccttgctagaggagggaaggccccaagagttcacattgtctttttatttggcccctgattaaacatgaggtctgaagttagattctccaaaactccaccatcttgggctgttttcaaaacatgtcccatttgtaatgggcaaattcaaagagccaaagtcaggcatgtgtaacctagagctgttcaggtcgcatacttttctggggtgggccatagattgtgtgtagcctcaattcctgtaacctctcctgccccctaacacacacacccctaaatggaaataaagaactgggaaactatggttgtgttggcctcaaaagattgttttgttttgttttttgagacagggtcttgttctgtcacccaggctggactgcaatggcacgatcatggctcactgcagcttcaggttcctgagctcaagtgatcctccttcctcagcctcctgagtagctgaagctgcaggtgtgcaccaccacacctggataattttttttttttttttttgagacagagtctcgctctgtcatcaggctggagtgcagtggcacgatctcggctcactgcaacctccacctcctgggttcaggcagttctcctgcctcagcctcccgagtagctgggattacaggtgtgtaccaccacgctcagctaatttttgtatttttagtacaaacrgggttttaccatgttggccaggctggtctcgaactcctgacctcatgtgatccacccgcctcggcctcccaaagtgctgggattatcggcgtgagtcaccgcacacagcctttttttttttttttttgagacagagtctcgctctgtcgcccaggctggagtgcagtggtacagtcttggctcactgcaagctctgcctcccrggttcacaccattctcctgcctcagcctcccgagtagctgggaccacaggcgcccgccaccatgcccggctaattttttgtagttttaatagaaacagggtttcactgtgttagctaggatggtctcaatctcctgacctcatgatccgcccgccttggccttccaaaatgctgggattacaggcatgagccactgcgcctggcctttttttcttttttttttttttttttgagagacagggtctcactctgtcacccaggctagagtacagtggtgcagtcttgctcactcactgcaacctctacctcccaggctcaagcaattctcctgcctcggtgtcccgagtagttgggaccacaggcatgcaccactatgcttgggtaatttttgtattttttgtagagacaaggtttcaccatgttggctaggctggtctcgaattcctgagctcaaccaaccaatccacccgcctccacctcccaaagtgctgggattataggcatgagccactgcacctggcctcacctggcaaatttttaaatttttttgtagaaatgggatcttgccatgttgcccaggctggtctctaactcttggcctcaagtgatccacccacctccaccacccaaagtagtgggattacaagtgtgagtcattgcacctggccagacttttaataaagtagatgaagatacaagttgaggtcttgtgattacccttggctaggctaagtagagaagagcttgaagaggttcagcagagtcccatcctaacgctttcttctctctccatttgaagttaaatgaactggtggtgggagacaccagcgggaaggtgtctgtgtataaaaatgatgacagtcggccatggctcacctgttcctgccagggaatggtcagtattcacttccctgggcctggaggggggaagggatcccttctgtccagggaccrcctagggtgagcmccacacaggtgctcacccatgtgtcctgactccctagctactgggcccagccactgacttgcagccaatttgattcagggagggcagcccccagctagtgctcccatctgtcctcacacacgcgtgcgtgggctggggtgtttttgtgtcgtggagtactccttgacactttatggaagttgcctaaggttgtctaatcttaaagtatagtcaaaaatgggggcaataatttgagtaagtctagaaatgtgatagcctagctctattaaatacagagtttctattttattttaagtgcaggttgtcttaaccgcctcaggtcttcatgttgctgtctgggtaaaccaaacctacagcacagtaacgccgttaataaagaccatcaccatggttcatatggcgaaagtcttcagtgagcgatggtgattagaaaacctgcccgctcctcctgcttcacagagatcagggagtactggtctcccttagcgtctccctgagcctccctttctctcttacagctgacttgcgttggggttggagacgtgtgtaataaaggaaaggtaagaactataggggaccttccttggttcttagctcacagtggaaatcagttgaaggttaaaggcttcagctctgacctctgtgatctgatgatcaggcttgtttccaaaactccctccccagtccatctctactatacctctgtttgtcctagaacctgttggtggcagtgagtgctgaaggctggtttcatttgtttgacctgacacctgccaaggtgttggatgcttctgggcaccacgagacactaatcggagaggagcagcgtccagtcttcaagcagcacatccctgccaacaccaaggtcatgctgatcagcgacatcggtgggcatgcctacctttgcaggcagccaggagagtaggagtcagtggatactagagcatatcccaagggattggggtgagagggagaatccgtattcatgtatgcatttgttatgtgctgagctcccatgataagccaggcatcactcaaggcactggaattgccatagtgaataaatagacaaaaattgctgccctcctgggccttattatgaagaaacagaaaagaaacaatataggctaggtgtgctgcctctcgcctgtgataccaacgctttgggaggctgagatgggaggatcacttgaggccaggagttccaggctgtagtgagctatgatctcaccactgcactccactccagcgtgggaccctgtctctatttaaaaaaggaaaagaaaagaaaaactatacattttgtaagataattaagtagtatattagaaggtagtaagtacacggccagacgtgatggctcatccctataatcccacgactttgggaggccaaggcaggcagatcacttgagttcaggagtttgagaccagcctggcccacacggtgaaactctgtccctactaaaaatacaaaaagtagccaggcatggtggcaggcacctgttatcccagctactcaggagactgaggcaggagaatcgcttgaacccgggagacggatgttgcagtgacccaggatcatgccactgcactctagcctaggcaacagactccgtctccaaaaaaaaaaagaaaataagtgcagccgaccacggtggttcacgcctgtaatcccagcacttcgagagcactttgagaggctaaggcaggcggatcccttaagctcaggtgttcgagaccagcctgaccaacatagtgaaaccccgtctccagtaaaaatacaaaaattgggctgggcacggtggctcacgcctgtaatcccaacactttgggaagccgaggagggcagaccacaaggtcaggagaccgagaccatcctggctaacacagtgaaaccccgtctctactaaaaatacaaaaaaaaaattaaccgggcatggtggtgggcacctgtagtcccagctccttgggaggctgaggcaggagaatggcatgaacccaggaggcagagcttgcagtaagccgagatcgcgccactgcactccagcctaggcgagagagcgagactccgtctcaaaaaaaaaaaaaatgagctgagcgtggtggcatatgcctgtaatcccagctactctagaggccgaggcaggagaattgcttgagcccggaaggtggaggttacagtgagccaagattgtgccactgcactccagcctgggtgacaaagactctgtctcaaaaaaaaaaaaatatatagtaagtgcaatggagaaaataattcacagaaagagctagagtgtcgaggtagaggtagcaattttaaatggagatgttagggaaatcctcactgagaaggtaacatttggtgaaaaaaaaaaaaagtggcaagcaagggaaccatccagatagggggcttgtaggtggtgggagatacgtgggatgaattgggacactttgagttgcatgtttgagaagtaatatgaaggcagagagcggataggagctgcggaacagatggaccaaatggacgggcaagatgccgcaaacacaggcaggggygggggcagactgagggtgaagtgagtagcaccgcagatmgggtgtgaagccgcactggctggaaggtgccactgttagcagaggagcgggggctgctcgtgggactccagagcccatcttgtctttcatgcccacagatggagatgggtgtcgtgagctggtggtgggctacacagaccgtgtggtgcgagctttccgctgggaggagctaggtgagggtcctgaacatctgacagggcagctggtgtccctcaagaaatggatgctggagggtcaggtaagaagctgactctggggarcaaggccccagggagctgggaggaaggtctcctggaggaggtagtgggagagcagtcatgggacagggccagggtggggagaagtgaaaagtcaccttgtcaagagagatccaaagaccatttcaaatcaggggcttaggggaaattgctagtaacaggcaaagagaagggcatgttgggctaagaatgaggagtgtgaaggtaggtgtggagtgggccgcatcaggacctagaccccagctgggacatgcacaggggaaagcatgtggtctgtgtggagaggacggtgccaggcaggagccctggaaactcgaaatccttcctcctgctgctacccttgaagcccagagggctgttcccaggactgctgccctgcccctgcccccgcccccgcccacccaccgccccctgccgttctctgcagggacccacttccttctctctccgtctccctttaatcccattccctggtgcaggtggacagcctctcagtgactctggggccactgggtcttcctgaactgatggtgtctcagccaggttgtgcgtatgcaattctactgtgtacctggaaaaaggacactgggtcccctcctgcctctgaagggcccacrgatggtagtaggtaagggggtacaggccagtggatggtgtgggggtgcatggaagcaggatgggctcccagatgccacatggtagtaaaatgggtctgcagttggcagagctgcctcatctaggtcccaacccaagcacctttgccccactggggaagattactttaagaccaagggaatcctgggctctaactttgtagcacctgaaagaggtcctgagattccaacctggcagccccatscctgtcttttctgtttgccacatgggccagatagggtcagtggtaggtttctaagctgattcaaatcccagaagctcttgcagggataggggttacaaagggctggagagctcagctcacttggtctcccgcttgatcygtccacctgctgtgcacagggagaccccagctgcccgagacgtggtgctgcaccagacatctggccgtatccacaacaagaatgtctccactcacctaattggcaacatcaaacaaggtgaaagtgtggtgggtgtgagggagggagatgaggggtagccgtcagttctggaggagtggagatccatagctttcccctcatttcgagccctgtccttcccctgctgctgcagaacamccctctccccgtaggctctgaccttgccctgccctttacatattcttcctctggtcctcacaggccacggcactgagagtagtggctctggcctctttgccctgtgcaccctggatggtgagcaatgctaggatggggtgtgggggctgtatgcctgtagggtctgctcggggcctatcccacccacactcagcctgcctctcccccggcagggacactgaagctcatggaagaaatggaagaagcagacaagctgctgtggtcagtgcaggtggatcaccagctctttgccctggagaaactggatgtcaccgtgagtggaaaacctggcagagcagagcattcctgcgttttccacatggagagatgagatttggaataatcaggctattctcacatcccagggaactcccaacctttatctttagtctctgtctcttttttttttttccttttttttttttttgagacagggtctcccccctaccacctaggctggagtgcagtggcatgatcttggttcrctgcaaccttttctgctagactgaagccattctgtcacctcagcctcctgagaagctgggactacaggcgtgtgccaccacactgggctaactttcctaaactttttgtaaagatgagatctcactatatatggtttcaaactcctgggctcaagcaatcctctcgtcttagcctcccaaagtgttggaattacaggcatgagccactgtgcctggccgtaagtctctttagataggtctaaatccatctgaagcgagtttgtttcctcttactcgaccataattaatgctatactgtgctgttagaagtctgtcatttccataacttcagcagaagtagtagccccaaagaaaagttactgtaagagcctggaagtgtgttattcatcccaactccagaggcatattttgtaggtttttcttgtccatatatgaatctctatttaatatcactgtggcccctgaatcagcaggtaggggctatactttatattgccatcaggcatgcttgttggtttaggagaagaggcagacctgggtttgaatcctgattctgctgcctcctagctgagtggccttgggtgagtgactctatttctatgagctgaggtttcctcagtataaaattgcctacttcctagggtggctgtgagcattatgtgaggtggctcatttgacagttgcgtttactgccgaacccacgggtgaaattcctccccagctcgctgtttgtcatccagaatccagtccacagctcctttatgttccttttgtctctgtcctttttcagggcaacgggcatgaggaggtagttgcatgygcctgggatggacagacatatatcattgatcacaaccgcaccgtcgtccgcttccaagtggatgaaaatatccgtgccttctgtgcaggtgacccccgcccccatggcccctttctaaccacacttaagttagataggcgtgttaggcatgccagggaagtgtttgcccctcacttccctttctgacrtatcccctgatgtaagtcttcattcaccagtgagttcttcagctcttttgtttgggggtgaggggtgagtgatgtaagtcttcattcaccgtgagttcttcagctcttttgtttgggggtgaggggtggtcactacattgccatcttgacaattttaaataagaagaaataaaagacagtaacatctccaccccgaatattttaaagaatggaatgagtttctgtcatctgtctgggatgtgtgaagacatcaggaagttcttttccacctcagcatgccaggtctctgtgaagaaagttctcctagagcattttcattagttccaaatcaggggccttgggaggcagcactcactctctgggtgactgggggatgcatttggaaggagggattggcacctaagagaagctttactttctgatcgtgttttgctagtctcgcccttgggcgagcaatgccatccctcatcactccagggatatcactaagatgggaaaagcaataaatagcacctttttggatgctattctgcccgggttttgttactatggtttttctacatctgaagtgagccaggtcttttcccatcttacttgttttactgagttcccaacagagaagaaataacctttaatttttttcctgacatcagtgggaggatggaaagtgctgactcggaggtctgtgtcttgctgtctgccccccactgtcggcactgaaacttcctgacctttatctccctgccaacatcttccaggcctgtacgcctgcaaagagggccgcaacagcccctgcctcgtatatgtcactttcaaccagaagatctatgtgtactgggaggtgcagctggagcggatggagtctaccaatctggtgaarctgctggagaccaagccggagtaccacagcctgctgcaggagctgggcgtgggtgagtcccagaaaagccagtggcccgagtgcccaggagacccacagcatgctgcaggagctgggcgtgggtgagtcccagaaaagycagtggcccgggtgcccaggagacccacagcctcttacccacccyttcttggctctcagatcctgacgacctccctgtgactcgtgccctgcttcaccaaacgctctaccatccagaccagccaccacagtgtgctccctcaagcctccaggatcccacctagctgtacttgcctcatagctggtgaaggattcttctgaacccccaccctaccccctaaaggtatctgtggtattggcaggatagggaatatgcattacagaaatgcaggatttgactctgggcatgaaagatggcagcagccctagggtgaccgtgaactatagacctcgcagtcttttcggtgaaagaagagacaagttgaccctctgcccatttccttatggacctcacccatcatgccagcagggtcataggaccctggccttgttccaaatcatctgggacatgacccactccccactgtcactgtgttgaaaacagagacttgtttgtgtggccccaacacccataaggaaaccaggctttaggcccaggggagcagtggaggtaagggctccaccccatcttaagctctgtcttccgtggcacaattccaagttcttgacgttagtaattgttaaaggaatggcaaactgttttgttttgaaggatctttctacagtctggtcttacycatgttcctagcaaccctgagatgattttcttccatttaccaaagcagccgggtcagtgctttctcacgttgccgtattcttcaggtattagtcagcttcagaagccctgctcccatttttccacccacccattcccccataaaacagcttattgtctccaagacaatagacatttaaaatgtgatgcgggtttatgatccagaccacaatcagaattatatcttgggtcatttatgtgccgtctgttcttgattctctatgctctaaatcggtgtttttcaaactgtggttgcagtcctttggtggattatggccagcattttttaaataggtagaatagaataaagtaaaatagaaaatagcagagtacattgctctcagtgtaggtaagtattgttttgttagtcatatgtgcatgtgtgtactragtgccatgtaaaatgtattcctgctgtggtaagctgtggtcgaggagtttgaaagccattgctttcaaattcctctcaattatactgaccctagtcagatgggtcagcctgggcaagggcccacatttacatttcctttctgtaagggacaatgggcaattatcactcagctcttgataggcagggaggaagaccagagaagaacatcgacatagagaaacaagagtttattccaatggagaagcagctgagccgagggcttgccattgggcctggggtctgcagttacagaagcagcaggaggcagacaaggaaaggcacagcacaagacccaggaaagtggaccttgtggagcaaggcagtgagggcgaggaaagcttttaggattttgagaccaggtgctatggcacaagtgataagtgagccctctcctttccttctgagggcaggggaggcagctgagaaagggcaggggaggcagctgagaaagggcaggccaggtgtcacaggcagctccttgcatcccggttcttctctaacccagtcaaccccaggctcaagactgtttcagcccaacggtcccagttcccttgttcaggttagctgtaccactgtctttctctgctccttttttgtttgtttttggagacagggtctcactccttcacccaggctggagtccgatggcacgaacttggctcactacaacccccatctcccaggttcaagcaactcctatgcctcagccttccaagtagctgggattacaggtgttcaccaccatacctggctaatttttgtattttttagtagagatggggttttgccatattacccaggctggtctcaaactcctgacctcaagtgatccacccacctcagcctcccaaagtgctgggattacaggcatgagccattgcgcctggcctctttctttactcctaatccatgatttgagagactcaaaccagccagaaagactctcagggatctggcgtcttaaggttcgggttcttctcttcacagtgaattcaaaaaagcctctgtctcctgacagaccccaaactttaaaaaaaaaaaaaaagcctctgtctttttgctttggcaaagcctggcagggggttagaaagccactgattccaggacaatacaagcttaagctcaagaggccagagatggggataggaagaaggcctartgaggtggatagttctagaaatcagaaagaatgctgaataggtgaagtctgagtggtgacaacctcactgtcctgtctgcctcacaggagcagttctctacaaggctcttccacacacacacacgcaaggctcaggggctcggtgggtacaaaaagccagtggaaacggataaatacctatagcgttaatagcagaagtatgtccaaggttttgcacagggtaatcaaactaactggcttcagacatttgcagccacaggaaaaaatagctctcagccttatgagatggacattcctatactaactcccgctctttgttgtattgaattctggctgtttcttcccccactcaactgtgagcagatgtgcacagactccgagaggcagacaccaggaggtccagggacataggttggtgaggcatggcggtctagttgtgggagataatgaggcccagaaggtgtggtgagagacatggtggtgtgggaagttgagttgtgtttggggtggtattgggtgatggacaaggacagcagtcagcagagccttygacccagcccaagcaggcaccccattgtgcttaggttcctatctgtggtcttgatttggctttgcttttcttgggaggaagatgaatcagaatcctggcatcgtgggccctctagtgaaaactcgtcctggggagtaggacagctgctgagaagcagagaggaatgcggccagctggggaaaatgggacagcaggggtcagggaggtgattggaagggcagacaccrtagtccccagctacctggcttcaagagcccccgttccccacacgcctcttcttctaaggcaaggtctttccctctggggactgactgagacagcagtcactggccaggctcttggtacaaaggcaggaagggtagctctgagaacggggctttcagccgcagcactccgtgctccaggtcgatgcagcactgcggggtgtagagcagtcatgccaggtcacctcagcccgccacctrcctcccggcctgytccttttgttccccctcccacttcccacagcttccacctgccttttgctcttcccccatccccatttccctagactcctgttgaagggggtgacccagttctcytgatttttcacttggtggtaagtaaggaacctctaaggaagcaaagggacagttgcccatctctaagtcactctcatcagaacctggtccaggttccacacctgtgccttctactactttttcccartgctttgggtcaggccctgagtgggtgccttaccttgagagaaagcagagtctgcaggcccaggcagaattcaggrctctcagcatctataggaacaatttgaaaacagaagaggctgagggttcccagtggtcactgctgccctcctcttagccgttgctccttctctgcccaccccatccccagatccgaggacactggcacagagatgggggatagtcagaacatctctgggaactcctcgtgctgcagggastgaaagtctcagcctttgccccaccccaaagagaaaggtgaggtgagcaccagggstgttgcagaaggggggacttacccaccacctgtgccgagcacaccacagtctcctgccccagctgtagctccaactgctccacctgggttgggggcccaggggccaggtccccagctgaggcttttaggacccttttctctaacctgtggttgggaagcaagggttatggctaccacagcccctagagggttccaccccattaatcagcaggtgtccctctctactatrgkttcatctccaacccctgacctcacgtggggtstaaatccttgccttctctgccagagtcttctagccactcttttgttaaataacagctttattgagataaaatatgcaactgtcgtcactatctaatttgagaatattttcatcaccccraaaagaaaccctgtcccccacttgcttgtttgggccacattcttaccccaggcggctgagacatccagcagagatccgattgtattgggtgcctgtgtcaacggccactctaagcagctggtcctggcactaagaaagaagaatcgtggtgaatcagtgagtccctaggagaatgggttggaattggatccttcagtttcccagcccattgatgattccctcctagaaatgagtggagaaaatgaactgtctttaaaactggcttttatcggggccaggcgcggtagctcacgcctgtaatcccagcactttggaaggccgaggcgggtggatcacctgaggtcgggagttcaagaccagcctgaccagggtttagtagaaaccctgtctctactaaaaatacaaaattagctgggtgtggtggcgcatgcctgtaatcccagctactcrggaggctgaggcaggagaatcgcttgaacccgagaggcggaggttgtggtgagccaagatcacgccattacactccagcctgggcaacaagagcaaaactctgtctcaaaacaaacaaaaaaactggtttttatgagactcatacaataggggcagaactcccagataaataaatcaaaaraggaagtggaccaggtgcggtggctcatgcttgtagttctagcactttggaggcaagaggatcacttgaagccaggagttcaagaccagcctaggcaacatagcaagactctgtctctacaaaaaataaaatggaaaaaaaaaaagtggttatatgtgatgggttcataagtttggggaagatctgccagaaatggagaaacggtgatttgtttgtttagaggaatccttgggagtttgatggcctcctggttcgaaaactccaggttaggaatagaggaaggatgagaagactggaatccctgttaggaaactcagatatgagtaaccaagaagttcgctattggaaacaaaggaagacaacttcacctactttgggacatagacagacattttgatatacgcttggatatacacacacatcgttttctcattccaaacattcattgagtatttactataagatatgttaccggaaggtatatcaatgaatgctattcttcaggagtctaaaggaagtataatataactctactatatggcagaaagttttatggtctataaaaggatgtgaatgccctggccctgtggctcacacctatctataatccaagcactttgggaggccaaggtggaaggatcgcttgaggccaggagttcaggaccagcctgaccaacgtggtagtctaaaaatacaaaaaaagaattagccagctgtggtggcgcacacttgtaattttagctactcagaagactgaggtgggaggatcgcttgagtccaggaggttgaggctgcartgagctctgatcatgccactacactccagcctgggtgacagagtaagaatctgtctctaaaaaataaacaaaaggaccggaaaagtcgaggggtgcggtggctcacgcctgtaatcccagcactttgggaggccgaggtggatggatcacctgaggtcaggagtttgagaccagcctgaccaacctggagaaaccccatctctactaaaaatacaaaattagccaagtgtggtagtgtgggcctatagtcccagctacttaggaggctgaggcaggagaatcgcttgaacccaggaggcagaggctgcagtgacacaagatcatgccactgcactccagcctgggtgacagagcgagactctgtctcaaaaaaaawttttttttttaaaaaaaggacgtgagtaacatgccttagaggttgggagggaggaaaggctgtttcctactggggaaatcagaaaaggtttcaaggaggaggtaacatctgagctgggcttttgcttgcagaatgcggacccagaatgattggagagcargaagagcaatccacatagaagaagcacagagcaaagacggtggccgaggaccagtgggaatttattgcgaatgttcaatagtgactgagtggttaagtggttccagagattacagggccaatgccttagaacacatgagttttttccagaattacgttatccatgcacacacaccatttgtctgtgtagagcacactgaggagtacttacttaatttaagtattgtattttgaccaaggaaggggggcagagtaatggtggtgacagatggagttgcaccgaggagacatggcttggggcagggaggaaggaggtagaggatcctggttaggtccaggctagggagagaggtgccctttctccctccctccctctcccatcagggcagagcagaaaggagagcaggtgaagtgagtgcaggcagggttgttaatgaaagtgtgtccctgggaggcctctcaccttgcagttgaccagaagagctggaatctctgtcctgctggtcttcctcctgctctcctggccatgaatcaggtcctgcatccggggaggctccccctgaagccaattcgggtttccctccaccaggcgtctttggatcacactgcgcggctgctggctccatcacaaaacaatgaaggtaggcagttctaaacccaggcatccaggctgctcagttaccccacttagataccccaggatgctccccccacccccccagmcctgagccttaccctaggagtttaccctagggtcccagataatgagagcagagtaagccccagtatcaaatcatgccgttttccttggacacccatagattgctcagcagtgaagaaatgggaagaggagaatggtccattctctgttaaactgacttagtagccgaagggacatttcaggaattagtatgcttgggggaagttttgtctcaaacttacatttttttttaactaggagggttttttttttcttcccctctgacctcatccttcaatgggcttcagatcccagggttgatggtatgatgaaaaacagtaagaaactcaagaactaggccaggcgtggtggctcacatctgtactcccagcactttgggaggccgaggtgggtggatcacttgaggtcaggagttcgagaccagcctggccaacatggtgaaaccctatttctactaaaaatacaaaaattagctagatgtattggcatgtgcctgtagtcccagctactcgggaggctgaagtgtgatagtcacctgaacctagaaggcagaggttgcaatgagccaagatcacaccactgcactccagtctggttgacagagcaagactctgtctcaaaaaaaaaaaccaaacaaaaaaaactcttaagaactaggatgctgggagtcatctttgacctgtccctcatctacaaccactcccattccatccagtcacttcccaaattctataagttttgcctcctgtgtagaatcaatctgtccctcctttccttctctctcttctttcttttctttctttttcttttctttcaagatgggatcttgctatgctgcccagactggactctaattccttggctcaaggcattctctagcctcagcctcctgagcagctgggaccaaaagcatatgccacagtacctggcctccatccttcctttctgttactgcctgtgttccagactccccacagctctctcggatccttggaacaccttcttaagttcataacctgtctccagacctgttacctttcaaatacatctgcttggagcttcagcctggaagctaaaaaccttgctactccaaaatgtggtcctcagatcagcaactttaacatcatttcgaagcctcttaaaaatgcactctcatacctaccgaatcagatgtttcattgtgacaagatccccaggtgattcatgtgcaggttaaagtttgagaagcaccaaagtaaaacatgaaactaaccatgtcttctcttatttaaaatgcatcaaagaccccccaccctaccccgcattgctttcatgatagagctcaagcttttgaaggtgatccacagtccacatgaccgggccgtgcctccttccctgccactctgtttatgggccccagaagcaccgctcataccaggccgctttttgcctccatgtcttcactcctctctcctctctcctctcttcctgaaactcctcttcctcactcttctcgaggctagactggatgactggcttaacacactttatttgagagagaggttgtatcttaagtttgagattctgtgtacatcctataatgcaggatgtaccctstccaggataccctctctgagttcttcatgctcctctctccatacacgccaagctggggtcccttgtcttagctcccttttccatgcttctcacaaatgttatgtatggattttactcccccattagcctggagagcgcttgagtctacctcactcatttttatatcccagggcatggctcagcatctagtaggcactcaataaatgcttgctgcagactgactcttcccccaggctctatgcacctctccacctgccctctctccttgggatcctgggattgtttttctacccttagattaatgaggcccttggggttgctcctggcagcaaggctgccagcagtagacccagtgctgggaaaagttcagcgagctctgggattggctggagagactggctctgcacttcccatcttccaccttcccacgatgaacacaggcttcaggcccctcccgctgttgtgcagtttgctcctcagccatcccagggagggagacgatggggtcttccctgcctgttgtgcctttgctcccagagccataggaggtaactgctagggatcaattggggatatcctaggcagaggggagaggtgaaaagcccgggactttctcattagaaggcgggacctgccactccgggatggcaatgtcagtagagcaccttctcctggggccaaacacatgtaggatggtccccagtaggttccagccattgagagccgaagaacccgcttccctgctccatccctgtttttcagctatgcttgctgccactgcaagtaggaataagcccctggcagttccctgaattaagtctcagtgcaatcccttttctcgttgggagctagggaattgccagacctctgggctgtggtcctggtgggggcaacccaggctgagaggagtctggaaaggtggagctaagtagggaaaggcgaggtgctgcactggccttcaggttcccggggagaagcagttggtggagcacaggcctgcagacatgcttccaacctgtcagtacaggcctggttgagtacctcttctcagactaggagaggggacagggaaccgagtgctcccaagcctttctacaaaggatttcctctcttccasgggtcagaggccaggaatatttctcagactaaatggagtaatagctgggggaataataataatagcatttagatagtgcctgctattaggcactgttctaagtgctttaaatatattagctctaacaactctcccaacaatcctatgattgatttgattctcatttaacagatgaagaaactgaggcacagagacgtaaagtcaattgcacaagttagtaaatggcagagccaggatctgatcccaagcgaagtggctgcgcagccccgcttgtcagcattgcctctcagaggggaatgcctgaatctgcagttttccgccgcccactcacatcctcactgttactcccctgccccattcctctgaggccaaagctgctgcagacatgggatgggaggagaggagcctggaaggtccattccactcaggagttgggggagcagcactcaaggcggccaggggcccccggcaagagccacacaaaaccctgatgccctgggaaggatggagacccccgatgttttgattctgaggagaaaggacaagtggatagacagacctggtctggggaacctgtggttcgggggaagcaggaagtcacaaccctaaactggccagtcctccaggccctcctggttgtaagtgaccactctagagggttcctgtgttcctgtaagcccccacttctaaacagcctagctcctcaccaccctcaagtttggggccattagaggaaaaagggaagccaagcaatgagagaataggaaccctcagagccaccaaaccatgggaacatccccggtgaagagccttgagttggcaggatgacctctccccatctcagcaagggagcgggacctgaaagctgagggtctgcactttctggtcctgcctcctgctcaggatctgggaagtggaaggaaaaggccaggggacgctggcaggggaggggtgatgcctcaccaagtccttggaggtgccgagcctcttgaggctgtccagcgggagcaggtcggccgagtccttgtgcaggaactgggtggcctgtttgagccggcgctgctggctcaggtgggctcggtctcgaagctgtgcctcctgccccctcgtcctggcttctccctcatctctcctggcctcctgcttggtgctcatggcccctgctggaggagtgggccasgggctgctcsgtgggggcgtcaccgagtcctctctgcttcttcctgcctgtctctgtcccgtgctgcagctctctttccaacaggagggtctccacgggagggaaagaggaaaaataaataacatgcaggagcagccgcgtcagtctccaatttcccgagattgctgtagagggagtgagactccggctggaaaaacccagtcctagaagagagggagggttggcagggcccacagctggctgacttggccgcatccccaacgctggggtcctggtcagagcgggcggtggatggggcrtrtgtgtgtgtgtgtgtgtgtktktgtgtgtgtgwgtgtgwgwgwgwgagagagagagagagagaaggagagtgagagacagtgctgtaaactgtcagggtgcccgtgccaggtggtttgcgaggaagckcttgtcactgtgtgggggcagcagccttagtgcacctcccagcgtgtgtggcccccgccctcctctgcatmcctcccaggcttcccaggactgcccagctgttttctcctggcattatctgcagcccagggctggcgcgcaggccagtaactgggttcagatcaaagaggggcagcatgagagcgtccttccctcctctcatccccctagccttaccttgttaggtctcttgcctcccgcctagcagatgtcagagtctttaactaattgactctggattctgggttccagggaatgacaggaacaactctgaatcttcccacgagtagaaattgtccctggcatctcagtctcctttatatgactctcctcaagtcctggctctttaaaaaatgttgcatttcaaatatacagaagttataaagaataagataaccagtactcttcactcatcaccastttaaaaaataagctgttgaagctccctgtgcacttccacttccgcctgctgaaattggtgtttatcaggcccagacttctttatattctttatgcaaatacttacatatgcattctaagcaatatgtcgttggttttgtcctactcactgtatttattcttctgcaatctgctcttttttgctgaatagtttttgttagtgagattcatccatacggtatgcccagctctagttaattgacttcacctgctgtgtaacatagtattccattagatgcatgcatgacattgaggaaatgtaggttatttttcatttttaggtctaacaaacaatgctgctatgaatatttttgcacacatctcctggggcacctatgtaggcatttctctagagtatacacctacacctaggagtggaattgctggggcatcccatatacagctttgcctttttggcatattgccagagtgtttttaccagtgcacactsagacagctgcacacaggggctcctgaggttccacatcctctccaggacttggtatcagactttttctagccctggcttatcagcagatttttctctccagcctttcctcttcaccatcagggaaacgcattggccaagcacctgtttacctgtgttggatgctcacagggtgattaccccacctgagccctgctccctaagggtgcagtctgactcagacagctccaaggcacatgtactttcagacaaaccagatgtctrctgagcttctaggaaccaagcctctttgagacactttcacaaccactgcaattatatgaagaaatactgtattctaatccccatttagagggaaagaaagtgttatgggttgaattgtttccttcaccccccaaatgtacccctaacccctagtacctcagaaggcgacctcatttggagatagggcctttacagatatggtgaagttaagatgaggtcattaggatgagcctactcccatatgactgcgctcttattaaaaggaggaagtgggacgcagagagaaacgcacatggggagaacgccacgtgaaggctgaggtygggataatgcatctgcaagccaaggaacacctaagaggaccagcaaaccaccagaagccaggggagaggcgtggaacagaccctgccttacagctgtcagaaggaaccaaccctgccaacaccttcctgttgtactttcagcttccagaactgtaagatgacaaatttctattgttttagccactcaagcttgtgatacatactttgttatggcatccccaggaaactagtacattaagtcttaggacccagcacagtggttcacgtctgtaatcccagcactttgggaggctgaggcgggtggatcacctgagatcaggagttcgagaccagcctggccaacatggtgaaacgctgtctccactaaaaatgcaaaaaattagctgggcatggccgggcgcggtggctcacgcctgtaatcccagcactttgggaggccgaggcaggcggatcacgaggtcaggagaccgagaccatcctggctaacacagtgaaaccccgtctctactaaaaatacaaaaaaattagccgggcgcggtggcaggcgcctgtagtcccagctactcaggaggctgaggcaggagaatggcgtgaacccgggaggtggagcttgcagtgagccgagatcacgccactgcactccagcctaggcgacagagagagactccgtctcaaaaaaaaaattagctgggcatggtggcacacgcctgtaatcccaactacttgggaggctgaggcaggagaattgcttgaagccgggaggaggaggttgcagtgagacaagattgtgccattgcactccagcctgggcaacaagagtgaaactccgtctcaaaaaaaaaacccaaaaaacaaaaacaaaacaaaattaaaaattagccaggtgtggtggcatgtacctatagtctcaactactcaggaggctgaggtgggaggatcacttgagtccagaaattcgaggctgcagtgagctatgatggcaccactgaactccaacctgggtgacagagcgagacactgtctctaaaagaaaaaaattcttagaaaatatgcccaagattcagttatgatatagcagagcaggtggtccagtccttgtgttctctctcccaaggtctgttcaatttacgctgtgcctaaaggagaatactgatagagatgataaacacggaaagaaaaccaaactgcaataggatgccatttctcaagatttgccccacccagagccgagcttcatttagacttagctttagtggaactttctagctccctcccatgtcttgacatccattaccaccatatgtttgcttgggatagaggtcaaagaggatcctctggcatgttttgctgggttcctgtagtcatttcaacaggattaactataatctataattgatagattattgagtgacacacagcgtgatgctgggcaggccccaagctgaaaagcatctcctccaacttactttattcttagcaattcattcctttggtttgaaaattcttcagcatcttcaagagtcctttactaatgcatcctttgggggagttgtgctaaattatcaactcacaaggatgagatggctggctctagggagccagcctgccaacatggatgggctgtcccaggctctcaagtgagctcaggtctgtacactgcactccagggaagagtaaatgtgcctggggcatagaatggagactttggagtttggagtttggagtgggtttggggacatcagcttctctcttccagttagtctgataagtcctttgttgcctggccctggaaaccacttgtgctccgaaaatgccattctctggaatgtagctgtggagtagggagagagttggcccctgtgttctgtaacccaagcaagtactgtctcactgccatcttggggcagactccgcagtaaggagaatctctcttgcctttttgtgtttcttggtttcttcctttgtaaatacaaggcatagtctctgcccttcccccagattgccagaagagtgggatatattgttctagcaatataaagctctgaggcctttctgcaggactgtagacaccactttgctgtgatagtgaagaatgtggggagtgttgtgaggctaggcgagcggcccggccttgcccatgacagctcagtctcctcccctcataacttttttacctaacagagaattaaaaaaaaaaaacaatttagctgggcacagtggctcatgcctgtaatcccagcactttgggaggctgaggcaggtggatcacttgaggtcaggagttcgagaccagcctaaccaatgtagtgaaacgctgtctctactaaaaatacaaaaattaggcaggcatagtggcgcatgcctgtaatccgagctactcagatgctgaagtgggggaatcacttgaacctgaaaggcagaggttacagtgagccgagatcatgccactgcactccagcctgggtgacagggtgaaactccggctcaaaaaaaaaccaaataattaatcaacaaggaataactccattggtctctaataatgagacagagggggaagaaacttcgtccaactattcaggaagattaagcaattctgaaccgttaggagtagaagaagtgagcgtattctcgtccaaaacacttggaaaatgtctgttattctctgaagtgaatggatctaaattcagaaatgctgagagaaaaaatgaaagtgataaatatggctccttcgctgcattggttcttctatgaatgaagttttttttcattcagaaaaaagtagttattgagcgcctactatgtactggacgctgagctaggccctgggtgtacagtggagagccagatgaggtccctgccttcatggagttcacattctaatggagcaggtagataatgaacaactaaatttataacctcaggtggtggtaagtgctgaagaaaatacaccatggaatagtatggagccataaaaaataacaaaatcatgtcctctgcagcaacatggatgcagttggaggacattatcctaagcaaattaacacagaaacaggaaaccaaatattgcgtgttttcacttataagcgggagctaaacaatgagtacaaatggacacgaagatgggaacaacagacactggagactccaaaagcgaggaaggaaagaggagctagggctgaagaacttcctgttgggtactgtggtcactctctgagtgacaggatcaagagaagcccagacctgagcaccatgcactgtgcccttctaacaaacccgcacatgtgccccctgaatctaaccaaaaaaaaaaaaaaagggcaagatctaccaagttcatgagtaggaaggttcaatataaagatggccgggcgcagtggctcacgcctataattccagcactttgggaggccgaggtgggtggatcacctgaagccagcagttcaagaccagcctggccaacatggtgaaaccccgtctctactaaaaatacaaaaaaaaattagctgggtgtggtggctcatgcctgtagtcccagctactcgggagattgaggcatgagaaacgcttgaaaccgggaggtggatcaagttgaagtgagccgagatcacgtcactgcaccccagcctgggagacagagcgagactctgtctcaaaaaaaaaaaaaaggatttaatttcttccccaatttgtccataaactcaatataattctaaatatcatgcctgtaatcccagcactttgggaggccgaggcaggcagatcacgaggtcaggagattgagaccatcctggctaacacggtgaaaccccatctctactaaaaatacaaaaacttagccgggcgaggtggcgggcgcctgtagtcccagctactcgggaggctgaggcaggagaatggcgtgaacccgggaggcggagctttcagtgagctgagatcacgccactgccctccagtctgggtgacagagcaagactccgtctcaaaataaataaataaaattctaaataaaatccaaatacaattttttttttttgtagaaaaaagagaaaaaagcagggtaagaagagaaagtggtggagytgagctgggcagagtggctcttttagaagcgatgacatttacacataggtcactatggagagggccatgcagacacctggaggagtgccacagacacagggaagagtgcaggtaagacagggtagtctgggattgtccttcttatgtccccaaacccgcctggggcaagggggtggactggcctttctccatcccctctgtcaggcccgtctcctcctatggctagtcactcacatctgctaacaacagactggctgcagtacagaacgtcatctcttgctatggagagaatagggttaacttgtctataccacgagcaagcccttgtcctggatcccgctgctcagtcaccctggcatagtgcccatcccactgaatctgttaggctgccagaccctgggttccctctgcagaacggagatcacggagtaccactgagtgcgttctcagactygccagagggctctggtgtttttgtatttctagcaatgatgaaggggcagagaagggcttaaaaaggaaggctcccttggccttccagcttgataagccctcaggcacaaaggcctcctaaaacactttctgtctttagataaaaccagaccacaccttgcatttaccactgggtgtcagacagttattggtgatcctaaactcatgctgtctgatacagtaactactagacatatatggttattgagcccttgagatgtggccaatctgaactgagatatgctgcaagttaaaccacacgctggattttgaaaacaatacaaaaacctgtgtgaaacatctcatgaattattttctaattgattgcattactttatattgatttttttttttttctttgagacagagtctcaccctgtcacccaggctggagtgcagtggcatgatctcggctcactgcaacctccgcctcctgggttcaagygattctcctgtctcagcctcccgagtagctgggactacaggcgcccgccaccacgcccggctaatttttgtctttttagtagtgatgtggtttcaccatgttggccaggatggtctcgatctcctgacctcgtgatccacccccttcagcctcccaaagtgctgggattacaggcatgaaccactgtgtgtggccccatattgataatatttttgatctattgggttaaataaaatacataaaaacaataatataataataataacaatgtaataataaaaattaatttcacttgtttctttttttttttttttttttgagatggagtcttgctctgttgcccaggctggagtgctgtggcacgatctcggctcactgcaacgtctgcctcctgggttcaagggattctcctgcctcagcctcccaagtagctgggactacaggcatgtgccaccacgcccagctatttttttgtatttttagtagagacagagtttcaccatattagccaggatggtcttgatctcctgatctcgtaatccacccgcctcggcctcccaaagtgctgggattacaggcatgagccaccacgcccagccttgtttcctttttttttaaaaaaagtaagaaatgttttaggccgggtgtggtggctcaagcctgtaatcccagcactttggaaggcaagacgatcacctgaggccaggagtttaagaccagtgtgggcaacatagtgagagctcgtcgctacaaaaaaaaattcagccaggcatagtgacatgcgcctgtagttccagctactcgggaggctgaggcaggagaattgcttgagcgcaggaggtagaggctacagcgagccaagatcatgccattgcactccagcctgggttacagagtgagaccctgtctcaaaacaaacaaacaaaaaattttaattatagatgttgctccattatgtttctgttggacagccctgatctaaatagattctacagctcctttcctctttcctgatagaatctcaattctctcaggaagttcttttttaatctaagtcctggtggctatattcaaagttcatgccctcttatccaagcctagcagagatagagatgaactgtatcccaccttccttgtcatagccgttcatgccttcagagatctttccatcttttcaacattctttcctcaaggctgaatagtgccaattcttgtctctgctggtggggatggagaggagagctcctctggcccagtgaaatcacccagtccagtgccctgccacataaggaaattcccggaatattctttatagaatgggttattcagagctagacaaacagctctcttgaacccgtggagggttaagggcagccagtttctatttcaggctttctcctctgggcctgtcagatctactgaagacaggaatgaagttgttttccagaattctcctgtccagcaagggccgcaggcagcccgtgctgccaggagagcacacctccctactgccatcccaaagaggtggatcttccaaaggctgccaggcaaggacaacattttatatttctgacgctaggattattttcctgtttcatggatggcaaaaccaaggcacgaagaggtcaagtgctttggctctgttgatgaaagcagcctgagcatggcatggtgaactcagaggggcctgatcaagagttccaactcatggccgagcatggtggctcatgcctgtaatctcagcacttaaggatgccgaggtgggtggatcacctgaggtcaggagttcgagaccaacctggccaacatagggaaacccagtctccactaaaaatacaaaaattaggtgggcatggtggcgtgcgcccatagtcccagctactcaggaagctgaggcagaagaatcacttgaacccgggaggtggaggttgcagtgagctgagatcgtgccactgcactccagcctgggtgacagagcgagactccatctcaaaaaaaaaaagttccaactctgtccctgtactagctgggtgacctggggtgaagtgcttaatcttttggcatttgtttcttcatctgtaaaaatgaaataacacataatctgtagagttggtgcgaagtttgaatgagacagaatagcaaaaagtagtaaactaggccaggcatggtggctcacgcctgtaatcccaggactttgggaggccaaagagggaggacttcttgagcccaggagttcagcctgggcaagcatggcgaaaccccatctctactaaaaatacaaaaaaaaatagccaggcatggtggcacacgcttgtggtcccagctactcaggaggctgaagtgggaggattgcttgagcctgggaggtagaggttgcaatgagctgagatcacacagctacactccagcgtgggtgagagtgagaccctgtctcaaaaaaaataaaataaggctgggcatggtggctgatgcccgtaatcgcagcactttgggaggctgaggtgggcggatcacatgaggtcaggagttcgacaccagcctgtccaatgtgacgaaaccctgtctctactaaaaatacaaaaattagctgagcatagcggtgtgcgcttgtaatcccagctacttgggaagctgagacaggagaatcacctgaaccaaggaggcagaggttgcagtgagccaatatcacaccactgcactccagcctggacagcagagcaagaccctgtctcaaaataataattataataaattaaataatagtaaactgtatgcctcagcttagtatctccaaggtggaaatcatacaggacctaccttcagcactcctgtccctccctctttgtttatcttttttatttcccgcttccattcccctgtatttttccctcctccttgcctaagctgtgggcctgcacttggcacccttggacacgacccccccttcctagtgatactcagactaaagaagtcactgactattgtttgggaaccatgtcatgatacctagtgtcaacgttccataaacacccagtaaacataagtgtggtctaagggaagccacacatcgaaattcctgtcttggaatttggacaatggcaagatgcagccacattctttacaagcgtggaggcgttcgtgaggctctgccctgggactggcagggaatgaactggcttgggactaacataagtggagcagctatgtgaagagccacgggaaccgctacctgtgatggcaggtgggcagcagccactattgacactgtgtaatgaaaagagcaaatgtgtgcggctcggtggcagcacaactaaggacagggctcagtgatggaaaagaggcatgaagacaaggggctcccagcaagtgaggcagcgatgagttggaatgaaggctggagggtcgcagggaagctggaaagtgagttgggtggggactgtctgcagaggggatcttggctcgagtttgtcatctcaaggagcagctatggggctttttgaggcatggtaattagatgagacaaccctggcagggcatgactggcaacgtgggtggccctgtatggtcccccaggggttcccagtccccacagcttcccgactccctggccccagccattcctcaagctcccagcagctcaggaacttgcgtcagcagctcaggtcatgacaccaagatcaggcttggaaagggggaggtggagggaggggagtttttggcccggaaatggctgggaagacttcctttgctgggattaactgttgtccgtgaagctggtggcattcagcagggcacagggtgttctggggagtgaagtatgtgggggaaaggggtgtccataccttcacccctgcctccctctcagagctgcactccagctgtggtgaaagagtggatctttaggcagatacagatacagagattccccccaccccaccccaccaaaggctttcaggacctctaggttcattcgtgtgtggggatggagtaaggaggttgctcatgcttgccagccaagtgtatgtaggctgagctggggtgattttctttttcttttttttgttgagttagggtctcactgtattccccaggctggtctgaaactcctgggctcaagcgatcctcctgcctcagcctcccaagtagctgggactacaggtgcacaccactgcacctgcctggctgggggttgcctcgttagggtccccaggcccggaaggtcgcgtgcttgctattgctgccccgcagacccccatggcctgctggagctagggggcgccagaagccttacttctgtgtctctggccgatgaacaagagagcctggatactgctgcagagcagaggctgttccggagagcagggctggaaggtggtggggcggggtgaagtcctgactagaggctgggagcttctgggtgggcagggtctgccagggcaggagcctgtgtgagtgcagcttcctttctgcccgcccctagcttaaggccagagagtaggcagcttgttttcaagaatcccaatggctttcttcctcccactccctaaatcttcttgcccaccctctaaccatgcccagggcctctcgctgtgaggtggcaagtagcccgagaagcagatggtagcccaggccttgcagtccccgctccggcacacccctcccgtcctctcgccaggaggctgcctggctttgtggtccggagcaagtcacttctcgacgggcttcactttgcccatctgaagtctgaggttgttaggcgtgttttctaatggcctgcccagctctgacatttttggatcctatgtaaagggaaccctcctttccaccctcattcccagtccagagtgaggagattgggtaaattcccagagccctggcactcccgtggagcactcaggaaacgctccttcacccctcaattctgctctcacacaccccgtcacacatagactcacatacaccaagcagagaggagcaaagagaaggaccatgtaagacaatcacggacatggcgttagaaggaaactgagaaacgctctacaagagttcgatgtattacattatttttaatttagatgaaattcacataacacaaaatttaccattttaaagtgtacgtacacttcagtggcttttcatatattcacagtgttgtgcaaccactacccctatctagttcaaaaatattttcagttctcccctcctccagcatctgggaagcatccattcaccttccagctctgtgggtttgcaggttctagacatttcatgtaaatgcagtcatataatatgtggctttttgtgtctggcttttttcatttagcataatgttttcaaggtttatccatgttgtaacatgtattcttttaaaaaaaattttaatgtgtaaaatatacatatcataacatttaccttttaatcattcataagtacacaaatcagtggcatgaggtggtcccttcccaatgttgtgctgtcatcaccactgtctgttttcagaactttgtcatcatcatccccaacagaaaccctgtacccattaaacagtaactcccggccagacgcggtggctcacgcctgtaatcccagtaattccagcactttgggaggccgaggtgggcggatcacaaggtcaggagatcgagcccatcctggccaacacggtgaaaccccgtctctactaaaaatacaaaaaattagccgggcatggtggcgcacgcctgtagtcccagctactcgggaggctgaggcaggagaattgcttgaacccaagaagtggagattgcagtgagccaagatcacgccactgcactccaacctgggtgacagagtaagactgtccaaaaaaaaaaaaaaaaagccccccaaaaaaatcactgactccccatgcccttcctccaagcccctgatatcttctattcaactttctgtctctatacgtttgcctattctaggtacctcacgtaggtgaaatcatacaatatgtgtgtggccttttgtgtctggcttctttcactcagcatgatgttttcaagtttcatccacactgtagcatctatcaatactcaatttctttttatggctacataatattctatctacttattatttttattctatgaacactgattgacagcttcatttctggagggccaccagtgtgctacacactttgcaggtccttcacctatattcttgtatttattccatttatttataaactaatggtccccattgtgcaggtgaggaacctgaaagccagagggaatagtgacttttccaaaggtcacattgctgcttagtggttaaagcagctctagagccctgtgatgtcttgattcccaggtgcctgcagggcttgagagaaatggagacaaagaaggccgtgggcaggaggccaagagaagcccagcaggtgtgaccatcaatgtgggaatgtgatgggggtgggaggaggtgaggtagggcccccaccatttcagcttcttcccctccagccaccttcccatcaccctccccaaccatctccaccccagccagggccaacaccattctgactgttgctttgcctgcctctactttacccctggtctttgactccctgatagaaaaagctgaggcccaaggcctctgggctgactgctcttttggcataagtcctccacacccttcccccacaggtatccccaacagggtgtggagaggccgctcttttaccttgaagttctactttgttctactcttgttcctctgctgagacctggttagccttcctggggcctgactctcccattctccagcaccagccctgacctgacctctcctcctccaaaccctgcatggggccctgcaaccaagcacagctgtgtctggtctttgtccagacatcaaatggtccagggagggggtggcattttggttatttttgcctaagaggctttctataccctgaccaatcccagcctcattcccaatgggttatgagagtggagatagcttcttcttatccatgtttcttacagtgcctcttcccccaccccaacagacacacacacgcacacacacacacacacacacacacacacacacactccttccttcccacttctcctctccttaggaactggagcccctccctgttctccctgctctacccagcctcctggccgcagtcctcccaccttcgatgagagtcctccaaggaagaaatataacaatttagaatttcagttgaatctccaatagcctggggtacagaggtggcttgaggctgggaggatggtggagaggctgttctgcagaagccagagtccttttgctaccccagggcctcttgctgaaggagcattgattgagaacactggagcctggggctctgggtatcacgatcgtcccctctggaagcccttctagaagtgtccaggtcttctcttcctcttcc

SEQ ID NO: 97861 - DNA, 24208 bp, Homo sapiens
  misc_feature (1)...(24208): n = A,T,C or G
ccatgttgtctctactaaaaaatacaaaaattagccgggcatggtggcgggcacctgtaatcccaactacttgggaggctgaggcaggagagtcacttgaacccaggaggcggaggttgcagtgagccgaggtcgcaccactgcaccccactcttggtgacagagcaagtctccgtctcaaaaaaaaaaaaaaaagatttttccaacctaaaattgctatcaagcataaagtatgatcagctttcctctattttcacaaagtactaagctaaaagaaatatcattacatttcaaaataaaagatttatatacactaaaaagaacattattttaaaactcaatggaggctaggcacggtagctcatgcctgtaatcccaacactttgggaggctgaggtgagtagatcacttgagatcaggagtttgagaacagcctggccaagatggcaaaaccctgtctccactaaaaatacaaaaattagccaggcgtggtggcgtgtgcctgtaatcccagctattcaggaggctgaggcatgagaatcacttgagcccgggaggcggaggttgcagtgagccaagatcatgccactatactccagtctgggtgacagagcgagactccatccgccccccccctcaccccccccaccaaaaaaaaatttttttaactaaaaactcaatggggccaggcgcacggtggctcacgcctgtaatcccagcactttgggaggccaaggcgggtggatcatgaggtcaggagttcgagaccagcctggtcaatatggtgaaacctcatctctactaaaagtacagaaattagccaggcgtggtggtgcatgcctgtagtcccagctacttgggaggttgaggcaaaagaatcacttgaacccgggaggcggagtttgcaatgagctgagatcgcgccactgcactccagcctgggcaacagagcaagattctgtctcaaaaaaaaaaaaaaaacctcaatggaacgagccagttcattaggactgagtacaaggaggacggtccagttcatgcaaggccctccgagacactcctacaaagatgttcagggagacttcttctagtcatactttctcaaactcttattaaaacggcccaaggtcacactgttctctatactttcagtagtgatttcaaccaaaaaagaaaactcagaagttcttacgtatttcactggcaggactgggagcagatctgccaaagagcacttctatgagtgaggaggctgggccagaatgatacttctttagagcaatcagggctctgccaagggagaaaactaaaattagaacacctgcaattcagtgcccgagcctctgccccaatgctgccaccaactcccatgagggccacacccacaccatgacttgttgctctcttttgtgcgacaggcatgtaagaatggattagctgtgttgaaggaagatggtacttaggatttccagtcccatccacttactttttcagtcgcctgtaagtgacatcattggcaagttttaacagtctgtaggaattctctcggtccaagctcaactggaaatcgtgggactcatcaaaggccaccgtgaccgacttctgggtgacccgggtcaagatcccagtggccagctgactgccctcattagcagcatcgtacaggcccacgatatcacctgcaaaaacaaagactcagtgacacaagacactggggaaagcttcaatatcattttctgtaataaaatccactatacttcaaatattttatctttgttactttctttagtaaatgcaatcagtaacagttaaaaaaaaaaaaaagaaagtaagttaggccgggcacggtggctcacgcctgtaatcccagtactttgggaggcagaggtgggcagatcacgaggtcaggagattgagaccatcctggctaacacagtgaaagcccgtctctactaaaaatacaaaaaattagccaggcgtggtggcgggcacctgtggtcccagctactcgggaggctgaggctgcagtgagccaagattgcaccactgcactccggcctgagcgacagagtgagactccatctcagaaaaaaaaaatctcaaactctgctcaggtctgactccaacctacaggttcccctcctggccctctcctctctcaataccctcatctcatcttctccaaatccagccagtattccagtaattgttgggctaaagtctacgaaatcaaaatatgaaatttaaaactccgtcaccaccaaaacaaggcagagacacttccatagtaaaaagtacagccctggcaacgctgcttcctccaggcttccaaggctgtggttgtctaacacaagcatcccaggcgtgtggttaagaagcttcttctaactgtccctcctttccaaccaggctggcacaagtttagccaaagcatgcttggcacaagaaagggttgggaatacagaagtacacatcctgcatgtttaccagctggaccaaggctgcccattacatagaaacataaagagagtcacatgtagtttttcttttgtttttgtctgttttgagagagggtctcactttgcccccaagctagagtgcagtggcgtgatttcagctcactgcagcctcaacctcccaggttcaagcgatcctcctgcctcagcccatcaagtagcaggaactacaggcacacaccaccacatctggctaatttttctatttttttgcagagatggggttttgccacgttgcccaggctggtctcgaactcctgagatcaagtgatccacccacctcggcctcccaaagtgctaggattacaggcacccagtcacgtgtagttttaagttttctagtagccatattaagaaatttaaaagaggctgggtgcactggctcacacctgtaatcccagcactttgggaggccaaagcaggcggatcacctgaagttgggagttcgagaccagcctgaacaacatggagaaaccccgtctctactaaaaatacaaaattagccaggcacggtggcgcatgcctctaatcccagctactcgggaggctgaggcaggagaatcacttgaaccccggaggcggaggttgcagtgagccgagatcatgccactgcactccagactgggcaataagagcgaaactctgtctcaaaaaaaaaaaaaaaaaaagaaaagaaatgggtaaattattttaataagatattttttatttaacccaatatatgaaaaatattatttcaacatgtaatcagtattcagaaaaattactcaagatattcccaattgtttttttaacataatcttccaaatttggtgtgtattctgtatctgcggcaattacaagccacacttcaaacatttgatgaccacgcatggctaatggctaccattttggacaacgctgatctagacaactaaaacccacatcaattgttggacttctgattaagagttcttcattgcaacgctttattctccaactggtcattttaatccagtctttacgagggtacaagtcacggtctgaatgccagtaaatttcaatgtctgtctaggtcaatacgcacacaccagaagtaaagctgttactgggaagagctgccgcggacccgtatcgcctgggctcaaaggtgaccagcagccgtccgtacagcccagtgcgctggctggatacctgcagcttcagcaaacacacgcctcggctctggagctctttcagagagatgttctcctgccaggacctggaagacacccggtattgatgcttcaggatttttactagtttctacttccacccacccaggaaaagtaaaagagaaagaaacatagataaagatctactcacaggcactaaatatgtcccaatggaactccgaattggctccactcccaatcccgctcctcctacatccccctagggcagttaatgccacaacccttctctcagttacctgagacagatctttcaatcagcattcccctctctcctcccatctgtcactaagtcctatcaggcccctcccatttctacctggacttctctgcctctcatcctggctgccacagccccggttcaaatccacatcactgctcacctggactaaacagagcctctcaactaccttacctctggcctctccacgtccaatcaaaagcaggagacccaagaaatcctcctaaaatgcaaagctattcgcctccctcacctgcttaaccccgctgatggcccatccttcatacacagaacagaagactagctccttagccaggcccttcccaggctcgccctgccagtctgctcagcatcctcagaaagagccactgccatgggggctgactctgtccttggcaccacgctgagcacctgactgacaggggatcgtttcattctcagagcaagcctgtgaggtgggaatcatcccagttttacagatgaagtaagtaaggctcagagacagaacctgcaaagtcacacagccataaatgaaacagctgggattctaagaaactcaacataactgcaaaagctctccattgccatgatcaaaagcatctcagacaaatcctacccacatatggctgactgcaaactctggaagcagactgcctgacagcaaatcgggctacactgtgtcaccccggggcaagttacttaacccctctctgtctccatctccttagacggaaaatgacagtaacagaaacctacactgcggccgggcacggtggctcacgcctgtaatcccaacactttgggaggccaaggcgggcagaccacgaggtcaggagatcgagaccatcctggccaacatggtgaaaccctgtctctactaaaaatacaaaaaattagcaggacgtggtggcgcgcctgtagtcccagccactcaggaggctgaggcaggagaatcgcttgaacccgggagatggaagctgcagtaagccgagatcgtgccactgcactccagcctgggcgacagagagagactctgtctaaaaaaaaaaaaaagaaaaagaaaaaaaagaaacttacactgtagggttggcatgggatgaggtgtaaaagaattaacgcatggaaagtacgtaagtgttagctctgattgttttggacaagtaaatagtcccattcggaaacaagcccggctctcacatggctccccacacctctcaggacggctccccaccctaccccgcacccaccagcttaactccaattttccttcaggcaccactccctccttgaagccaccatgaccctccccagggaagggccttcctcctccaggctctttccccgcgacacgcacgcagccggccctggacgcactggaggggaagggactctctgcttatgcccagcccgccgctggccggatcgggggcagccagtgcacctgactcatgctgccggggcctgactgagaatgggcgcaaaccatgtttactgaatgaataagggaaagggctgctaactcgctgcgggtggaactggggtcggggccagggcccaggagtgtaagcttagtggggggtctcgggtcgggaaatcaaagtgcttcttaagggtccccaaacggaacgcgctgcccaggaagtgatgagactgacaactcgggaggtggccaagcaggggacggacgatccctgcccctgactcgaagggtcggagacgaaattcccgccccagactatgaggccgagcccctcggagactctgcccgggacacggcgggaccgaccgcgagggagcggcgccggcggcctcccgtacctgcgctcctccacctccgcgtctctctcgagctccagcaggtccagttgcttggtcacgaagctctccacagctgccgaggccatcgccgccgccggcctgggcccctagaagccgacgtcccgcttctgcgccgggccggtgttacagcggaccggtgttccccgccgggcccgtgcgttacgcacgcggttcgcgtcgtttccgtttccggccgaggctgcgggaagatggcggcggccatggcagcatcttccctgacggtcaccttagggcggctggcgtccgcgtgcagccacagcatcctgagaccttyggggcccggagcaggtgagacctgggatatgggaggaagggaggacgcagagcgagcgctgctccctgcggtctcgccacgtatgtgcctgggtccgaccyggtgccttgtgtgttgatcgcatttgtggtgaatatagcacgggttttggagtcgggggaacccaggttcagattttgattccttcagttagtagcctgaatactgacaatagcccttgaactttggtataggccctatgttatgggggagaagagtgaggctcagaggagctaggtaacgtgcccagggtcacacagcggggaagtggaagaagagtacttcaggcgcagtcatttcggctccaaagcctgtgcttgaaccactgcccccaggctgcgagctggtctgaaaaatggtgatggatatcctcgcctaatctgaactcattctgcaaaagaaacagccgtatttaaggcgctgggctgatacgaggctccaaaaaggttatgtycgttaaaaactctataaatctctgcttgaaaatggttggagtgtgtatttgtgtgcatgagtgtttatgtatgttttaaacctgggtttcatgtctcaccatgacccccaaaaatggaaaactggatctaactctatattggacgatattaaaagaatagtaccataattcccaaaacttggaagcaacccagatgtccttcaggagatgaatggttacataaactgtaggacatccatacagtagaatattatgcagcaataaaaagaaatgagtcatgaagagacatggaggaaacttacatacatgttactaagtaaaagaagccaacctgaaaaggggacatcttgtatgtttcccactatgacattctggaaaaggcaaatctaaggagacagtaaaaagttasatggggggtaagaggattgggggagaaaaggataaataggtggagctcagaggatttttagggcagtgaaactattctgtatgatataatggtagatacatgtcattataagtttgtccaaatccatagaatgtacactaccaagggtgaacccctaatgtagactatggactttggataacaatgatgtgtcaatgtaggttcatcaattgtaaagattgtaccactctggtgagggatgttgataggaagctgtgggcacatggacaggggacatatgggaactctctgtaccttccactcaattttggtgtgaaactaaaactgtgctaaaaaataaagtctattaagaaattaataataatcacagagttgggccagaggcaatgtagatgccaaaattggccatgagttggtaactgttgaacctggaaagggataattgagagagttcactattctgttctctttacttttgtatgcttgacattttccataataaaacttaggtttaagtaggcaggaaagtttttacaaaagcagtgggacttactccattctacctacctacatgaaaccacccctccaatgctatgttcaagtacagactcacgcrttaggagagaaagacacacagtgaagcgagtagagacaaggtgaccaaaacagtgagcagctggggccttgaagagtgagcaaaggagacgtgatggaagtacacagtcacagtctctaggactacctaaaggaaatcctgtgggagaggaaggagactgtttgttccctggggacccaaaaacaaagctwgaagcaaattaggtacagaagcctgctaagtttttaatagtgggatggatttgccaatgggttgactgagtagtgtgcgagagaagagtcaaaactgatggaggtttggggcctgagcaactgggaggatgaagttgccctcatgtgagagggaggagtgtgggagaagcaggcatgggaagaaatgaggagcctctggaggtgtgaggtgctcgtcagacacgagtggctaaggcagatagataggtgggtatgcaaaaccaggagagaagccctggctggaggtgtaaacttgggagtcaccagcacattgggggtgtttaaatccatcggactggatgcagtcaccagaggaatggccatgggcggagaggaggtcaaggccaagggttgagccccggatgcccaaatgggagaggagaggagaaagcagccgaggagatgcaaatggggagctggtgctaatgggtgaactttaaaaaggtggtttttatggtgtgtaaattatagctgagtttctttaaaagtggttattgagaaactgttctctgctttttacacctaagcacttattttgatcccctgtcttctcagtagattgaatgtctttgtttcctggtgtattcctggtgtatgcgttatctacggttacatcagaaattaccccaaaacttagcagcttaaaacatttattaactcacaccagttctgagagccaggaacacagaagcagcttaagtggctggttctggctcagggtcttagcttgcagcaagcaagtctgcaggggctgtagttatctcaagactccactgcgccagcggctggagaatctacctgcaaggtcgttcccatgggtgttggcgataggcctagttccccgccatgtggacctctaggtagggctgctcacagcagggcagccctaaggccagagatcagaaagggtgagcacaggcatccaagatggaagtcccagttggttatcacctcatcccagaagccacgtgctagcatgtctgtcactagctgttggacacacaggccactcccaggggkctaacmggggtaagaatagcaggaggcggggcccagcagggccatcttggaggctgctcccacgcttgggcacagatcagagtctgaacctaccaggcacttagtcaaggcatgagttagtggacgggtggttctggtctcaggcgcttgtagatgatgtggctaactgatctcaacacatataaccagtagctgtaagtgacgttcttgtagttttgctcacctaggygtttctgtgggcaggctgtcatgcagtggttcataccatgtaccaggagcagcagctgtgcatttagcatcataaagggcagtttgcatttgtagtattaatggtaatgatctgtgtttctcttcttccctcagcctccctttggtctgcttctcgaaggttcaattcacagagcacttcatatctaccagggtaatatcaaaatgtgggttttggtgcctcttttcctttcatttgtagaaccatctttctaaagtcaaaacttcctaccttttggttctcaataatatttaaatttcctcttttgtttttaagagacagagtttcactatgtttcccagactggttttgaactcctggcctaaagtggtcctcccgcctcagcctcctgagtagctgggattacaggcatgcaccaccactttcagctttaacttttttgacggtatttttctgagacccttaaaagaagacgtaactgcaagagaccaaagagaaattctgtatgtgtttgctctcttttattatggaggagcttgaagtcttaactcaagatttctgatgaggaagtttgtatcagagtctctaagagaaactcattatttgaaaaagcacattcagtgttaaaattttatacttgagaaaacatttttaggtatcataaactgcagaaaacattcgacaaagttccactcactggtgggagacacaggagcagtgcagggatagcagttactgtagggacccccccggggtgcagttccggctgcccctcacagcctgggacgccaggcttctgcaagatggaagtaatgttcatttctatctgcatgggtgttggagaggattaagtaaatgtatacatttaaagctcttagaacagtgcctggcatacagtcagcactcacaaaacattggctgctggaactgctgctgggactccagggatcctctgcagtggggagatgtgggagtctttcttgcttctcaaagaagcggcaaaacattckgagcataggaagaagttgtaagtgagcatgtgggtaggttgtgcctactacccctgtgtcctgtgtgagaggttagcaccttcctgccagcgtgttcttctcacactgggcactgctgaacccgtatggggagactagacatcaaacaggtcaaagacgttttgtagagagcagcaccttccttgtcctccttgtctctcaaggtcattgaccaaccacagatcacggagttcatgtctctaggagctccaagccctaccccactgggaaagcattcattcctctcccagattggtgtggagcccctcctgcgcgccagccaacaggacgggtgggcctggtctttggtgtggaggccggtgcattttgcatatggagcaagtcgttttcttcctcctaatgcaaccctggagtagaaagactgaaattttactttgcagtggcagcagcaataaaagcttaaaaacggttctgaataattcggtttgggatctacctaccctccctctttgyagactacagaaagaaagaccccacctccttttgaatctaggcccccctctttctttcctcccttcctctcccctccacctacctgaggctgagcaggcaggggagagttaggaaatgaagaagatcttgggctgggcacggtggctcatgcctgtaatcccagaattttgggaggccgaggtgggcggatcacttgaggccaggagttcgagaccagcctggccaatgtggcgaaaccccatctctactaaaaatacaaaaattagccagatgtggtggcatgtgcctgtaatcccagctactaaggtgactgaggcaggagaatcgctggaaccctggaggcagaggttgcagtgagctgagatcatgccaccgcactctarcctgggtgacagagcgagactccgtctcaaaaaaaaaaggcattgcccgcaccaagcttggcatcctgasggtggggaggggaagtggctggggacygcagtgctatagctgctgagactgagcactcctaacacccgaccctcactggccatgctgggaccggctgtgaacagtagccatctaatacctaacacagccctttcaggcgggtgcttgttttcccatttgctcagttgtagacaccagracacagaattgtctggggttccgagccagttctgcctggcactcacctgggtgtgaaggaagagcaggcacctacctaggaggaggtggaggtggagcagggaacgtcatggtcctgtttgagcaggatgtggtgaagggtcattggagctgccattccagggccactggatgccaagggaggcgggagagctgctggccctgtgtcctgggttgtggggaaagtagaggcagcctgtgcctccaagataaatgtgccccaagacaccacaagcccagccttcttggatgggcacccttccagcactgagaagtacccaagtgagggctcttttgcagaacaatgagagttcctgctttgattattgaatgatgagccattgttccctgtggttctaaaaggatacagggagcctgtcctcggggttaccccagaggggcggggcctgtccgaaagagcgagccttttgttgccggggatcccttcctaacatttgtgtgtggccatttcttagaggatttgagctgccttttcaggtgcttgtgacatttgtctacgaaatgtgttttacagatatgttcctaaaacatccctgagttcaccaccttggccagaagttgttctgccagacccagttgaggagaccagacaccatgcaggtaagacctccctgggagacagaagctagagggcaccacctagaccctgctccagtcagccacagaggttgtcaccaggccacagaacgaggcttcatgtttccagatgctcccagacacagcacagtgccagcactcatgtccattttcaccagttaacaccagaatttcagatgtttttcattaactactccttgaacacctgccacactgcaggcaggtggcataattgagggcagggggcccctgctccatctcgtctgcttctgttggtgggtgcagcgacagctctccccagttagcacagttaagcacaattactggaagccggtgccacccgggctgttggagaaacatgcagaggtatcaggactcatgtcgacctggagcccgtgtcagaagggacaggatcattagccactcttgccatgatcctcgctttccagaacactggaaatcaagatcctcgagtggaatcttcttatatgttaaataccgtttgagattccrtgcgagtgaaacaagtctgccaagagtttcaccctcggtgctggtgcttctggtgttgacagtgtttccagggcaggcactctgtcgtcccttctgtgtgtctcgccctcggtcaggccggggggtcggtgcccattaaatgcttgttcagagtaaacggtgcagaagagaggggactgtgacctgggtcagagcagagataacaggaactgagcacggagcccctctgggcacaggcgtgcagggggaacgcgtcytgccccaggggtgggatatggggttgggatacggggggctcctcattgcaaagtcctctcctttcrcttcctggggtttgcacacttctggtctgctggctcctcattctcatgagaatgaaccaggtggagggtttcgcccaccctagagttgtagaaacctagccaggcgtgccgagtgcttaggcgagggagttgcatgaggcggtttgggcgttctctgcagtcttggggagcttccttctgtgaaagccccatgtgccacagtgctggtgctcctgaagcagcagactgaccctgtgcctgcccttgtgcctgcagggggtggagcaggggctgggccgccagcagtgaggtgctcacaaggggtgctggctrtcaggtccaccctagggccccacsaccaggagctgcacatcacactgcagcgcgtgggggagcaggtgagggtgactgcccacccacccgccttcccctgcagaggtcgtgaagaaggtgaatgagatgatcgtcacggggcagtatggcaggctctttgccgtggtgcactttgccagccgccagtggaaggtgacctctgaagacctgatcttaattggaaatgaactagaccttgcgtgtggagagagaattcgactggagaaggtgagaccacygagcttctctggatattcarggactcagccaccaagtatgtaatctccacgccccagctcacacggaggagggaccctcgccgaccccgtctcaggtggaggccaacaaagctgaggctcagaagggactttggggggcgcccacggcggggctggggtccaagggcagggcaggcttccactgctctgagggcggtgcctggcccagcaggtctgctccctggaggaagggagacagcacataaaacagtgctgagggcagaaacatgtctttattgtgttccagtcttattagtatattcccatagaaaaatgcttgattgcaaagataataaaaatcccggttaaggatgtagtgcactttatagcccctgtctatgaggaaaaaactgttaagtttctgctaagacagtactctgtcattagctttgacagctgctgctgtttttaaatagtaaacactggttgacaggcatttccctgggtgctaatttacctcaccgaccattcaaaactgcatggtctaggccaggcatggtggctcacactgrtgacccaccacattgggaggccaaggtgggggattgcttgaactcaggagttcaagactagcctgggcaacatggtgagacctcagagacctcatctctactaaaattccaaacaattaggtgggcatggtggcacacacatgtagtcccagctatttgtggggctgaagtagaaggatcatttgagcctgggaagttgaggctgcagtgagccgtgattggccactgcactcgagcctgggcaacacagcgagaccctgtctcaaaaaaaactgcatggtttgtctgtttattattatttttcagactcagtctcgctctgtcacccaggctggagtgcaatggcgcagtcttggctcactgcaacccccacctcctgggttcaagtgattctcctgcctcagcctcccgagtagctaggattacaggtgcatgccaccacgccctgctaatttttatatttttagttgagatggggtttcaccatattggtcaggctggtctcgaactcctgacctcaggtgatccacctgccttggcctcccaaagcgctgggattataggcatgagccaacgtgcctggccagtctgtttatttagctaggcatttctagccttcagctatgattctatttgctgggggcgtctatttgatttttgcctactctttttttttgtttgtttgtttgagaaggagttttgctcttgttgtccaggctggagtacagtggcacaatctcggctcactgcaacctctgccttccgggttcaagtgattctcctgcctcagcctcctgagtagctgggattacaggcatgcactaccatgcctggctaattttgtatttttagtagagatggggtttctccatgttggtcaggctggtcttgaactcccaacctcaggcagtctgcccgcctcggcctcccacagtgttgggattacaggcgtgagccaccacgcccggcctgcccactctttttataaaattataattacctctgcaacaggtaatttttctgggatgcttaattatcaatataagttacatggttttctttatgaattaaagctcctcctctgaaggcagatgtttgcatatttgaaacatttcacattaacaaaaaattctagaaagcccctcctaagcagattgttttttataacaggaaacccagtgggagtgcacatgtcatgctgaaacaaactctaaaaatacttattttattatttgtcactatctaacatgcgtrtccgctgagtttgttatatgatatactttgtctctagacatttaagttgagtatgattggattttttcttatcagtaaaatttaagatgawctccaacatctaataaaaacactgtaggccgtgcgtggtggctcacgcctgtwatcccagcactttgggaagccgaggcgggcagatcacctgaggtcagtttgagaccagcctagccaacatggtgaaaccccatctctaataaaaataccaaaaaaaattagccggggtttgtggtgggcgcctgtagtcccagctactcagggggctgaggcaggagaatcacttgaacctgggaggcagaggttgcagcaagccaagatcacgccactgcactccagcctgggtgacagagcgagactctgggtcacaaaaagaagaaagaacactgttgcatttggaagcaaagatgtcttcatctgcagccacacttggtgtcgtgatttcccggcattgagaatggttgcctggctcttgagaattttgcagtcgttaaaagaatacaggagagcctcaatcattgcaatattagtagaactgtaaactgcgccaagagacacratggtatgatttgtgctttttctctctatgttatgctttgatagaaagggttttgtttttttttgtttatttgttttctttgagacagagtctcgctctgtcgcccaggctggagtgcagtggtgcaatctcagcctcctgagtagctgggactacaggtgcatgccgccacgcccagctaagtttttgtatttttttagtagagactaatttcaccgtgttagccaggatggtctccatctcctgaccttgtgatccacccacctcggcctcccaaagtgctgggattacaggcatgagccaccgcacctggccggagatagaaagggtttttgaagtcaccgttggtatgaggattacagcagctatctggatgcatatccatggtatctaataatcaaattgtgcgtctcctctgagggttggagcatttcccttaggcagccccacggctgtgcagtgctgccacttgtcagctcacagccccggttgtagatattaaagagatcattagacagcagatgaaattcatgtcacaatgttttcagtctttctcattttgtgtggtgttgacatcactacctgttattagcaactgttcttactcatcgtaatgagccactgatgaaacacacctgttgaatttttcaggtcctgctggttggggcagacaacttcacgctgcttggcaagccactcctcgggtaatggctgtgaagtgctgggctttgtctggggctccagggctggacatgcagacagtggtcacagtgcaattaggccaggtggggagttgcattcatattctttgttgacaccaaacacaacatttatacttaataatagtggacatttagggcccatgagaacatccagaccaaattattggtctcttgctgtttcatgacagtgtggtcctctgaagatttgttcagactccctggaactgttctttgtggtcctttttcrtggttttcaaaatgtttccattgagggcgtattacttttataatcaacaaaagagaaagtataacttcattttagaaattctcacctaaggcatttgaaaaataatccaaaaggtacattattgttgatttttcttccttctagaaaggatcttgttcgagtagaagccacagtcattgaaaagacagaatcatggccaagaatcattatgagattcaggaaaaggaaaaacttcaagaagaaaagaagtaagttagagaaagtaccgctgggccctgttgcacggtgctggttgcccaggcgcatgcggacggagggtgtggggcacgtgggtctcgggacaggaagcccaggcaggtctcaacctggctgccactgcccacttgccaccctcatcctagagggagcacccagagggtccagcctcgctccccttctcctccacgctccrcgcgtgaccccacctcgctccccttctcctccacsctccgcrcgtgaccccacctcgctccccttctcctccaccctccgcgcgtgaccccacctcgctccccttctcctccaccctccgcgcgtgaccccacctcgctccccttctcctccaccctccgcgcgtgamcccacctcgctccccttctcctccaccctccgcgcgtgamcccacctcgctccccttctccaccctccrcgcgtgaccccacctcgctccccttctcctccaccctccacgcatgaccccactttgttccaacccatgaygcctagcactgtccccaaagcagcagtgaatccgcaagcaggtgtagggctgtcctagcaggtctgcactgaggacatcccccayagtgggcatcctgagggatggcacccacggggcatgggccacatagctgagcggctgcagaattctgtccctcacagctcttgctataactgcagttgccggcctaaaccaccaacagtgggcatagttaaatatacccagaatactggtattggctgtcaccttagagtcatctgggtaggggagcctctcrtgtaccttctgacacttccaggtagcctcaaggtcactcaggtggggccatcctcccacgcactccagaagtcacagcatagacagtgtgggaggagaggtgaggtgccagcgcagggcactcctggccatgaggcgtctggtgtcccagcctctgcacctgccaacagagtgaacgaacaagctagcgaggcagtcagtgcacacctggagataaacacggccatgtgcagcaggggacgttgccggggtcgcgctggctggggagggctgtgtgcagagcccctgctgtaactgatgacaacagtcagggtctgtggtcaagcctgtgacatcctttctttcagtcrtcacgaccccgcagactgtcctccggataaacagcattgagattgctccgtgtttgttgtgattaccgagttaatacttacaaaaggataaaaataaactcctgcttcccaaggagaccaggtttctgtgttctggtttaaagccgtgcatgcctgttgtagatagtttaactggagcagcatgtctgtaagcaccaggcccccgagccagagaaaacaggaactcggggagaatgacaagcatggccctcccagggctggataaatagtattcttggcagccctccaccccatgtggcggcggcagggcccaggggagtggggcggggacgcagctgggacttggagctgacatcaagagaggcgcaacctagattccacgagatggacaagaacagcaaattccatctgagtaatcgaaacagatctgtcgccagcggggcttttgtaaggctggggttcagagcaggtggcctcgggtccctgctcctggcccttctgcctcacacagtcgagcaggggcagggatcacagtgcagggggagtgacacagcgcagcagggatccaggagggctgggcaggacaggaggagggacagctggggagtgggcacagcacattctgggagctgacaacagcagggacagagcagaggcccaggctgtgctgaactcagtcttggaagtagcaggcagacccagagggcttgggctgctgggatcgataggggtggctgaggcaggcagcagggcctgctgggagctacccaggtgagaagggacagggtcctggagccagagtagcgaaggaaccagcaaagggaagggcctgggcgtggggatgaggggctctcagatgatgccaggcccctggtttggttcattcacaaagacagagccatcctccaaaagaagagttagggcttcaagtgacaagatacaaacctgtaatccgacccggctaagtattttccccaggagtcctacagggagtcgctctgagatctggagataagaaaacccctcaggtgcccagcgccctggtaggtgctggcccagctcccccatcgtgttctccgcgtgcagcagggggcgccagcccagtgggctgagcgctcctggtcccgcccatcccgggcatcctgaatttggagacgtgagaacccagagagtcaggcctccagggctccacatgggttggagcgaagctgggggtggtgggagggacctggggctgtggtgtgcttgcgtctttaatgcagccacatctggaagtaataaatttctaaatgcggtagctcatgctatctccatctgaaagtgatgtctctagaatcatgaggcctcgcatcctttccccttacccaccccctctctaggttctctcccagccagcccagcagcgtctcgtgtggtctctgttctatgtggaggttataggatgtttaagacgggaatcgttggcctattccatattctttgacataagcacatctccatttcttactatgcttgaaataaaaaacaggttctggagactcctgctgcagtcaggcagttcagcttggtggtggggtggggtgtaagcatgggttctgcagctagagagctgagtgtgaatcccagacccaccgcagtgagctgggtgtgatcttgagcaagttacccagcccctgtctcatctgtcaaatgggggtcatcctagcaccaaacctaatgcgttgctgtgaggaatccagcagttagcaagccacccacagcaagtgctcagtcagtgttcactatttgtattacctacagccactgccgtctggggaactgtttggtgacatgcctataaaatattaccaatattggctgggtgtggtggctcacgcctataatcccagcactttgggaggctgaggcgggcagatcacttgaagtcaggagtttgagaccagcctggccaacatggtgaaaccctgtctctactaaaaatacaaaaattagccaggtatggtggcgtgcacctgaaatcccagctactggggaggctgaggcaagagaatcgcttgagccccagaggcaaaggctgcagtgagcagagataacgccactgcactccagcctgggagacagagtgagactctgtctcaataaataaataaatatatatatatataaatatataaaatattatcaatatcaaactggtgaaagttaactccttttaaaaactagacaagtttcctcaaattatcacacgatccagcagttccacttctggggctatacacaaaggaattgacaacagggtcttttttttttaagatggaattttgctcttgttgcccaggctggagtgcagtggtgtgatctcgacccactgcaacctccacctcctgggttcaagtgattgtcgtgcctcagcctcctgagtagctgggattacaggcgtgcaccaccacacccggctaattttttgtatttttagtagagacgggttttcaccatgttggccaggctggtcttgaactccggacctcaggtgatccaccgcctcagcctcccaaagtgctgggattacaggcatgaaccatgacacccggccaacagcaaggtcttgaagagacatttgtacaaccatgttcgtagcagcactgttcacaatggccaaaaggtggaagcaacccaagtgtccatccatggatggaaggatcaacaaaatgtggtccatccacacaatggaatatcattcagccatagaaaggaaggaaattcttatgcatgtcacaacacggatgaaccttgaagacactgtgctcagtgagagaagccagacacaaaaagacaagcatttgtatgtttctgcttacatgaggtccctagagtagtcgaattccagcagcagaaagtagtaggatggtgggtgccaggagctggaggagggaggagtaggaggtgagtgtttaatggggacagaacaggcctggtgctgtggctcatgcctgtaatcccagcactttgggaggccaaggtggacggatcacctgaggtcgggggttcgagaccagcctgaccaacatggggaaaccccgtctctactaaaaatacaaaattagccaggtgtggtggcgcatgcctgtaatcccagatactcaggaggctgaagcaggagaatcgcttgaacccgnnnnnnnnnnnnnnnnnnnntggtctcaaactcctggccttaagcaatcctcccaccttggcctctcaaagtgctggaattacaggcatgagccaccgtgcctggccacaagttaactatataaatgcaatagtctctataaaatcctgtagtgaaatcctatgattttgtgttatcttggcattcatttttaatcttcctctaacacacctgagctccttttaaaatgcttactttctctcgttgtgctttgaatgaaatataaatttgctaccctggtttctcaaaaactctgtaagggcttcagctataacttgttccatttacagtggcataatttagtctaactgtccttttaaaccagtgagttttgcctatcttgtggctaaaatttaaaaatcaaagctataagatttgtatttatgtttgtttgtatttgtattaatacatgtgtatacatgtctgttggtatactgtctacttggtaccaaactgacttacaaataagcaagtcctcattattaataagccaaaggctgggcgtggtggctcatgcctgtaatcccagcactttgggaggccgaggcatgtggatcagccaaggtcaggagttcgtgaccagcctgaccaacatggtgaaaccccatctctactaaatacaaaaaattagccaggcgtggtggcatgcgcctgtaatcccagctacttgggaggctgaggtaggagaatcgcttgaacctgagaggcgggggttgcagtgagccaagatcacgccattgttacactccagcctgggtgacgagcgaaactccgtctcaaaaaaaaaaaaaaaaaaagcctaaatgcttttcaagttcacatgactttagtaatctttgataaatgaaactagttttaaaactgttggtgcccaggcatggtggttcacacctgtaatcccagcactttgggaggccgaagtgggaggatcgcttgaagccaggagtttgagaccagcctgggcaacacaagaccctacctctatttaaaattttaaaaactcacagaaagtagttagatgaaaaataaaaggctaaaaaataaaatgaaataaacttaataacttctggtaaaataagataaaaatatctgcagaatttcaaacatttctgcctgggtctataggtcagagtaatttatacaatcttggttagatgttttaaggtcataaaactgttgcttctgtgatttttgtttcttgtttttttttctttttgagatggagtcttgctctgtcatccaggctggagtgcaatagcgcgatcttagctcactgcaacctccacctcccgggttcaagcaattctcttgcctcagcctcccaagtagctgggactgtaggtgcacagcaccataccaggttaattttttttgtatttttagtagagacaggatttcaccatgttggccaggctggtctcgaactcctgacctcatgtgatccgcctcctcagtctcccaaagtgctgggattacaggcttgagccaccacatgttgacatgatttttgctgagaaaaatgcagaatttcatttaccttttagaaaacttaaaatttccccaaatttgctcttctaagactccttccttttgccatctttgataccacatgaagaaatctaggggagacttctagcagccctgagaccccttgaagaacatagaaaaaggtgccttgcacatcccctatttggggttttctgttttccttgtggagccccaagagtcatgagctcccaagaccctcaggtctaaagggctgctgtcttctgcattgagttaccagatctctttggcttttgagatacccaggattattttgtactgtgagagagcgcttgacctctgtgtgtgcggcaactggcaagtcactggcaagggctacaattttggaggtggctgacggtggttgcagtgaatagttattactgcaggggcttcttgtttctttgtgactttctataagaaaggcacgatttgaggccaggtgcggtggctcatgtctgtaatctcagcactttgggaggctgaggcaggcagatcacctgaggttaggagtttgagactagcctggccagcatggcgaaacgctgtctgtactaaaaatacaaaaatcagccaggcgtggtagcatgcacctgtggtcccagctacttgagaggatgaggcaggagaatcgcatgaacccaggaggcagaggttgcagtgagccaagatcgcgccactgcactccagcctgggtgacagagcgagactcttgtctcgaaaagaaagagagagagaaggaaggaaggaaggaaggacggaaggaaggaaggagaaagaggaagggaggatgaggaggaaagggagggagggaggaaaagaaagaaggaaggaagggagggagggatggagggggagagagaggagagagagagagagaaatacaaagaaaggaagaaaaggaaggaaggaaagaaaaagaaagggaaaggaaaggaaggaaggaaggaggaaagagaagaaagaaaggttagaacacttggacgcaatggaaacaccacagaggaagaaggctcccatggtggatgggctgatcacagaaggggctgattggcactggaccacacatcagccttgggggatgccttttcagtgtgctgcttgtggaagctctgtggaggccggtcctagagcatttccttcttatcggggacccaagtttcagtgtaaaaatggaatccttcatttctgggggtctagatgctctgccctccagctacacctgttttttgcataaataagtatccggccctggaaactgcaaaagctttgttggttctgtttggtaatggactccaccctgagctcattggtccagttggaaaatagaaattaaactagaaactatgtatctatttacac

SEQ ID NO: 97862 - DNA, 46894 bp, Homo sapiens
ctctaacgtttatgctgtgtaataatatcacaggtttttctatgaagatgacgtgatactttatatatttaaagggcttggcatgatgcttggtatagtagaggtactcaagaaatgatggctttaaaaaatgtaaacagctaatacaacatctgatacagtaatttcagaaacttcccatcattttaaaagcatacttggtcaaagtccttaattcaaatgtatatattagtttaaaactaattttagtatttttattttcgatatatgacactgaagaaaagtcaaacttcacactaaaaggaactcctgtcagaaactcagcaaatgttgatttaagttatatttatctttgcatcagtttactagtacaacttgaataactttttgaattaccaggggatttctctatagagaaaagtatgagactggctccttctagaagtaagagctacactattatgcaaaaggaaaagattctccctcacatgagagatttttctagatgcgatttcctgtgaaagacaacacctgagcgacatcagcagcattcacgccttcccttcctgtctgctccccagctccgtgtgggctgtctctaggatgaggatgtgggcacgcactctccctctctcttcacctctctctccctctccctctctctctctctccctctctaggactgacctttattgcagcctctctcagggcctccaggcgctgccggctgctctccttcatgttcacgacatctttgtaatccccctgcagggctctctgcagtccgtagacagcttggaaaacggaattttcactttcattcagctctttctggaaaatttcaaacgtgtgcacctgaaacagtttctcttcatccgacaggcccacgtctttctccactgctccaattgcagttttcagtttgttcagaactgcattcttctggcggagaagccctgagagcttcctgcagctgtcccggacccactgccggctctgcatggcagccacccctcgcccgcggtgcagtttgatcacacgctgcgccacctcctcgtgctccacagcctgcaccgcccagggaaggacgggaaacagcacccagaagaagcttcttcccaacaccttcatgatccaggtccggagggcagggcacagcaatccacgggtctctgccccactgagcttgcatgtcagacacacattttcagctgaaaaagagttattgtcacacatagttaaacaatgattcattactattgatcagagtattaaataatcagatctgaaaaactgacacctttctgaagaaattctcatttttcctagataaatatcaacatctaaactatttatttcactgagattaaaatcaaatactgaatgttgatgtaccttgtatggtgctttgtgaagggctgagatgattaaaggtcagctacatctttatagaaaggattaaaggtcatttttttggggggcgacgcagcctcgtatctctaccaactccaccatgtgcaaaagacattaaccaagtctatttaagagagtccatgttggttgggcatggtggcttatgcctgtaatcccaagcactttgggagaccaaggcaggcagatcacctgaggtcaggagttcaagaccagcctggttaacatggtgaaaccctgtttctactaaaaatatgggcctggtggcgcacgcctgtaatcccagctactaatcgctagaacccgggaggcggacgttgcagggagcccagatcacgccattgtactccagcttgggcaacaacagcaaaactctgtctcaaaaaaaaaacaaaaacagaaagtccatgttatcgaagcccagaaaataccatcaacttcccctcacaggtcactgggttgcttggggacaccatgctcaacgtcactccagaaacgaaatcttctgagctactgttagctctgcaggcttcttaaaatcatttgaaatgttgccacatttccaaagtcagtctacagtcaagtgctaccaagatgtcaagaattaaaaatatatatatatatatgccacaatacctagatctctagaactttttgttatcatcccaattcagtctccttctcttcctttctttaggaatacctaaaacaatgtatattaatttatcctggcaaggcacagcacagacaggaacctgctttctgaacattactgctgggggaatgaggacggtttcagtgcggctgtagccgtggtgtccaggtggtgatgagcaggggtagggcaaggcacccagacaggagcactgttcagaaagcaggatgagacagcggccagcaaaggtcactaaggcagaacgagctgagaggtgggaaaccgagaccgtggaaggaaggagtaataaacgtagagtccgtggaatttggccactaggagatcaccagtcacaagtagctatcccaaaaaaggcaacaaaaccaacacctaccacttacgcagatttacagtttaaagtaaacaacaacaaaatattaacctaaccattcttcatagcagcatccaatggactgttactcaggaattcctactcaaccatcacatattacaaagattccccgacctggaaacctggttactaaaagatgtatctatatatctatactttcatttcactgctaacccaaattctaattggtttaatcgagtttcccaggcaaagtaggttagatgcagcaaaagtaagggcagcatttctggaggcagcattctgcccaaaccatgaaatggcagccacagaaagagacaaaccttatgcaaaacaaacaggagaactaaaaaagcctggaggccagatgactcggtgaaggctcagcgactgtctgcaccccagcaggtcctgaagacagtactgtgttagacaacagtactgatcagaattacaagcaaaagtcaccaagaaaagactatattctggttagaaagtgttcaattcaaaacattcttggagactgactcccaaaaggagaagcacactccacagagaattcacttacctagaacaggtaacttcctaacaagataggataaatgataatgtgctgttccaatcactcaattttatgttagtttcaatacaactttaagtacacgtgtacaactttaagtacacatttaccaccttaaaaacaaacaatgaggcaatcacttagtcatgcctagccatatagctgagctgttattttaatgactcactcaactgctaagcttctctcggttggtccaacggagctaaataaatcaacagctacttcacaagtgaacttttagtattttccagaaccaagacagaaatctgagatgctttgcttacacttcccagtttccccaaaagatcccaaaaagtgattctttgatggattttatgcttcagaaaaataagtttcaacacagctcatgtgtgaatgacacctctatgttcatttctggttccttcctcaatcaggttcctaaaattagttgtccctctaagggagctataatttttatgagaaacctttgaggattttagttgtagttatactaaaatttcccactgaaacatactcataacatgaaactgaaattatttatggacccttaaaatacaaatcacctttattcaaactcatttcattttatcttcaaacttgcctccaaaatcctactgactactaaattgtagcatgttttttgagcaaattagtaaacatctttagctgttctagttattaaaaagacactttggattcctgtaatgtgttttttttgttgttgttgctgtttgagacggagttttgctcttgtcacccaggctggagtgcagtgttgtgatctcagctcactgcaacctttgcctcccgggttcaagcaattctcctgcctcagcctcccaagtagctggaattacaggcgctcgccaccacacccagctaatttttgtatttttagtagagacggtgttttgccatgttggccaggctggtctcaaactcctgacctcaggtgatccacccacctcagcctcccaaagtgctgggattactttttaaataatgaattcttagaatttctgcatcttgagcaattgatacacataacaatgcggatgtatctcaaggctgagtgaaaaaaaatctcaattttattgagaagacacacaggtgtagattcacactcactagtgcatgtatagttggtgcaatctcaacaggtcaggggatttgatcaaagaaaattccccacatatactatggttttgcaaggtgctaccattggagaaaacagggcaaaggcactctgtaggatttctctgtattactccttacaacttcatgtgatctacaaccatctcaaaataaaaaggttttcaaattctacctaagaccaggtgcggtggttaatgccactgctgtattacgacacaattatctgtattcccagcgctctgggaggctgaggtgggcgaactgcttgaggtcaggagttggagatcatcctgggcaacacagcaagaccctgtctctattaaaaatgaaataattagccgggcgtgatgctccctgtggccccagctcctggggaggctgaggcgggagaatcgcttgagccttgaccagccactgcactccagcctgggcgacagcaaaactctgtctcaacaaccacaaaaaagctttagaatatttaagtcaagcctgtaggagaaaaaaactacaaatatttcacaagtaatccaatcattaagacactccttttgaaaaagccggtaaataagataaatttggaagacagaataatcagaaaaacaggcagtgaatagggacccgatacgcagcggtcttgcttcccccgcgcaggcgtccacaccctgggtcatggacaccgtgaggagccgttaggagtcacaggaggggggccagggacagggctgcatctctgcggccggccctggaggccccgagtccacccgggcggccagggtgggaacgcaggttccattccaggttagaacgtgggcctcagcgaagagcgcctaggcaaggcctggaggagcgggaccccaggccacacagaccacccgaccccgggagacaatacctgcaagaaaaggggagccccgaggagagagagaggggaggtgagccccagggagggagagagaggaggggagccccagggagggagggaaggaaggaaggggacccctgggaagggaagaagggaatgggagccccggggagggagagaggggagccccagggagggagggaaggaaggaaggggacccttgggaagggaagaagggaaggtgagccccggggagggagagaggggaggggagccccagggagggagggaaggaaggggaccccgggaaagagccccggatggacgggcctggtgctcaccgggacgcagggatccgcgcccgcccgtccggcccgagcatcaccgttccgcggcctgggccgggctctgaggcgccaggacccgaggggcggagggggacgctgtctcccgcctcggagcgcagcgccggagggcttccttgcatcccttcccaggcgggaccagggaggccgggaggccgggagtccgggagggagcggccgccgccctgcccagcaccgcccccgctcagccaagccgacccggactcccgcccagccgcagtcactgccccctttaagaggcggggcgtgggcgggtcccgtcggccgcgggcggcgagcacttcctggccggcgtggggcctggcagccgcaggctggcgttggaccccgcaggggcgagccaaggccctcgcagagggctggacgcgcaggggctgtggggcgcgagctcccgtgggcccccgggcggcgctgagcatgccgggagtgggagtccccgcggccggctcccggcactgccccggagccgagggccgcggccgtccgaggacgagggcggagccgccgccgcgcctgcgcagaaggccggggccggccagaagcgggcggcgcgggggagatggtaggtggcccggcgtcgcctctgcccgtcggggtcggggtcggggtcgggccccaaggtcggcgcaggcggcgcgctggatgtgggaggccgagcccagcgagctgcgcggggcgttccgcgtggatccgagggaggarcgcgccgcgggcccgcgagccggagcggtggcgtcggaggcgcgggaccgcggggagcgcgggtttgacccggagccgcgagggacgaccgggagtgagcggagggcgggggccgggaggaactgtaggggccttggggcaggggccggggccgagcgggaacccaggccgggggcttcccagggcggcttcgaaacgggcagtcgaggcgggcgagggctcggctgctcctgcgggcgtctgtgcagatgctgaggctgttgaccaaaacagcgcaaggaaggaatccgcgagaagctcagattcgcgggggaggccctgctgccgggaggggagggagaggcacagcggggccctagcgcgggctctagccgggagctgtagcgtggctgtaggtgtgcatctgtggagctggtagagttccgcagcgcaggagggaggctgctggaggtgcacatcagttactttgaaatgtggtggaaatggtgatggatgggatttattcagtccacatcggttcagaggccagcaaggtgctgctgggtgtgactggtgctgggccaggcatgatcttggcgttgagggagttgatgccccagcaggggagacaggcaccagatgcacaattgtttgaccacagttgggacaaaggctaaggcacgrgttccaggaacttgtaggatgcggctgtgggagtggtgtcagatgctgagggtgtgagttgaactgtggagaatttctctggaaattagccagagaaaaagtgaggttccggggcagccagccgtgtgcggctccaggcagaagaaacagaatgcacagacccttagtggtaggcgatgatgacgtataggagctgaaagattgtcctggctaaggcacagagagccaccggagaagggacacggtaacgtgtagaggggagtggagggtgaggacaagcttcaggatgggagaagagccacaaaggagactgagagggggctggtaggagaaaccaggacactagaatgtgtcgaaaccaagaggatggagtttaaaggaggagggagccatcagcagtgctgaacaaaagagcagctgaaaagatcccactgaccgcagcagccgagcttttgtgacctttaggggtcactgcggaggccgggctggagccaggtagcctgagttaggatgcacacctgggcaggtagagatagcttgctccagcttttaggaggacaggggcagagtggacaggaacttagtttggggaaaacttgaacatgttcaggatgctggagaggagcgttccactgctgccgaggttggagatccaagagcagggatgaatttaactccccctccctctagcgtgctgtataccgaaacagagtgaaagtgatccataaacttacgtagtttattcgatcaacatgattggcccgccagccccgggtaagttgaccctaaggacattttaagagtaatttctttccattttacatatgggtatccttggtgccagattatatgagtcgtatttcacaaggtcacaattaaagtgtttgagacttttttatagtttagagattttatttgctgtttccactggattgtccagatttttatttcaagaattgtgtacattttaacagaaataatgaaacctagaaaatgccttccccccaccccatgtacacactttaaaagctggccttaataatttaatttgcatgatgtggtaagcctcagtgaaggttgtgagcttgaagggcggccctagttccagtgtatccaccttgattagattgacctgggttcagtcctgtctgggtgcactcgaagcttcttgccaacgtctgggcctttgttaatttgacctgggttcagtcctctcttggtgcactcaaagcttactgccaatgtctgggcctttgtaaatttgatctgggtttagtcctgtctagagggactcggcttccttctctcccctgtagttttttagttgacgagcctttttgtttcctaagaagctttatgccagttccctttttcacaagaggtaacttgggtctctcagtcacttttggacatgaagcacctagtctttagacttagctatcgatcattgctttaatcactgttattttatggagaaacctgtaaggggtgacatcaaatgattgcagctttgttgactgaccagaggcctgttaatggactaagcctagaccccaaagcttctcttgctccttcagaaccagtgccttggcaccaccgtgtggttcagggtttactggagtatcttgtgacatcagacaatttgagtagattgcagggggctcttcgtgtttctggataccgacttctgtccactctagctaacagtagtgattcaaagccattttgagtggcctggatccatgtgctcctgcatctgttcttctagagttccaagaaattaggctgctggtgttatggtgttgtcacacattaggggaggcttcaaggggttatcggcaggagctcaagatcagacaccatcatatcttccagatttgcacattcctggtgtggagtcatcagttgtataatgctggttaaataattcagtcgccgaagagtatattagtctgctgattggtcttggagggtctgagggtacaatgttgaatttttttaggtgaaattcatataacataaaattaactattttaaagtgtacaattcagtggtgtttagtacgttcacaaatttgtggaaccactacctctatctagtcctaaaacatttttgtcrccccgaacgataactgtacccattagcagtcactcccaactcctcccttgccccagcccctggctaccactcacctttctctctatatagatgtgcccattctggatatttcatataagtgaaatcgtacactgtgtggctggaatcgcacactgtgcggctggactcatgcactgtgcggctggagtcgtgcaccgtgtggctggactcgtgcactgtggctggagtcgtacactgtgcagctggagtcgtgcgctgtgtggatggaatcatacactgtgtggcttcttgtgcctggtttcttttactcagtgtcaaaagttcatccatgtggcatgtatcaatacttcattcctttttatggccgaattatgttccgttatatggatatagtaaatgttgttgtataaccatggcagatttttaaatctagcaacgatgaccacttccataataagggcgtcatggctgttcctggtggtggaccattttgggggctgcacttctgtctttatcctaaggtttttgaggtaattcttggctttgctcaccctcccttgggaaggctgtcaacttcataaaaagactctagctgtatcttttgtcagcttackgtcagagactatgggatctgccttaatttagctaaatttgatcttaccagagaatacaaccttgaattttttgtttagttcttttcaaaagctcagtttcaggaaataatgtagtgaatatgtattccatttattcctctagaatctagatyggggtcggcaaactacagcccacaggctagctgtctgtttttgtaaattgagttttattggaacacagcctacggctgtctgctttggcaacagacccacaggcctgagatggcagagatggctgctgtctggaacattaagagacaaagttggctgartgaaggcttctgatcttcttcatccgttcttaatctgagttctaccttccccttgtgaggactttgcagatggkcttaagccatctgtgaaacccctgaaattttatgcaaagctgcctgcacgtgtgagggccatatatgttttcctggagggcggacctgtgactcctcagattccaaaagggatccaagactcccaaatgctcaacactcattgtttgagtagccgaaatgttaattgcctagcatcacctgaattagccattctcttaagtgtttagtctcaggagttcgatgtggtttttgggtttgttttttgttttctaacttttaggttcaggggtacatgtgcaggtttgttataaaggtcaactgtgtgtcatgggagttggtgtacagattatgtcgtcaaccaggtactaagcacagtagccggtgggtagttttgggatcctctccctcctgccaccctcaagcaggccctggtgtctgttggtccttttttgtgtccacgcctgctcagtgttcagctcccacttacaagtgagaacatgtggcatttggttttctgttcctgcgccagttcacttaggaaaatggcctccagctccatccatgttgctgcaaaggacacaatctcggtcctttttatggctatgtagtatgccatggtatatatgtagcacatttcctatatgtttttaagaatgattggaaccccagtcattcttaaatgagagttcttgtttgtgtgggtaatagtcatcaatattgaccatattagaaattaaaatagtattaraatatttctatagttaattagcaataaaaacccattacatttttgcaaatatcttaatgtctggcttgataaaagataggctctcgaatctcgcgttcattcctgtgatatcacaggccttgcagcccacggaggcctctgctgtgcactctgtgagaatgagagtgagcaaggctggtggcggcttaggacgctcgggaaggtagttctgtgggactcctgaaaggcctcaggacccaggatcccagatgcacacgggagagtatgtatctggacagcgttatcttaatgcctctgcagaatcgtcctctggtattttggcatcagcatgctttttgattgcctgtctcaaaaaaaaaaaaacttctggaagctggctctgctgtacgtggttggcattttggtgaggaattggtatgtgtgaggggacattgaactttgtgaggagccgcagaagacgtttcctcaggttttaggccagaagggtctgtatctgtaccacttctgagctgctggtaaggttttagatcttatgaaaacggattttcctaactaatcgtgttttctttgctgtggcactggggaagcttggagcctgatttccagctcttacatgtgacaggcacgtccttgtactaatggcaccccttccttatccacaccttgttatccttctatatacttttgttaagttatgttataaatcattccatgtgtttttataagttgtctcatctttatttgaacaagattgagtataaatcgttttgagtaaaaaatttcctgcttatattattgtgtaaagcatttttgtaaaacgttagcatccagtggattctagggtctgtttggatttagagaagttagtgtatcactttcttttccagtgttgcttttatcaggttacwttatttatttatttatttatttatttatttattgagatagagtctcgccctgtcgcccaggctggagtgcagtggcacgatctcagctcgctgcaatctccacctcccaggttcaagtgattctcctgcctcagcctcccaagtagctgggactataggcgcatgccaccacacccagctaatttttgtatttttagtagagatggggtttctccatgttggccaggatggtcttgaactcctgacctcaggtgatccgcctcagcctcccaaagtgctgggattacatcatcaagttactttagataagtggaaactcagccctcctatatctgaaagtgtcaagatgttactttgtttcattatatactatatatagtacagctatttggcagttttgttatttattgcctgcccagagcctctgtcctattttttcattttatttctgtctggtatacagaggcattcttgttattagtattattgtttccatttaatcataacaggtttttttgtgcctgcttgtgaaattttcataaattacttttaacgctattcttagttatttgtgtacattttcatcaatgtgattctgtgatttaaagtgggaaaaaaaatctccaaaccgcacagcctcttcccattcattaaagcctgaactttattgaaaccaaagaagactgcagctgygacccccgctggtgccgtaaggtccttgccctgtgtcctcagaggctagatgtgcattacagagttactgagagttttagagaaaaatgatagtcacacttcatgcagagygaactggatagagatcagaatgtattttgtataaaatgttaattctcataatttttgaagcttagactgcctgtttgttacagtatagatgctgttgtttccattttcagaagactgtgcagtctttgtaactgatgaagagcaaggctttgtctctaattctgcccagttaaagtgcaggcgttaggctaaagctgggacaaacctggagcggcttcattggctttcctacttcttttgcatcccaaagcataagcttaaatcgtctcagaaggacaaggtccgccagtttatggcgtgcactcaggctggcgagagaactgctatctactgcttaacgcagaatgagtggagactagacgaggccacggacagcttcttccaaaacccagactcgctccacagggagtccatgcggaacgctgtggacaagaagaagctggagcggctgtacggcaggtacaaaggtaagaggagactgcagcaaagccggacggatgtcggcctccgcgagyggcctgcrcgctgcacttccagggttctggtgccggggcaggtctccgggctgccgttgcttctcctccccacgctcagcgctcggcgctcagctgcagaatccacttgcttctgtgtaaatggggctgggactgtgattggtgggggtggggagggcgagaagagtggagtcagcgatggggcagggccaggcccgtgcccgcttgttctgtgcggtgagtctgacgctgcacagcctgtcagggaaaagctgctgctgggaggcttggtgtcttggcgtgactgtgtctgttaatacagtatttttktcaagcacttctatttaggctgaaatattgatgatgagaaggttaagaacaacagcaaatcatgaagatgatctgaagtgagggtaaaccttagtgttttccttgcccgggtagtggcgtgtcagccctgaaatagcttcagtgattagagaggctttgggaaaagctcgcagcaaagaaactttttgttgcagattgtgatttttattgacatcagtgcttggatcggagcttcttgtcaaaatgcttcttgtcaaaatgtgccttgaactgagactgccgtgatgagcatacgcagatccacgcccctctgcaggctttaaatttcatgtccaatgcagagggacaggcagcagtctaagagctgacttattttgctttttctttctagcagtttttaaggctaagttttctaaaactttaaaacaaaaccaagccctgactctcatttaaacaagtgttagcccaaatatacaataatttccttggctttaagttcttgtttgtttgtttattgttgtctgtgtgtgtgtgtgtttatgtgacggagtcttgctctgtcaccaggctggagtgcagtggtatgatctcggctcactgcatcctctgcctcccacattcaagcgattctcctgcctcagcctccaaagtagctgggactacaggtgcatgccaccacgcccagctaatttttgtatttttagtagagacggggtttcaccatgttggccaggatggtctcaatctcttgacctcatgatccacccgcctcggcctcccaaagtgctgggattacaggcatgaggcaccgcacccagccaagttcttgtttatttattactttcgttttttactttttaaaatactgtgtgtgtgctttagtctttctttttaggtctgaaaagtgagttgaaaattgctttaaaaaatcttggctcagaaacatagtcagtggtaaaacaaaccaggtttgtacttattgtagttcccaaagaatgaaaattgttcttagttaagctttagtctactttaaaaatttttggctaagttaattgttgagctaattttgtaagtcatatgctgatttttatgcagatttttaaaagttatttaaatatatacagcagcctttgaaaaaatacttgtgtataagtggaaaattgtgtctttgggtgttattgaagcttcatcccttcattattatttaactttattcatgcaattatactcagttaaagtagaaacgtggtacaatcactttaggctctaaaaataaacgtagttctaagactgttgacaaatataacattggttatgacattaacatatacaaatgaacaagtacttgcaaaattacttgaaatgttgaacacggttgtaatgaaatttactgagatggtttattagctcagagcattgtagatcaatatttctattcatgaagtatagaattaggagatggaattgaataaggtgataagtggggattttttttacagaacctctgtcccataaactatgctgaggttgttttctccctgatataagagaatagagttagaaggatgtttatggctttcttcattttgttaccaatttttctttttttttttttttgtcacccaggctggagtgcaatggcatgatcttggctcactgcaacctccacctcctgggttcaagcgatyctcctgcytcagccccccgagtagctgggactataggcgtgagccaccccgcccagttaatttttgtatttttagtagagacggggtttcgccatgttggccaggctggtcttgaactcctgagctcaggtgatccacccgcctcggcctcccaaagtgctgggattataggcgtgagccaccgtgcccagccaccaatttttctttggtaactatatatatgtggtagtatactacttaaatgaccaaagttaaattttgtgtgaaggggaagaaaagtttatcatacctaatctttctttgagcagagaagctacaggttttctacttttaccttctaaaccaacaatttacctacgcattatgataatatgatataatctgtctgaaattactagctttagtgaagtcttgctgggatgccttaaatatattttactgtttgattttctgataaacaaatgctaagttctttaattttatttctaaactagaaatagggggtggggaacctgaatttctaagctattaaatgtggatacataagctaaatgattctgagaagtagttattgtccagtaccattagaattagcaaatgaaatcacttaagaaaaacatcaatcattcatttactttggcagagttgtgataaaaactcaagatattgtaaatactttatcaatacagtatattttatagcagtttgcctttgggtgagctaaatttctgtaaacttaaatttttatttcactttagggaaattaagtttttcttagtgaacagatcttctcaaaaaaaattcagtgatttttttttttccctaaaacccagaaacctagattttaaaaataggaccgttttctggataaattattagttgctcactatttctttcatgtgtagtagaaaactgcagcctattgattgatgtattggaaacacgcttgctagaactatgtagtataatcgaatgctaggattcaaacctcctattttagaattacttttcaaaatagtataacttccttttcccctgatattaactacagatccacaagatgaaaacaaaattggagtcgatgggattcaacagttttgtgatgatctgagcctggatcctgccagtatcagtgtattggtcatagcgtggaagttcagggcagcaactcagtgtgaatttagcagaaaggaatttctagatggcatgacagaacttgggtaagtcaactattcttagcttaratgttttcagaaatgaaaatacttctaacattatttttcagcaacctgtacatactaatttcatatctgcttattttctttgtgtatctttaaaatttcttatgcgtctgtactctccgcactatcaagcctttggtttccttttaattttcaatttaacactttatttcatttcacatttttatttttttcatattaatcccttttgtaactcattttcttctttttgagttttttcctttccaattttgaattgacagtaaatgccaggttcagttcattcgtgttatttcataatactgtatattaaacgtagaatttcttatgctgctctgttaaaaactaagatgtcattttggtttttgcttgtaacatttttctattctacctacaggattgggataaaggcttcattaataacttaaggtgtttctcgcttatcagataagttataaaagtaaatgaaagggcctaatgtaactgtctcttaatcattaagcttactgaactacagtcatgcactacataatgacatttcggtcaacagtggaccgcttatacaacagtggtcccgtaaggttagaatggggctaaaaaattcctacatcccagccatcatagtgtcatagcacaatacattgcctgtgtgtggtgatgctggcacagacaaacctactgcactgccagtcgtataaaaagcatagcgcatccagttatgtgcagtatataatacttgataatataaaggcttatgttacyagcttatttactcaactttttattattttcgagtgtactcctacttgtttgtttgtttgtttgttttttgagatggagtcttactctgtcacccaggatggagtgcagtggcacgatcttggctcacagcaaactccgtctcctgrgttcaagcgattctcatgcctcatgcccggctaatttttgtatttttagtagagacgggatttcaccatattggccaggctggttttgaactcctgacttcaggggacacaccaccttgcctcatcagcctcccaaagtgctgggattacaggcgggagccaccgtgcctggcccagatggatttttaaatatcacctgttcatattgtttaaaatagatacaactaaaacagctttgaggcatacaggaactctacagataaggaggaccatttcataatgataaagggcttatctcaccaagaaggcagtcacacttaygtttttatgtatttgttgaagagtcccaatgtatttaaagcaaaaataagcaactacaaagagaaagatacaaatccatgatcaaagtgaggaattttcacacacatcgtagtaactgatggaatgagtcaatgaaaaattagtgaggaaatagaagatttggacagcacaacaaatggcctaggagaacatttagaatgttgccttcgatgcttaagaatacatattcttttcaaaagaaaacacagaacagcctggcaggagagataccatcatcatgaaggtgattttcccagagctgggcttatccattgcattctggatgtgctgacgcctgtggttttcccaaatgtgggaaactggactgcataatttgtggtagtgggggactatgttcgtgttctctcctggtgtttaaaattaaaaaaaaaaaaactttattaaaggcacagaacattaataaaaattgacaataaactgggctattaagtaaattgcaacaatttccagaggtttgaaatgatacagagtatgttttctgaccacagtacagttaaactaggaatataacaaaaagataactagggatatgtgtggatattgcatacctctaagtaacccttgggatgagaaagaaattacaatggaaattagaaaatatcttgaataatgaaaatacaatatatgtaagcttgtagaattcagcttattaaatgcatattttagaaagaaggaaaggctgaaaatcagtgagcaaagccttccatctcaagaaatagaaaaagaatatagaargaaggaattaatatttttaaagaagcactaatttacaagaataattaaatagaaaagaagttgtcattaggaaggatcaataaagctagaagcttgttatttgaaaagacttgtaaatgtggtaaatcacaagtaacgtacgtagatgaaaagggggacgagataataggtgccagaagcattaaaaaaaaaaaagtcatgtatgaagagctttatgccagtaaatttgacaacgtatgtgaaaaatgtaatttactaaaactgacacatgaagaaatagaacatcttaatagttctgtaactcttaagaatttgagcctgtagtttaaaatcttctcaaagagacaactcctgtttgggatgacttaattggcacatcctaccaaactcctaatgaaaaggaaaatccccaattttaaacatcctcttccagagaagtaaaggaagaaagatttcacaatttgtttttaaggccagcaaaagctgcatgacaaaaccaaggaagaacatttgagaatggaaaattataggccactctcagctgtaagactcagaagatgcataagatgattataagatgcaaaaatcctacacacagtatcaggaaactgaccagtcattagcaaaaaacccaagacgataagcccaggatgatacatcatgacagagttggttatatccaggaatgcaagatccgtttaatgttacagagtcaatcggtgtaattaatttaccatggttaacaacaggaaaaaaaggatcatcccagtgcataagatgggtttgatcaaattcaatgtttcttcatttaaaaaaaaaaaaaaaaactcatagaaaactaagaataagaggggcagttcttaatctggccaaaaggaaaaaattcctatrgaaaacattatacttactggaattgtaagccaccttctctttgagacagaacaaaacccaaatgactgtttctattcagtattaaacaggagatcatagctagtccaccctatgggtaaaatattcaaatcaatagtgacgttagccaaactacaggatccaaggcctgcaagtaaaaacctgttctatttcaggacaccaagtgcaacaaccagcaaaacggtaacatgtaaaatctacgtcatctttcggtatcttcaaaaatacaaaatacctagaataaattggattgaagatgtgtgatactcccatagagaaaatagtaattcatcgagagacaggaaagaagacctgaataaatggagaaatatacttcatttataggttggaatacagtattttatccttagctttttatattgaatgtgatctcaatttaaaaatcccaatagatagtgggtttgtttatgtgtaatttgacaagctgatttgaaatttctatgaaaacgcgcagtcaaaaagcagttcttgaagaaaaagaacaagatgggaagatttgctgtaccagataattggaacttttaaagctacagtaattaagactacatggcatcaagcgccagatcagataaatagaccagagaccagtggagcagaatggagcrctcagaaagaagtccgtgtatggggggacttctggtttatgacagagctagacttcagtggagaaagacggtttttcaataaatgatactgggagaattagctagtattttggggaaaaataaatcctgacctctaccgcataccatatgtaaaaatcagtttcagatagattgtagatctcagtttgaaaggcaaaagcaaaaagtctgtagaaaataatgtaggaaaatgtcttttatgactatgaaataggataatttttaaaacatcaacaaaaacaataaatcaccataaagaaaaatgccgatagagtgtattatagtaaaaataagaacttctggttaagaaacatcaaggtagtagaaaggcaatccatgttgtgtgtgaaagttctttaaaaattcctggcaaaggcttgtatctttaatatataaagaatttctacaaaacaataagaaaaagacattgaaaaacaaccaaaagatttgacaagcacttcacaaaagaggatgcacaagggccagttaaggtataagatgcttaatctcattcactggggaaatgcaggtgaaaaccacagtgaaatagaaccccataacaaaccaccctcttgggtgctaaaataagacacgatagcaaatgtgagtgcaaatgcgtggagggggactccagtgtactgttttgacatcagttactaaatggaaggtgcacagacgccatgacccagccatccactctggaatgtgcctgacgtggtacgttcacaggtatgttgtgatctgtgtgcagaagtgttgacaccattactccaaaccaggaaactagaaacagccggaatgttcaccaacagtagcgtttatgaatcataaaatatgtatataacaagaattctgtatggccaagaaaatgagcagctggagccatgcatacccacaggaacgaacctctcggacatcacaaaggcagaaacagccagacgtgaggtggtgcacgctgagttcctgattacatccagctagaggcacggtgaaggacggctccagtaggcggtggggcacagtgggcctggcccagaagtctgattgtccatgcctcaccggagggaagaggaggctgaaatggcaaagagccctcagctgccacccactcccttttttaagaaggtcacactctgttgtgccaactggggtacagtgcactgctgggacttcaggcacatgccaccacacctggctagtttttattttttgtggagactgggtctctctatgttgcccagactggtctcaaactcctggcctcaagcgatcctccctcctccacctctcaaagcactgggattacaggaatgagccaccrtacctggcccagccgccacccttgatgtggatggtgcttacgctcaccctcatctgcagtacagccatgcgtcactcagagacagggacacgttctgagaagtgcatcgttaggaaatttcactgtgcagatatcacagagtgcacttacacaaaccgagatgctacagcccactacacacctcgtctgtggtgcagcctgttgctcctaggccgtgaacctgttcagcaggtgactgtcctcagttctgtaggcagctgtaacacaatggtaagtctgtgtctaaacacatctgaaggtggaaatggtcatgcgttgtgctagacgttgcagtggctctgacgcctcgaggtggcaggaatctaggtgccattatgattttatgggaccactgtgacatacgccttctgctgttgaccgtgactgcgcgcaggactgagtcatacatttgtgcttttccgtgtatgtcttcgaggacttttctagctgctctaaagctttcttcaatgttctttccttacgtctactctacttgagtaagtgttgcttttattctgtgctttgctgtgcagtcgaaattacaaagatagactttgttttactgttgtcgatttctgccttagaggctgttgactgtttttaaaggttattgactttttgatggaaaaattcaattctaaaacaacatagagctgtgttttacaatacctggatattttaaatctaacttgctgtaatgaagagatccctaaataaggtagcttaagtttatatgagtttgtttttcgcttgtatgatgggacagaggtaacagtrgcccaggctggcagggcgactgccattctgcaagtcactgagaaatgcggtctttccatctttccattacctcgtctctgccatcttgtcacctcatgccctgtcaccgcagggcagggtcctctctccgtggtcaaagctaccaagttagaccacgcccttgttccacttctcaagaagagggcaaaagatgttggttttgggtttttcttttaataattttactgagatcgaattcacataccatattttctttcatttaaagcctacaactcagtggttttagtatattcccagagctgggcggctgccaccagtatctgtctcagarcgttttgaattccttttagcaagggagatgttgcccccccatcttctcttacatcatcacttagagccttaggccgcgcctgggaaaggaagttgggaaatacggtctccagctggagctgcgtgcctggtcacagttcctgcacagggcacaaggggagtcgactagggaggcgcatctgctgcaagacaaaccactctctgtcatcgcaggtgtgacagcatggagaagctaaaggctcttctgccaagactggagcaggagctgaaggacacagccaagtttaaagatttttatcagtttaccttcaccttcgctaagaacccagggcagaaaggtttaggtgagtatgaaatccaaatacgtaaaatgccagatcataatgaggttttcagtggacgtgagcaacatgatttttgtgcagccaactgtaatgtttttgggttttggtttggttttttggagatacggtcttgctctgtcacctaggctggagtgcagtggtgcaatcacagctcactgcagcctcaatctcctgggctcaagcagtcctcccacctcagcctcccaagcagctgggactacaggcgtccaccaccgcatctggctattttcatttttgttttaatttttagtaaagacaaggtcttgccttgttgcctatgctggtctcgaactcctgagctcaggcattcttcccacttcagagtgttgggatgacaggcctgagccactgcggccggcccagctgtaacgttaccaccctcttggtttcttttcttctccacactttgctctgtatgtaggtagatgagtttataataccgcgtacctgaaaatctcagttgatagcgtctctcaacttctgggtttacatatttaaattttaaaatgtaaactaatttgtaaatgtcctgtatcagttcgtaattgttctctctgtgccacatagacccagcccgcataccaacaattcagcccacttttgcgttttattttaaaatactgtactccatttgtatggaccattaatgtggcccatttgcatggacaataataaatattttttttacttggggagtctgcattcgctttaactgtcactcctaaccctgcagcagggattcagggactgcagtgaaggtggaggtgaagctgggttgggctctgggaggtgtgcagtgatcacctgagagggcagttgcacagaggaacaggcacagaggcagaggcacggggcagaaggacaaggaatgcaggcacagaagggcagagacacgggacagagggatagagagacgggggacagagggacagaggcacaggagacagagggatagagagacgggggacagagggacagaggcacaggagacagagggatagagagacgggggacagaggcccaggagacaggcacggggggacacgggcagagacacgggatagagagatgggggacagagggacagaggcacggggggacagaaggacagaggtacgggagcagaggcgcagggggacacgggagagagacggggctggtgagagagaacaggtgctgagacgcgtctcggccccacactggttactgaattacagtacctgctgtgcaaggccctggggcctgttgggccctcrctttgcctcttgggtgacagtagcggtgtctgctgcgtcttggctcaggagcctgccgcatgcggcacctagggacaccagcagtgtcgagacctccagccttgctcagggctgccaactgatgagagcctgtcctgccctttctgtttgtgagctgggatgatcccagaaggaagtctttctgtctcctggtgttgggtgccagaggtgcaggctgctcagaaaggccggatgacctcgggggcgagtgcgttccctgcttccttcgaccgagggtcagtttattgttcatgtccccgtgaactcatggagtgctgttggtgtactctggtgttggtgaccgctcccttcctgtctgcacggcaggctgccctgggctcgtccagtcaccttctaccccagacctgtaktygctttttctccaagaagccctgatttcttttagcggaaactggtttcaggccgtggtggggtcgcggctggtgctcattcagagtcgtcgtttccaggctttttatttttttattttttttatttttgttcatttggatgcttctaaaccacagtcaggactacagattatttttcctacttgagcttgtctgtattgcagctgtgtttcccttctcctgctctggttctcacgggcacaggtgaggatagcgttagaatatccatggtgatgtgttagcccaatcccacacggcacacaccacgggctcagagtgacgaaacgaatgctgtctccaccagtagaattactgtgagtagcggaaaagaaaagggcggggttgggggggtaatacactctcccccgacttaaaacaatagttgggccttacctttgttttccaggcacacagccaggcctcccctgtcgttgtgggtggtctttgctctgtgttccccagcagcccctgctcatcaccagggcttctgttgacgtctctctgctcacaggttttgaaattcattctccagtggatccccaggaagtgcttttggggacagtattccctgagtccttgcgtgctgggtatgaaaaatccttttcgatcctttgaatgtcttaagtgtgtcgctccactttcttctggcgtagatcgttattgtcaaacagaatgatgataagccaatcttcttggtcttataagttgcttactgttttgcctaaatacccaaacaaaggccattttttcttttgctttgaagcccagtaattttactaaaatgtgtctgggtgttgtgggtcgtccatggtcagtgttctcatatatgctgctgagtgttttcagtaagtactttctaatctttttttaatttcagggagaatgttcttgaattataggtttaagcatttgttctgttccttgtatttggttttggtctctatggaaactcctattacccatataattggagttaggtcctctgtggagttgggtcccctgtggagttgggtcccctgtggagttgggtcttctatggagttgggtcccctgtggagttgggtcttctgtggagttgtgtcttctgtggagttgggtcccctgtggagttgggtcccttgtgaagttgggtcttctgtggagttgggtcccctgtggagttgggtcttctgtggagttgggtcccctgtggagttgtgtcttctgtggagttgggtcccctgtggagttgggtcttctgtggagttgggtcccctgtggagttgcgtcccctgtggagttgggtcttgcgtggagctgggtcccctgtggagttgggtcctctgtggagttgggtcccctgtggagttgggtcctctgtggagttgggtcccctgtggagttgggtcctctgtagagttgggtcccctgtggagttgggtcccctgtggagttgtgtcttctgtggagctgggtcccctgtggagttgggtcccctgtggagttgggtcttctttggagctgggttccctgtggatttgggtcccctgtggagttgggtcttctgtggagttgggtcccctgtggagttgtgtcttctgtggagttgggtcccttgtggagttgtgtcttctgtggagttgggtcccctgtggagttgggtcccttgtggagttgggtattctgtggagttgggtcccctgtggagttgcgtcccctgtggagttgggtcttgcgtggagctgggtcccctgtggagttgggtcccttgtggagttgggtcccttgtggagttgggtcttctggagttgggttccctgtggagttgagtcccctgtggagttgggtcttctgtggagttgggtcctctgtagagtcttctgtggagttaagtcttcggcagtgtgcgttgctttctctcagtcctttttatctgtacttcatttcttttttattttaaaaatgatcttcctttttcaccatttcctcttctgaagttgttacccatcatgtgtcacataatggcagcgataggttctgagaaatgcattgttaggcagtctcatccttgtgcgacatcacagggcgcatgtttgcaaacctgggtggcatagcctattgcacgcctagcagtatggcacagcccatggctccggggatacaaacctrgacagcgtgtgactgtactgaagacagtaggcaaccgtaacacggtggtgaggatttgtgtatccaaacacactgaagcatagaaaaggggcagtgaaaatgcacttttgcaatcctgtgggactgctgtcacttacgcggactatcattggctgagatgttatgccatgtgtggctgcctttgagtttatctccctcgtgtgccttctagtaaagtcatttccagaatgattttcctttgtttctaattcttgagtgtgatttcctcattactaagttttcctaattctcatttgtggtgtttcatgttttgtttcatttcttaatgtcctttagcctattttgaagtcaatgatcacacttaaaaaaaaaaagtttttgatttatttcgagacagggtcttgctctcttgcccaggmwggagtggagtggcgcgatcatagctcactgcagcctcgaattcttgggcttaagtgatcctcccacctcggcttcccaaagtgctgggattacagacatgagccaccacacctggcttaacattttgttttagagttgaggtctccctccgttgcccaggtttaagtgcagaggtgtggccatgaccgcaccctcaggctcctgggtttcagtgatcctcccacctcagcctcccagctaactgggactgtaggcacgcagactgtgcctggctaatttttaaactttttttggagggacggagttttactgtgttgcccgggctggtctcaaactgctggtctcacacagtcctctcacttcaggctcccaaagtgctgggattacaggcgtgagccayggtttcagctgaaggttgcacttttgatctgttctgttggtgtgtttcccagcatgcattcattttctaggggtgactactgtttgtagtatcttttttctcaggatagcattgtatgggatttgatctcagggctgttctgttgctcatttttatgtgaaattagttttcctagtctttcagaaggaggatggttcggggcagcttttcgacttcatggtgctccctcttggctgtgtgtgtgtgtgtgtgtgtgtgtgtgtgcaggcgtgtagtagacagaaatgtcggctttgctgtctgagattgtctggcactgctcctcccccctcctcagcttttctctcttttccatctccattgtccctttcccgcccagcctgttctgctcccaggcacttccctgttggtggcctctgccctcagccacagcctacttcaggctcgtccttacctggtcccggcgtgtaggcacctctgaggccctcctgttctcacatctgtcagaggccctgtgccccccacgtccccggcatgacggcaacacacgggtcctgttgctggcagtggctcatcccctagcttacaacttgggtttgtggtgatactttctcacctaaatttatggtaaatgttgcctctgggtgtttggctttgctttctaattgctgcatctgcttttatgcgcagattcagggaaggttacacactgtgctgcctccgccccgcctgtccagggccctcccccgccccctttagtgctgcgtcctcataggccgcttgtctgaaggaggggttgatggagcgtggcacgtctcgcgtttaaaccagtcaggagtccttgggggtttatttccccaggactgttcttttgtcttttaaccattttaactgtttttaagtgtacggttcaatagcactaagtagattcacagtgttgtgtaaacatcaccagtattcattcccagaactttctcatcttcccaaactgaaacgctgtccccatcaaacactggctccccactcccctctcccccagccactggcagcccccattctacttctggtctctggagttgactcctcttgggacctcacgtaagtggaatcacacagtatgtatctttttgtgaccagctcattccgcttggtataatgttttgttgtagtatatgtcagaatttccttcctttttcaaggttgaataatattccctgtgtgcatagaccacgttttgtttatcccagtggacacttcggttgcttttaccatttggctattgtgaataacactgctatgaacatgggtgtacacgtatctgttttagaccctgcttttaattcytttttttttttttttttttttaagatggatcctcgctctgtcgcccaggctggagtgcagtggtgtgatcttggctcactgcaacctctgcctcccaggttcaagcaattctcctgcctcagcctcccaagtagctgggattacaggcatacaccaccacgcccggctaatttttgtattattagtagagatggggtttctccatgttggtcaggctggtctcgaactcctgacctcaggtgatccacccacctcggcctcccaaagtgctgggattacaggcatgagccaccgcgcccggcccgcttttaattcttttgggtatatatccagaaatggaattactggaatgtatggtaattctgtttaatttcttgaggaacgaggaaccaccatatttttttttacattcctgtcagcaacgaagctgagcatccaacctctgcacatcctgacaacaattgctgttttctgaatagtggccatcctgatggatgtacccaagactgctctttataagctgacattttactttggggactaaaaatctcctttttttttttttgcagtggtgtcacaaattttaattcaaaataggcactctgaaaacaataggtaaaaaaataaaaataaagttcatcaagctgtctttgaatttacaacagactacaccggtgatcacagaccagtttcaaaattgcctccaatatgcacattatagcaattacatgcaagtattatattttttaaaatgcacatagtaacatcatgtttctcagaggctgtcacgtcctctagatatttctacctagagatacagtaaacgggctcctctgctgtgtaccaccagcaatattacttgtggtctaaactggctggtcttcatcactggttctggtgctttaagtttttttatattgtgtgggggaaaaaacgaggtttaacatccaaaggacaggccaggcgtggtggctcacgcctgtaatcccagcactttgggaggccgaggcgggcggatcacgaggtcaggagatcgagaccaccctggccaacatggtgaaaccccatctctactaaaaaaatataaaaaattagccgggcgtggtggcgggcgcctgtagtcccagctactcaggaggctgaggcaggagaatggcgtgaacccaggaggtggagcttgcagtgagccgagatcgtgccactgcactccagcctgggcgacagagcaggactctctcaaaaaaaaaaaaaaaaaaaaaaaaatccaaaggacagtgacagcaatggggattctttaacaatatgccatcccgtccacctggattcagcttccagccttaaccagctagagaaaagcctgtttcaccactaaacatggcctccaggaaatgtggccagagatttactgtaccagccatggagactgagctcttggtctgcagacttcaccctgccccctgaaaacctacgctgaaatttaagttagtttccacactcggggcagtaaatgtttattctaaaggcactgaagatttattattttgcctctgagtggagaaatgacttagcatatcaaaagaaggggaaagtctacactgaaaagtatttttgcatctacagaatgactctgtttgtaaaataactcttgatttatgagctacataccagatgccagattctgtctacttttaacaaatgaaaacatttggttttctacaataaaactctttattttttatctttgctattccactctatttctttctaagaggctaaggcaaaatagtcattaaagttaaagctcattttagtttagaccctgattactcagtaactatcatcagtattctcaagaaaccattaccactcttttctagaaactaacaagcaggccgagtgtggtggctcacaccggtaatcccagcacttctgggtggatcacttgaggtcaggagttcgaaaacagcttgggcaacatggcaaatccccatctctactaaaaatacaaaaaattagctgagtctggtggcacacacctgtagtcccagctactcaggaggctgaggcacaagaatcgcttgaacccaggaggcggaggttgcagtcagctgatatcacatcactgccctccaacctgggtgacagagcaagactccatctcaaaaattatctatctatctatctatatatatctgtctatatatatacacacacatacatacatacaagaattatctgggtgtggtggtgtgcacctgtagtccctgctactcaggaggctgaggcaagaggattacttgagcctgggaggtggaggctgcagtgagctgagattgcaccactgcactccagcctgggcgacagagccagaccgtattaaaaaaaaaaaaaaaaagcaaatagacaagagaataatgatgtggaggaagacttgagatgagctccttcggtgttcttgggctctgtcacttggtaaggacagggccacctgtgctcctgacaggtgctggtttctgctgtggctgttcttcatctcatgcagggtttgtttgtttttttttttttacttctctctgtttcctcaccccagttttctctggcagtagtcacccaaacaggaaatgctgcttctcacacttttctaaaattcggccatttcaggtctgagtgtaacgatcatgatttttcaaggaaagtctgggtcatgctttacttttgagcagtttaattctcagaggtctatccagcttcctttccaaagtgaggattagtctgatccaaattttaaaataatggcatttactttttattgttaaatgtttatcaggaaggacactgaaatttcagtgaatgataaaactttttttctgactattttgaactgttactttaatatcttcagcataatcttaggataactcagcttctattaaagataatcatttatatttattgatactctgcaatgcaggggatacttcctttaaatgttgacatggaaaaatgtttaaaagattagcattttatctgactgtcatatgtaggtattatctttaagaatttttatcttataatgccttgttaacttgacacatacagaaaagtattatggagcttttctaggcccttggcaaagccagcaagatcagcatcactgcagaacttgctggaaacacaggccctggggcttcagccaggccggctgcctgggttagtaatgactgcgcagcaaacacctcaaaacgcagtggcttcaaatgacagtcattttggtagctcatgatccattgggtcaggaacttgggcagattctgctgagtggcctttctcttccatccgtgctgctctccgccatggcctcccacctgcctccagctgccccacgtgggcctccttgcagcgtggtggcttgggcagaagcactgggcctgcagaggctgccgtgtcccccgcagcaacgtccaactgccccgtcctggaaacgcgcagcgtcccttccactcggtgccaccacttcattccatggtaatttccgggaggttataaattagagtctaaattaattgcccagttcagagttgcaaaatttattttctttgtgcatgaatgtttcaaggaaggtcagtatatgggtagagagtgtttggaaacatttttaagattcaggacctaccatgttcagcctgcgttttataaatttccttaagcatcaaagctttcagtggcagaacaggccattgaaagctgcaacagatttatagtttatccttgaattcctcactgacaacaaggacttgtttactcctgtagatacttaaatgaaatgtttgtcagaatcattcactataggatgggaagcattactggttttgtttctttgcttcatgacaatagctgagagaatatgaaattttattaaagaaaacaatagcctcctcgggaaaagattagattttgtaaacacttcaaatagattatacactatttttagaaaagttttttgagggctttttaaaaacagaaataaagcaagaagagtaattttatgactatagcccagaagtagagccgtcagtttaccatttccaaagatgatgtggtcggtcttgtgaggaattaagtataaattgaacaggtcaagacaagtgtccaactgttccagaaaaagcatggactgccgtgggaacatggagccaaaagacacagattaccctttatttcctttgtgtctgtgtctgtgtgtgtgtttgtgtctgtttatatatgtctgtgtgtctctgtgtgtgtctgtgtgtgtctgtgtctctttgtgggtatctgtgtgtgtctatgtgtatctgtgtgtgtgaagattgtactgtattgtttttatgtaagatgatgctttactcttaactaacggttaacctaatagagaggataaagttacttggctctgttttaatgtaagaaacaacatagtttcatactggctagagtcttgaatcagttggctttgggaatcttttgtgtttttgtttttgttttttttttttaaagaggtgagggtcttgctctgttgcccaggctggtctcaaactcttgacttcaagtgatcctcctgccgcggcctcctaaagtgctatgattacaggtgtgagccactgtgcccggccagctttgagaatcttgatgtttgaggaagtgaagtttcatgagagctaatttttatgtctgccctaaggtacttttttgatagaggacacatcttcattgtctaatcctaagtggagcatcacaagcatgaattttaagtagtaatgccttcttctaacatgttttcacttaggagatgggactttttagaggttctgggaaagaaaatagctgctataaagatgtagccaccagagtagctgttggtcttgtttccactctcgagtcctgccattctgagttgttgtttttgttgttgttgttactgttttgcaaatggctaagtccattaggacaatattaaacatttttatgtaaataataataaatattgaaaaagcatatatttacttttgataatgtgattgacaaacatacaaatcaggtcctttgtaagaaaagtttttagcaccaaaactaacccaaagtaactagattaaatgtgtgccataaaactttatttttttttcctccccaggttcwcctccatttctcaatgtgaaagctttacatcattaagatgagttgaatatagatttcaattaatgttcttcctaagtgataaggatgtagacttataagcaggacaagactaatcatcttcttagcattttactgcgggtcccatcggtaaggtctagagagctgttccatatctcagttacttggcactttctgactctctctttctttctgattcagactccagggtattcaaaactgataaagttggtcatgaagcctttgcacacggggaatttagaggcgttttatttaaagtgggatttgctactcatatgcctctttcttatcccattttaataatgatcgaccctggaaatcttgctacagctccaactttaataacttctgtttaagtgggattaaaccagatttagaaaaaaaccttttgagaagtgtttagttatgtactttgcatttaaactaacatattacctaacktttattaatctgcttttcacattaatcttacataaatataactcttcttttattgcctaaaagtggtgaacactattcaacatgattaaaggaggtcactttatgtatttattttttattttatttatttatttatttaattttttttttttttgagacggagtttcgctcttgttgcccaggctggagtgcagtggcgcaatctcggctcaccacaacctccgcctcccaggttcaagtgattctcctgcctcagcctccccagtagctgggactacaggcatgagccaccacgcccagctaattttgtatttttagtagagacggggtttctccatgttggtcaggctggtctcaaactcctgacctcaggtgatccacccgcctcagcctcccaaagtgctgagattacaggcgtgagccaccacgcccggccggtcactttaaaaaaatagaattctgaacccctttatatacttgctgtgtcaagcatataaaaagaaatcgttatcaagcttctggtgagcagagaataaatcagtgtttcacaaactatggaytggagacagccctgaaactcggcattcatattctattagacatcttcagtagcagagatttatatagaagtcgtgaaataatcaccaccttcccgtgtgggaaaagagggcgttggctttgattgatacgcagtgtcctgtgtagatgcatcagtgagaacgctttccctgctagctgccgatttgacttgacactttagggacaaattggagccctcataaggccgctgtaattacttgtgaaacagattctgtcttagttcatatagcaacaaggcaggtctatttggagaacagtgtgtcccttccttcctaaactggtcctttgatttgcagttcgacactcaggccagtggcctatttttaaaaacaaatgatacgcattaatagtatccagatcaggtcaggtttaaagaacacccaatatgtgtgaaaaggcaagtctccaaaactgattaattaggggggaattgtgtgcatatccaaataacttaatatacaaatccttttaaaaagagtttccccagatttataaaattagactaygtacagttctcaggagcacttccgtagagattaagcctcatgactcttgggtgagattgccacattttattaagtaaatattgacatgctaagaagtggtckttttttgtgcagtagaaaaagagagtgagatttactaactgctctttctttctttttaccagacttagaaatggctgttgcgtattggaaattagtgttatctggaaggtttaaatttttagatctctggaacacattcttaatggtaagtgtcctcctgcatctcgctgtgtgcccactgtggagggaagtcggtaggtatgaggctgcatgtaatcatccacctcaggtctcacacgtggaggttttcagcagatgaacatcccacacaaagatccgcaggtccagacaggttgccacttggctctgtcaccttgccggagactgcagggctgagctggggccactccsgggcctcctcagaacgtggcttcttggcagtcacgggaagctcctctcaggctggggttcctggagactctgcaaccccagcagcccccgtgttgtctcctctgaggacctagacggtaattctgtctttccactgagaactccgaatcctcgacatggtgccagcgccacacttctgtggactggtttgggctccggaactgcggattgtatgtggcggtgcccagcctctgtgtgtgtctgtggtctgaagccatttctaagtgtgtctcaccatgctcaggaggaaaagaggcctttgtggrccctctggagagacactttgctggtgcrgggcaaggctgcgtcatgccagcccgtcttgctggcagcaggtgcagctgtgggttkttggaagtgagtggccacaagcccggtaatggcagagatgcccagacctcttgctgttctgtccatgaaagtgaaagaagtggtcttccaccgcccaacccacggccgggccaggacccgcactgcctcccttcacctgacaccaggtgacacagactttgccacttagagtcctgtggccttgggcacgtcacttccgcttccttgcctgggaatggtacccagagagtgtggcaggtggagggcggagctgtctgtggaaggtgacgtcactcagtcctgtgggtttgccatggagagacgtctttgcagctatgtgtttcattacatcatgtgctgtattacttctctcgaaatatccagaggtcagtaatgctgtgcccacagcccccttacgccttacctggggtcaaacctaagtcacagatgtttcccagagaacctcacgctcttgtgcgtggagaaggggatgaaggcgctcacagtgtcattgtaacggcagaatactggaaaagccagtgaccatccacaggagaacggactaaaaaatcagaatattggtgcgatggagcacggctttggagccacgcaaaggaacgcacattcacacacgtcagcccgcatacgtttcagacattatgctgagtgggaaaaaaacaagttgcagaaaactatgtgtaatttgatagcagttaatgttttaaaatgtaagacaagcttatgagctgttcgtgaatatatatatacatgcagctaatgggcaggtaacgagattaaaatgctgcccttctatgtgacaaaacaggagtttataattgtaatatttaaaatgttttgttcttaaataaatctgctttctatatttggacattagcgttgttgtagcacttaacatttatacagaacgctattacttttaacaattttattgtacttgttcctaatcaaattaatgaacattaattgaagatcgctaggccactagaatatatgagagttaagctctgtattttaaacctggtgggttttttttttctctcatatattaggaacatcacaaaagatcaattccaagggacacctggaacctcctgctggactttggaaacatgattgcggatgatatgtctaactacgatgaagaaggtaccggaagttgtgcttcagatgattgaccgaaatgcttacacctgagaacgttaacttctcctgcctctagagtggtgaccccgtcactgagatgggcgtggtcataatactacccccttccttattattttctgtaaatcatacaaaagaaaaatagggttttatatttagtgtaaatcaagaagacagtcctctaagccaaagcatttcagaattggatgtgaagagttagagacccccatggtggagccatggagttaggtattgggaaaccaccactcccagattctcagtcccgcatgatgccttaggtcagttccacactgcactcttcaggctgactcggagattccagctcctgtcttcttgcataaatatatctccacatacttgtctccccccgtgtttaggactctgcgttggagggcctttggagcctgctgtgtgctgggcacgctgccaccttagagagggatggtctctgggtggaaggcctcccctctaggctcccacccactttgcttcctccctgccccctcggcgggcagtgatctgttctgggccctggcgccgtgcctttaacgggtggtttacgtgtctgtctgcctgttttagcttctgcttctctttgtgtcctccacactttgcaccgtccctagatcaggggcacccagtaaatgcttgtcaaatgaaagaagggatcactgaatctcattgacagaagcgcggcttccaggattgaggcagcagtgcaggagctcagagggcactcagggctgccggggtggggaagggagcaatggggtggtcccacttgggaagagccgcaggagggagcaccccctgctggcaagaataccaatgacctgaggaacatgcctyctgctccgcgggggtccatttagctcccttcctgagcagctggtgtgactgcctggggcactcaccgagcatccggggccactgtgagcccacagccccctagacatgccagcacacacacaccagggctcccgacctggccgtgctagggcgaaagaactgrgtarcttgggctggttcattctgtgaaacacaaatggtgtggacctcaagtmatttgggttcttgaagtgtaaatgttggattgatgtgtgactcagtgctttggagataaaaacggtgctctaacrggttttctgtttgcttgctttcctttaggagcttggcccgttcttatagatgattttgtagaatatgcacggccagtagtcacaggtggaaaacgcagccttttctaggcagcaagttaagcaggagtaagattatgaaatgatttgtatcctgcaaggagattkcagtcagttcctgggtgcattgtcgctgattccagaagtyattcttgaccagccatgaaaccagaggcgccatcccattctgccggaggacagccagcggctgctttgtggacaccgcaggaagttcctcgggacacggctgctttgggatgtttggagatttgtcatcatagcttttgcgttaggaaatttctgcatgattttttaatatttacaaaatactaaggtagagccatagcgccgcctgtgggaccgcagagcatgctgcgtagctcgcgygtcaggcgaaccagcgtccggcagcgtcccgccgaatgacgttgcggtggcactggcaacacggcatgtgtcctctgcagggcgctgcgtttttatacacgtcaaagctgttaagaatgtgccctaagggagaggatcttgtcgtagagtctaatgttttttaaaattggtgccagcaattcacgatttatattttttgaattaccaaatatctagatttaccagctctatttttgttttcattttctctagacattcatctgaaaatcattttatggttctcaatccccatgtagctttgcatagcaacggcacacgtggcacgattccagcagagtttatctcacaccgtttatatatcactgggcctctcttacttaaatattatttgacctgcctgagaagcttcataaagtatgtttttttaaaatatattttaattacatttaaaaagacatttttccatgaaaaacatttattttatgagtgatgaattatagattttaaaatcaaggccgggcgtggtggctcacacctgtaatcccagcattttgggaggccgaggcaggtggatcacctgaggtcaggagtttgagaccagcctggccaacatggtgaaaccctgtctctactaaaaatacaaaaattagccgggcatggtggcacatgcctgtaatcccagctactcaggaggctgaggcaggagattcgcttgaactcaggagacggaggttacagtgagtcgagatcgcgccactgcactccagcctggacgacagagtgagattctgtctcaaaataaatacatacatacatacaataaaaccgaatgagctggttctttccatcctcttgtggtacccgtagtgcccagcatccagacctttgtgcccctgtgcacatttggaagctaaaatgtacatcgttgtctgaaaaaacccaaccccaaaaccttcatctgattggtgagctgaagtctgtccttgcaccatgttatcatctgtttctcgtgtccgcctggttgaggaggacccacgagtgctgccgaggtgtggagggctggtattgagttgtggacatcactgttgaccctacctcacgtgccgagactctcatgtcacaggcgtgccttgctgcccccctgcagcactgtgcaggacgtggaccagctggagctgctgcccagcacagaggagagtcgccgcagatgacctagctgcggtgtgagagagcatggcccagacaagcagctgggttggcttctgagaacaggacttaccctgggcttcaggaacatctgatggctgaggttagtgtgcttggaggctgcaggacgaactgtcgatgyttcttagcagagatggtcacagagggcagcagggacaggactggaagggacctgcagcctgcagaccccgcctggcccccgctggcttctggctggtccagtgatgggcaagtgacagaccttccccaggctctgcttccagaactctaatgggaaactgggcctgtctacctttagaagtcttcgattctcagagagcatttgtctaatacaataaaaactggcattaatacaaacctcaaaaacgtgagcrtatcttccaggcttcatggattcttgacatgtaattgttttgttcagaaaagtttatagaattcacataattctgtataaactatggagatccacagtacttttttgtttttgagatttaaagttctaagggattgtcaatagatatcaaaatattaatcattggacaaagkcttttccaaaaattgtgggtttttttcttctgttgtatccatttgagtcctgcatgctgtgaaatgctgagaacagaagcattaaattgktttttctcgggcgtggtttcctttcgattctcctcagctgcagggatgtctgcctataggtgtcagcatccacgtcattgtcccaggatgagagaacagcccccagctagcaaccagcgggcaagcccctgcccccgtgtgtggcccgccagccctggccaggtaaccaggtcctcaggtaccttctgtcattgcgttgcctctcagcggtgcaccgtgcacctgatggggtggctcatgtgaggaatgagagatctcacaataggcaggatttacgggagtgtgtcggggcaggaggtcatgtgtgccagcacaaactgctggaaaccgtcccttatcggaggcaaacggccaagcacgggggtctgaggatcatgtgctacctgccgattcacggtgcacctgccagcgttccggaatcaacaacgccagctcctctcagtgacattgtacatgtcattgtgttattttcgcttgaagtttatatccattttagacctcaggcttcttggggccaagaataaactttcttctgatccttgttgctgtgtccacagtttcaggtacaaagtaggggctctgcaaatatttgttggataaacgagctaaccttatcccgtcctgtttgctgagggagccagctagtgctcttggcaaaggtttccgccgcctgcgaactgaagcgctcagcgagcgggctgtgttaatcccctcagcagcacacgcttcggccccacagtgcagttgtgcctaaaacaggtgagagtttgaacgaagggccgcccctcctgtctgtcttgtttggatagggaccctgcgtgcatgctgttttttgttttggagttttgtttgtttgtttgtttgtttctgagacagagttttgctcttgttgcccaggctggagtgcaatggcgtgatctcggctcactgcaacctctgcctcctaggttcaagtgatcctcctatctcagcctcccaagtagctgggattacaggtgcccaccaccatgcccggctaatttttgtatttttagtagagacggggtttcatcatattggtcaggctggcctcaaaatcctgagctcaggggatccgcccgcctcggcctcccaaagtgctgggattacagccatgagccaccgcgcccggcctgcatgctggttttgaagtttgtttctgaatctcaggatcatgctagctggcatgactgtgctgatggctgcctccaccagcagacagtggagggtgaggtgaactcactgcttgagatcctccgttttaacaagtgctgatataacgccaggcggttaaatgcttcctactgtctcgctgtacactacgagagtttttatcagacgcatttcttcagtccaggtgtaactctttgcttcccctgggtctgatggaaaccaggccccgaggaaggagacgggagagacacagccctgctgggctcccggcctctgcggagaactgtcctggggtggggtcgggagatggactgttttcctaatttatttcaaaccaggaaccctggctgtgtgcattctgcctcaccccccgtctccatattttttaatattcttttcatgagctagcagggatgatgtaaatacactgagctgaccgagggccggatgggaggttctagtgaagcctgcggtttgctgacgactttccccctcagtgcagtccaattatttgggagccgttaaacaccgcatgctgagaagacaccgtcattgttcacacaggagctagatagactttgttccctctacactgcattttttaaaagttttctatcaaaaacacatttcataatcgaaaagttttctaaatgataaaaccgcatgtcacagattaatctcaacattatgttgagtgaaggaagccagacaccgaaggccacacattgtatttgaaatgtccaggaaaggcagaactgtagagacagcagatgggttgttgcccgaggggtgagggcacgccccgcagcgggcggcagtgacaggcacgcctgcacacatctgctcccgcatcaccccacgccacacacggggaagtgtgcgcactccttccagggacagcgagaggagcccctgctctgtcaacgctctgaatgtgctgcggctgccggcagaagctagcaggctcctctgctgaggagctggtgcctgtccagacgcagaagaaaactgacacctcccacgtgggggacagaaaggtcctctcattggtgccacctgcagagatagacaaggagcgcctggccatcagaggacgctcctgacagtgacacagtgaccactataaaagtcaggcgggctgaggaggagacaaaggccaggacgctccgcagctgttggggaagaggagctgcctcctgggatggagaaatttaaggctgcgatgttgctggggagcgtcggcgatgctcttggctacagaaatgtctgcaaggagaacagcactgtaggcatgaagatccaggaggagctgcaacgttccgggggcctggaccacctcgtactctcgccaggagaatggcccgtgagtgacaacaccatcatgcacatcgcaaccgccgaggccctcaccacaggtaggctgggcccaccgcgctccggtgtgcgggctggagggaacactggctgctcgagttctcccagtaagcctccgagagctttgaaggcagtgcggtccttcagcggatggtgttacctgataccgctgctaaaagtggcaatttaatctgagtgtccctcaaatttgatatgcggcagatcacgtttctcctgtggtttctctgagggtgacagtattactttactttgcagttattaagattcagtttttaaacgtgacttttcacttgtatttgtaaagcgttaactaggcctagcaccttctgtttctaatagagttaaagccagtgaagcctctctcggccgtgctggtgggagtagggtgagggctcacttctcgctgcagagattaagccttcttgttctgaattcattacaaagggatgtaaaataagccagtttgaaatgtgaacccattaatactgtttggggattagttctaaattccaatgaattaaagttagaatatcatctcccaaaatggttcagcttggagagttgcccatacacaaatgtgttctaagaaaatgacataaacttgattggacgagattggagacaaagcttcttaaaatacctttaagtagcaaattgattttaggatcaagcttttgcatgaatttcagggaaatggcaggtgcacagacatgcagtccagctttcctacgaggcatttgctcttcaaaaccccgtgggtgctgtttatcatggcagaattaaaatctgagggctgcagctaagtcaatgaaatctcacttatgcgttcactccaccattctgttcatctgccatggacgtgcccagtttagttctgtgctcacagcagaggaatgccatcgagcctgtggccggtccctaaataacgggagagctgaagcgccggcgataagataaggctcccggcttgctggagacggggaggcgtccgactgttcacagccttggcgtccaggagctcctgcttctggttttccaggcggccactcgtgtgcccttaggaccagcaaccccatgcttgtgccccgcagcccagaacaggtgcaccccacacacagacacctgtgggacacagctccggcttgttttcaccgtagacggctggagctcactcttgagtttggcttcctctgggcgtctgatgccgtgtgtgcgctcataccagctctgcatgtcccatttctggtagcacttggtgggcgttttgtaaatggcagcgtccatggctgtgggtctggtcctgccaggcccgcagggagggcagcggcacaggacactccaaaagtgcaccgacggagatcggcccaacaggacacgaaattcacacagttaaaagggttacggacgtttagggcactgttttttgtttgttttttgagacggagtctttctccatcgcccaggctggagtgcagtggcgtgatctcagctcactgcaacctccacctcccaggttcaagtgattctcctgcctcagcctcctgagtagctggggctacaggtgcccaccaccacgcccggctgatttttgtatttttagtagagacggggtttcaccacgttgtccaggctggtctcgaactcctgacctcaagtgatccacccacctcagcttcccaaagtgctgggatgacaggcgtgagccaccatggggcgctattcttaaggaggaagtaagtttgctctaagctctcagggtcctcagctgtggactggaagggagggttcactgtgctgctgcagcgtctagtttgtgggtcatgagaaaatacgcatccaagatcacccctggaattgcttactgtgggcggcaagccacccaggcactgaggcaagagacagaggacacgagctgttccagtataataaaacaagaatagttataccagatatagatcttagatatgattatatatgaatatcattaatcattagtttgtagcaattactttttattccaatattatgataatcctcgctctataatcatagcctaggaaaaaccaggccatacagagataggagctgaggggacatagtgaggtgtgaccagaagacaagagtgcgagccttctgttatgcccggacagggccaccagatggctccttggtctagctgtgacgccagcgtctgggaagacgcccgttaccaggcggatcgtggtccagcagtagcaaaaggtggcaaggaacaacacctgctacttagcagaccaggaagggggggggggtctccctttccccaggggagtttagagaagactgctcttccacctcttgtggagggcctgacatgagtcaggctcgcccgcagttatccggaggcctaaccgtctccctgtgatgctgtgcttcagtggtcacactcctagtctgccttcatgttccatcctgtacacctggctctgccttctagatagcagtagtaaattagtgaaaaattagtactatcagtactaatagtccctgatatgcagaaataatggcataagctgtctttctctctgtctcctctccctctctgcctcggctgccaggcagggaagggccccctgtccagtggacacgtgacccacatgaccttacctaccattggaggtgactcgcattctttaccctgccccttctgccttgtatccaataaataacagtgcagccagacattcggggccactaccggtctccgtgcattggtagtagtggtcccccgggcccagctgccttttctcttatctcttgtcttgtgtctttatttctacactctctcgtcactgcacacagggagagacccaccgaccctgtggggctggtccctacagcttacccctctagaaaccaaagcaagcagatttttttcaactcactaaaaatcaaagtcgaaatttcacttaagtttatctttgttctttaaataacaaattgtagcctatggaagggggtctttaagctgtgttaacaatggtgagggctgggcacagtggctcacgtctgcaatcccagcattgtgggaggccacggtgggcagattgcctgagcccaggagttctagatcagcctaggaaacatagcaagactccatctctacaaaacgacaatggtgagtgctgactccacagcacttctgtaccaggcattgttccagctgcttcacgcatgttatcctccacacatgctcctcacatcaccgtggaggctgattttatcacaatcttacaggagaaaaaattgacatacagagaggttcaggcgcttgcccagtgccacacagcccagcgagtggcagagcttggacgggaaccagagaatctggcccctgtgctcgtaagcatcctccctgactgctgagatcacggtggcctgcaggt

SEQ ID NO: 97863 - DNA, 36106 bp, Homo sapiens
agcaagaaagatctacaactccagggcggaaactctgtaaaggcagggacattctgtatagtttatgcactgcataattccggcacccggcccagaaggtattcagtcaatatttgctggatgagtgcatgtaacatgaacatcaacagcccagcctgctctgcctcgccctgccagcttcatctcatcattcccctcaacttagatgacttttctaagttctttcttagaagacattcacttgtaattctcacttgtaaaattgtacttgttgaaatgctgttttacgtaacaatcgcatgtgtcctgtcttctgaactaaactatacacactatgagagaaggaaccacatcctctgaggtgtggttttgtggcctgggagacaacagcagttgtcagtgctcacgagtgggctatggatgagcagaggccgcttgggtggatggacggatgaacgatgggcatgggagggaaggatggagggatggatgctccctggacccagtcctgctgtgtatccctacaaagctcacctaactccacaggcccccaccgatcacagcagggcggggcccctcctcaccatttgcccacaacacaatcctgcagcatccttgtagtttcttcgcatcgtcccctagccatctggaaactcacggaggcactgctcctaaagggttaaaatggaagcttaacattgcctattgttcctgggaatctagaaacacaggacaggaggtacctgtttagacaagatagggaaagtcagcatctccctttaggcaagaaacacagcaggagagcaggtttttattcattgggccttgaggaacagggcaggtggaacaacttcaacaactatctgaagaaagcgtgactcgatcggggcaaaatccactggtcccacacacagcccttcccaatattgccaatgagatcccacgacccacaactgtgtcacacagtttaatgtgacgtgcattcactcctaaatgtaatgtgatttaaataattttgttctgagatttggagttggttggttggtttgagacagggtcttactctgttgcccaggctgaagtgcagtggtgtgacagcaccaccacacccagctaattttttaaaaatatatattttttaggccggagcagtggctcatgcctataatcccagcactgtgggaggctgaggtgggtggatcacctgaggccaggagttcgagaccagcctggccaacatggtaaaaccctgtctctactaaaagtacaaaaattagccaggcatggtggcacacacctgtagtcccagctacttgggaggctgaggcaggagaattgcttgaacccgggaggcagaggttgcagtgagccaagatcgcgccactgcactccagcctgggcaacagaggaagactccatctcaaaaaaaaaaaaaaaaaaaaaaaaaatttgtcttagatgtggtgtcttgccgtgttgcccaggctggtctcaaacgtttggtcttcaagcaatcctcctgccttcatgccaaaagcactaggattatcacactcagcctgggtttgttttctaggacttttgcaacaggcttgagataatttatagaagcctcccggaggctatgttctctatttttttttttaatttttaagcagtaataaatggcaaaactacaggagcagtcaactatgaagactgagaagcctaggaatgaaattcagtactgatcaagtaaaagttacttcagagttaatgacagacaccaacgatacatcgatactgcaccaaatggtaacaggtatgacagaaatcaatcatcggccgcccacacacacgagtgggaaggtgacctcactgtccccaaatacagaatggcctcacctacctcctaccttcttctcatgctgttcacctctcccttggctcagcaccccttgccagttctcccaaggtcctctctgccagttgaaggcttccctgatcgccatcctcctcaatcccccaggactcacaggttgaaagagtcgcagccaagagttagggaacctgaccatgagccaatcccagtgctaagccccttgcacgtgttaattcagttaacttagcaactgtactaagccatgcacacaactctgtagtattattattatcatcgtcatcactatctgtgcctcagaaccccttggcaaatctttaaattctcccagaagtgtgtgtttcccagtttgaagggccctgccttcctacaaactgtgaaatttggcggggtgctgcgggggaggaacccaaatcacaaaataaacctagcagaactacctgtaccatcggttcactgttgctagatggcagagtgtgtgaagttcctggccaattggagaagcagatattaaagttttaaagcaagaaattgcttcagtggcatacaagtcacttgcccagaacacaagcccctgggtgggagcatggtgggtggaacagagactggaagaggaagaatggaagggtgggtgggccatcgaagcctcccatggaagcccccttcacatattctccccctttgatggctgccctgaagagtcagcccccaaaagcaggcttgcgggaccctcttcccagaggtccagaccagattcctttcagtctacttacccaagttgaagttctcacaggctggtaaatgcagtgagcttatttgcaagccagggtcatatctgcctagcaacccaacacgaagacttgaaggactataaacgtggacagagaacaggcaggccaactttacacaaaggaatctgttctcatgcaaatgaccctatgcaagagggctaaaagagggagccttggggacagctctgaagagccaactttttccccaagaagatgttgggggtcttcttaagggcatcatgatggtcttgcccactgtaaaggaaagccgagagggggctctgcctgccacttgggatcaggcagacacaacaggagaggctaagaggggagctgagcccttcacttgatttcctgatttttctggtcctgtactccagactccaaaggttcttttgttcttatttagaactaaacagagttagttttgtttgggggcaagggggcgttgattagcatggcaatgcagtgctttctctggagaagttaaaaaagcaggggttttcacgcttggtctcactaggattgagggaacaaggtgaagccagcctctaactagggtgggcaaaagtcatgttgcgtgacttttttgtgactagcaaggctgtgcgtaggttgggtttccagctacctctccattattcaaacacagatggcaaatgtcatctttggatgagctctagtggtaaaaagtgctagtgtgtatctataaacatggtgtaaccttaggtcaatccctccagtgctcagtgcctccactttcctcatctgtaaaatgggaataatgagtgtcaactacagaaggttactgatgcggttaacattgcattacatgtatggcacttaatgcagtgttgaggacaaagcaaacatttaaaaaagattaatattaataaaatataagaatagtaacacattagtaacaaaaatctattattattattattattattattagaatcatgctccccaaaagccaggtttcacttgctcaaacattcagatgtgatttttccaatcattcattcactcctgaggatttaggtataatttgagtcattttttaaatcaagagactgaagtacagagattttatgtgacttgcttcgagtcactcaggtataaatggctggctgcacctttaggttcctaagacatacagaatatgctgtcatattgcacatgatatttccatatagagtacagtaacaggtcctaagtattaaagtgtaagatcctaaatatcaaagattatcttacaggcagccctgcattagcatgaagtgttcaaatcagtttctaaatatcattatatatggatcctttgaagaacaactcaaaaaagggctctctctcacagggagtgtgttggagtcagcaattaattggccttggtaaagcataaatcgtaacagcagcaagagctaatgggtactgaggccttaccaaatgccagtcactgcgatccgcactttacaagtaccataaattaaaccctccaattctgggaataccacctccatccccattttacagatctggagaaattcacgctctacgaggttaaattacgcctacaaggttgcaaagctgctcagcggccccttggctgtacactactggccatacaaggcaccctgtaccaacgaatcttctccccacttacacaaccagaacttgtcaacggcaaaggatggcatttaactcaggagagcctatcccaaaatggtgagagaactcagcgagcaaggaaggatttttattaaaattcagatcgccgactcctcccggtggcgaccctccgtgcatgcactcccaaactaggctctcttgagtttctgacatcagaaccacattctccgaaccccaatgaaggcagcagccggcgccaaagtctgcatacgaatgcaaataacatggcctttgcttccgagcagtttccaaatttgccctcgggatgtgaggtagagaccaagaagctaagtttgcgcccccgcaggctctgaaatgtctaggatctgacacatgctttgtccccatgaggagctcctgagatttcgcgtgcatcatccgcttagttcacggtgaccttggggtcggggactacgggatgaggggcacggactgtctaaacctccaggtcccttacagagggctccccgcgggtatgggagccatgcacctgtgccgacgccgccactgcctggagggtgcgcgcgcgccccgggccggggatgctgactcagcccggctgctcacattcctttcgcgcaacgcggatgctgttgctgccgctgctgccggtgcagcaaagtgggggaagcaaggcacccgcagcggcccggccgctcgctccctggggcccactgcgacactccctccccactgccggaaggggaactgtgggggtgcgcgagttgacgaaactgggggaagtgggcgctgcaggaggaactcaggcgccgcgcgcgcagctcacacccaaactggaaggaacctgttctgcccggggcgggcgcgaagccgccgcagccgcgagcgccgcgcgggatcagccccggcgcgcgcgtgttccccctcgccgctaaatccctaaatcctcagggcgcgggcgggactgggcggtgggcgcgccgggaaggcgcccgggggtggggacggggacccgcgcgctcgcgcctggccgaggtgctccgagacaggatgcaggcacccccaacaccctgcacgctcgcgctcctactagcgttgcagcaaagctccggggtctgggcgggtcacgcgcgcagaggcgcacccgggttgggagatcggggcgttgtgccaaggaccccggcggcgctggcgggggcggcccggccccggaccgcgacgcggttacctttcgtgacccccagcccaggcggcaggctggcgggcgcgcgaccggcgcggctcaggtccacgtgggacggcgcgcgcgcgccaggcaggccccctccttggctgcgctcagcgctcgcagcacatggtcggcggcggcgcgcccccgaggccggcggagaccggctgcagccggtataggataagagctaggcagcgacgcggggccggggcgcgggcggcagcacgcacggcccgggtcgcaggcggccggggtggggggcggggggagggtgtggctcgggtgcccgagtcgcgggagtgggtggagggcccgggcgctcgggcctcaccagcccgagccaacttgcgctagagtcgggcccgccccctaaggggttaatccttttctcatgttaccgagcggcttataaggagggggaggccaagcctccgccttattgggagcctttgggggtttattctcttcccttctaacttggtgagttggtttattattttacatgtttaaaagtttgattgtgggatgtgggttgttttttaaaaaatatgtgttggggcctttttttgkgatgggaggcggaggagaccactgaacatcttcacattttggagaggttattcccaaaaatattcgctctgacagttaggaatgcccagggccaccgggatgacgcgctcgcgccggtgtgggtagctgagagttgaatgtccgtgaccctggtacagttgggtcccggaagatacctaaaggcacgcctggcctttgagtgccccctgccccgggttgggggctccgggacgtcggaagagtcgggggctccaggctcagcccctccgcggattttccgcatgaagttgcctgcgcgtcgcaggagcgaaatgtcagaggtaccttcctaccccaggctggcgcgcgcacgcaggccgggcactgaggcagcgcgagggaaagtggggctccctgcctcccccgacccccaaacacagcactccctgcggcggccaccgtttgtccccagcgggaagccggggatttcccggcagagcgcgggtcctccacctggactgtcagaactgtcagcggctgacggccggtcccgcgcaacttcaaggttcccgggctgccaaccgcaggaaagcgctggtgtcgccaagcagttccgtagcaagggaagatggttttgcagaggaaatgggttatttccttctaggttgttgtcgtcttttctttttattccccccaccctagcaagacaggtcatagaagtttgttaggtggcgtatataaaatgtcaccaaacatggggggcgtcagtcttagaaaaagctccccggagccaactggggaagagcaattacaacttgtcaacctggaagccggttttgtttgcacggttagacactccgtgccagctccttctcgcaggagatggtttctaccccgggaatgagatttctcagtgatctgattgtttttgcaaatcatggtaagataggtgtcttgcttgtwaaaaagatgccaagtgcttatgctgaaatctctaaaccatgcatctccccatgtcccaagcaccgttatgtggcatttttggggtcaacaatacatccggccagatgatataatagaaacccctcttctcataattaagggaagagtgtccaaaataggaacttacagtgtgtaaataaacaatgcagccaagtggaaaagctccttccagtgtaatgagtaccactaaccctgagttttccttctgtggtttccgaaaaaggactttcctcagtggaactcctgaggaggacacttaaattaggggctcaggtttcaacaccatagtcttgtaaaatggtgactcggttgtagccagtgattcaacatcgtgaggcagctatccaggttaggtttggaaattttttttaaatagagaatgcagatgaactttagccaaatacagactggttttgacaacttgggccagaaacaacttgtcaaagctgttctccgggctacgcctttaagaagaagagaaatccgcagtgcttttgctcgaggtctgcctacaacagtagccaccccatttccatccagagcctgcgttttgaaacttgctcttagctgaccctggaataacactctgatggtctacaataatacaatttttttcatgccctcgggccaaatcttctctcgacaaattaaatcacagtgaaactcccaaggatagcggatttccaagcctttggcaagatacctacttatttatttgtttagaggcagggtctcactcccatcatgggagtgcagtagcgtsatctctgctcattgcagcctcgacctcccgggctcaagcgatcctcccacctcattttttaatttttttgtagagacacagcctcactatgttgcccgggttggtctcaaactcctgggctcaagtaatctgcctgcttcggcctccctaattgctgggattataggcatgagctaccgcacccggccaatactcatttatttaaggggacacttaaccacatgctactaggaaatcctccaaactgcccgtggattgtgtcattgtacttcctccagaagaacactagggtgaagggaagatggctgccgggaacccccattcagaattgtcgagttttgtaagttggaaaaggcttgagagactcccctgacaacccatgctttacagatgatagaagttctagaagttcaggattctgtggtttccataactgtgcagccagttaatggtacacagaaattaacaaatatggcctaagagctttaagaagaccaactcttcggccttgccttcaaagggcttagaaggattaaagcaagtgacggtcaaaggctgtcatagaagtatagactattagggcaggaagagatctaarctcatcagagtctagttcaactcccttttttacatttaccttgattttacattgacattgaaaatggggaagtgaagtgatttgcctaaattccatcatccgtaaagcaggggttgatgggcaggatgactcagctcgcctcaccagttagatccctacmcagctgaaaaatatccctacccgtcagataaattcacatggccacagaccaaagtggacagataaacttttatattctggaacttacagaggcttctgcataaatgagttcaaaattcaggcctcagttgctttgtttgcagagacagaaggtttggccttctgctgaaggaatggaaaaaaagaaaaggagaaggccgggcacagtggctcacgcctgtaatcccagcactttgggaggctgaggcgggcggatcacaaggtcaggagtttgagaccagtctgaccaacatggtgaaaccctgtctctactaaaaatacaaaaaaaaaatcagccgggcgtggtggcatgcgcctttaatcccaactactcaggaggctgaggcaggagagtcgcttgaacccgggaggcagagcttgcagtgggctgagatcgcaccactgtgctccagcctgggagacagactgagactccatccccaacccccaaaaaaaaaaaaaaaagaaaggagggagggagggggagagagagagagagagaaagagagagagaagagaagaagagaagagaaaagaaaaaagggagaagagtccaggaagggttttattctgcaaccaagcactttctccccttatgactcggttttttaaggaaagacctgtgcatgactttacttaaatacaggcattatcacccaggaaggttcagaaaccaggttatcctgttattactttatattgtggtcttatcttcaaagctaaatttaataggacataggatgctttaggatgataaaggcataaaccttgggggtaggacggggttcagggtgtcatctttccttgatggagatctcagttataaaaagaaaagaaagcttctgtccaaaaacccaagaatgcaggtgaaagttatatgtggctctagctagagtagaatagctcagacataaagcagagttttttaaaaaaactaaggaattaacttcccagcagtggctcagaaaggaaatagaaatgaatagtccaccatctggctaggtgaggtggctcacacgtttaatactatcactttgggaggccgaggtgggaggatcgcttgagtccgggagttccagaccagcctaggcaacatagggagaccctgtctctattaaaaaaaaaaagaagaagaagaaggctgggcatgctggctcacgcgtgtaatcccagcactatcgtttagatactatctaacgtttaatactatcactttgggaggccaaagcaggcagatcacctgaggttaggagttcaagaccagcctgaccaacatggtgaaactccatctctactaaaacaaaattagccgggcatggtggcgcatgcctgtaatcccagcttcttgggaggctaaggcaggagaatcacttgaacccgggaggtggaggttgcagtgagctgagatygtgccatggcactccagcctaggcaacaagagcgaaactccatctccaaaaacaaaaacaaaaagtccaccatcttctaaacagctgtcatagaatagatctaagcaatgaccagctagctactttacacccatgtttgcaagaaccatctagcatttacactttctccgagctcagtttccttgggccaccaggcttcgcttaagccatcagttgattaatagaattcagtactaaattcaaaagtatcagctgtttctcacacctgtaatcccacactttgggaggccaaggcgggcagatcacttgaggtcaggagttcgagaccagcctagctaacatactgaaacctcatctctactaaaaatacaaaaatcaaccgggcatgatggtgggtgcctgtaatcccagctactcgggaggctgaggcagragaatcgcttgaacccgggaggctaaggttgcagtgagccaagatcgtgccactgcacttcagcctaggtgacatagcaagactccatctcaaaaaaattaaatacaataaaatgctctcctgtaggcttgtacagcaggagccctggaaggcaggagattcagtattgggctatttcagtcaagtcccttcacctcttggggatcagtttcccgattttacaaaatgagtaagattttacaaaaaggaattgaaaaagataacctcaattttccccttcagctttaacattcaataattctaactctattcaggggttacagattcatcctagccccatcccttttgcaagtgtaaacatctgatgatacaggcaagggaagagaggaaaggggcagctggcaccagaacttcagtgctggccagacagagccttctcatgatggcaggtaatctcagctcatacaaaaactgcaatctggtcccactcatctaaatgcaacccacagcccggtccacatggtgagaccctgtctctacaaaaaataaaaattatgccaggcgcggtggctcacatctgtaatcccagcactttgggaggccraggtgggtggatcacgaggtcaggagttccagaccggcctggccaacatggtgaaaccctgtctctactaaaaatacaacaaattagctgggcatggtggygggcgtctgtaatcccagctacttgggaggctgacgcaaagaattgcttgaacctgggggatggaggtggcagtgagccgaaatcatgccactgcattccagcctggactccatctcaaaacataaattaaaaaaaaaaaaaattggctgggcatggtagcacatacctatagtcctagccacttgagaggctgagtagggtcacttgagcccaggagtttttttgtttttgttttttgagacggagtctcgttcttgtcackcaggctggagcgcagcggcacaatctcagctcactgcaacctctgcctcctgggttcaagcagttctcccaccgcagcctcccgagtagctggaagcacaggtgcgcaccaccacaccaggctaatttttgtaattttagtagagacggggtttcaccatgttggccaggctgatctcgaaacctgacctaaggcaatccacccacctcggcctcccaaagtgctgggattacaggtgtgagccaccgtgccctgcacgagcccaggagttttgaggctgcagtgagctatgatcgtgccactgcactccacgtctctctagggtctttatcaaattttatcactatatgttttgtttcaaggtggtcctgagcccyccattaaaactcttaagaccttctgggcacatttctgggttagaacaactgtgccaatttgaccttggtcttagtagctactgagtcctgactgcttgtcagaaatgtgctgaactctggcaagatgtggttgaatcatttacataggatgcatttcagatgcattcattttccttagcatcatcatcagcaaatattttagtccatggaggcagagaccatctcttggtcttttcactgtagtgcccctatagtgaaagcgaggacctggcacctgataggtattttgttgmaaaaataaatacaagctgtgtacaaggtacaggcagggtccggggacatggggttgtacaaagagaaatagacctcagattttgtgagcatataatttatgacatatcaacacacatcaaaatgcaaaggcctttgctgcaaagagcatactcatcttacagcatcttatgccttattttaatcaaccaaatatttagccgtaatagtgtataaagtgaatatatagtccttcccaagtactaggctacagtgggaatggcgctatcagtaggatgaatgatactaagttagatcagatttgctgctttttaagatttgtagagtaaattcagaacattagattttaaaaatagaaaaccagcaagtctgttggatagatgaggttgtgtcctgttatttttcagttgccttctactttcaataaaacctttgccttagtaactttgacccaacaacttatggctaggaaaaggatataaaggatataatgcaccctgaccctgaaaattcacctgtatacaattgtataattgtaaagaattttctttttacattttatttattattttatttatttattttagacagagtcttgctctgtcacccagactggagtgcagtggcacgatcttggctcattgcaacctctgcctcccgggttcaagtgaacctcagcctcctgagcagctgggactacaggcacgtgccaccacacctggctagtttttgcatttttagcagacaccgggtttcaccatgttggctaggctggtctcaaactcctgacctcaagtgatccacctaccttggcctcccaaaggattacaggcatgagccactgcgcccagcttttttttttttttttttttttgagacagagtctcactctattgctctattgctcactctaggctggagtgcagtggtgtgacctcggctcactgcaacctccgactcctaggttcaagtgattctcgtgcctcagcctcctgggtagctgggataacaggctcgtgctactactaatttttgtatttttagtagagacagtgttttgctatgttggccaggctggkcttttttttttttttttttttttgagacggagttttgctctttttgcccaggctggagtgcaatagcacgatctcggctcaccacaacctctgccttccaggttcaagtgattctcctgcytcagcctcccgtgtagctgggattacaggcgtgcgccaccacacccggctaattttgtatttttttttagtagagacagggtttcaagactatactttcagggatcatttctgtagtttgttagtagagacagcgtttctccatgttggtcaggctggtttcaaactcccaacctcaggtgatccacccgcctcagcttcccaaagtgtgctgggattacaggcgtgagccgccgtgcccagccttttttttttttttctgatacggagtctcactctgtcgcccaggctggagtgcagtggcgcgatctcggctcaatgcaagctccgcctcccgggttcacgccattctcctgcctcagcctccggagtagctgggactacaggcgcccgccaccacgcctggctaatttttttgtatttttagtagagacggggtttcatcgtgtttgccagaatggtcttgatctcctgacctcgtgattcgcctgcctcggcctcccaaagtgttaggattacaggcgtgagccactgcgcccggcccagtctggtcttgaattcctgacctcaagtgacccatccacctcgacctcctaaagtgataggattatgggtgtgagccaccacgccagccaacttaaaaaaaaattttttttagacagggtcttgctctgtcattcaggcaagagtggtagtgtgatcacttcttactgccgcctcaagcttccagcctcaactcaagcaatcctcccacctcagccacccaagtggctgggactacaggtatgtgtcaccacaccccgctaattttctttcttttttttttttttttgagacagagtcttgcactgtcacccgggctggagtgcagtggcacaatctcagctcactgcaacctccacctccggggttcaagcaattctcctgcctcagcctcccaagtagctggggttacaggcacccaccagcacacctggcctttttttttttttttttttttttttagtagagatggggtttcactatgttggccagactgctctcaaactcctgacctcatgatccacccatctcggcctcccaaagttctgggattacaggcatgagccaccatgcccggcactgctaatttcttcttatacttttttgtagagacagcgtctccctatattacccaggctgttctcaaactgcagggctcaagcaatcctccagcctcagtttcccaaagtgctgggattacaggcgtgagccactgcgcctggtcctatgtgtagtttttttttttttaagttctagggtacatgtgcacaacgtgcagatttgttacatatgtatagatgtgccatgttggtgtgctgcacccattaactcgtcatttaacattaggtatatctcctaatgctatccctcccccttcccccaaccccacgacaggccccggtgtgtgatgttccccttcctgtgtccaagtgttctcattgttcaattcccacctatgagtgagaacatgtggtgtttgttttttttgtccttgcgatagtttgctgagaatgatggtttccagcttcatccatgtccctaccaaggacatgaactcatccttttttatggctgcatagtattccatggtatatatgtgccacattttcttaatccagtctatcattgatggacatttggattggttccaagtctttgctgttgtgaatagtgccgcaataaacatacgtgtgcatgtgtctttatagcagcatgatttataatcctttgggtatatacccagtaatgggatggctgggtcaaatggtatttccagttctagatccttgaggaattgccacactgtcttccaccatggttgaactagtttacagtcccaccagcagtgtaaaagtgttcctatatttgtagttttttgaggaagctccatactgttctccttattggccgtactagtttacattcccaccgacagtgtataagagttcttttctccgcatccttgccagcatttgttatttttttgtcttctgatcatagccatcccaaatgaggtaagatgatacctcactgtggttttgatttggatttccgtaatgatttgtgatgttgagcattttttcatatatttgttggccatatgtatgtcttttgagaaatgtctgctcagattattcacccattttatttatttatttatttatttgagacagagtctcgctgtgtcaccaggctggagtacagtggcacgatctcggctcactgcaacctccacctcccrggttcaagtgagtctcctgcctcagcctcgcgagtagctgggactacaggtgtagaggtgcatgccaccacgcccagctaatttttgtatttttagtagagacgggatttcactatgttggccaggatggtctcgatctcttgacctcatgatccaccyrcctcaggctcccaaagtgctgggattacaggcgtgagccaccgccaccagcctgttcacccatttttaagccagattgttggggagtttttttgctgttaagatgtttgagttccttgtatattctggctattaatcccctgtcagatgaatagtttgcaaatattgtctacccttctgtgggttgtcttttcattctttttttttttttttggaggcagagtctccttctgtcacccaggctagagtgaagtggcatgatctcagctcactgcaacctccacctcctggattcaagcaatcctcgtccctcagcctcccaagcagctgggactacaggtgtgtgccaccaggcccagytaatttttcgtattttcagtaaggatggcatctcaccatgttgcccaggctggtctcaaacgccttagctcaggtaatccacccaccttggcatcccgaagtgctgggattatagcgtgacacactacatctggcctcactctgttgatatgtttcctttgctgcgcagaatctgtttagcttaatataatcccatgtttatttctgcttttgttgtgtgtgctcttccagtcttatccataaaaatctttcctcagacaaatgtcctaaagtgtttcccctatgttttcttctagtagttttatagttttaggtcttacatttaagtctttgatccatttttagttgattgttgtatagggtgaaaggtggggatttagtttcattgtttgtattgatatccagttttcaaagtgccatttattgaagagactgaactttctccaatgaatgtctttggcacctttgccaaaaatcagttgggtgtagacatgtggattaatttcagggttctctcttctgttccattggtcagtgtgtctgtttttatgccagtaccatgctgttttgattactgttgtgttgtcatatattttgaggtctgttmgtgtgatgcctccagctttgttctttttttcaggatggctttggctattcatgatcttttgtggttccatacaaattttaggatttttttcttctatttctgtgaagaatgtcattggtattttgataggaatccactctgtagattgctttgggtcatatataaataattctttttttttttttttttttttgagacagagttgctctattgcccaggctggagtgcagtggtgcagtctcagctcactgcaacctcctcctcccaggttcaagcaattctcctgcctcagcttcctgagtagctgggattacaggtgcctgccaccatgcccagctaatttttgtagttttagtagagacggggttttgccatgttggccaggctggtctcgaactcctgacctcaggtgatccacccgctttggcctcccaaagtgctgggattacaggtgtgagccaccgcgcccagccataaagaattcttaaacttgaagttggttgccattaagagcttgaagaccatggactcattgattattatagatatcattaatttttagttaggctaaaaatacacatgactgtttcaaagtatatgtaattacagaggctttgaaaaagacagtattcatgtgctagagcccaatccagaagacttaagttaaaccaatgtcaatgtcartgtctccttagaagtgttaagacaggttggcttgttctgatgtttattgcagtttgaatggagaggcacagtgaggttaggggtaactcagttaactggtgtccagatggggccctacaggcttgtataatagtaccttatttagacaccatattctagagtatcatcatgtacttggaaattcaattgctaatatactaagtggtggtcaactttgaggaaattactcctgcttaacaaactcccagaagacagaatgccctcattttgatttatagtgacattgtgtctgtgtaggtacatccacatggaacaccaaatcataatcagaatattgcttactgagtagaaaatggcggggaagaagagttgactaggtgatcgcggtggccagggacatcaagcagagacgcttatggtatctcaaacacttactcggtggaaggtgctggatgcaccgccaatgtttgcttttcagcctccgttttctaggcttcatttctgatcaacattccttatggtcaattcagtctttttttgcctaagttgagtccttcaaggtcagcattaatacttggtctggtggccatttggtgtccttcaatatgcttctaaatattctgctctggttcttcatgtctgtttttcccatttaactttctttttgggaggccccatgtacaataccaagatttgtatatacatatatatgcataaaagtatccaaatactttatactgcttgtacatgatttaaatattcaacaatcagctgggtgtggtggctcatgcctataatcccagcattttgggaggtcaaggcgggtggatcccttgaggtcaggagtttgagcccagcctggccaacatggcaaaaccccatctctactaaaaatacaaaaattagccgggtgtgatggtgggcatctgtaatcccagctactcgggaggctgaggcaggagaatcacttgaacccgggaggcmgagatttcagtgagccaagatcacacaactacactgcagcctgggcaacagagtgagactctgtctcaaaaaaaaaaaaaaaaaaaaggaaaaagaaaaaacattagctggctgtggtggcacatgcctgtagtcccagctacttgggaggctgacgtaggagaattgcagaggttgcagtgagctgagatcatgccactgcactctagcctggatgacagagcaagactccatctcaataaataaataaataaataaatattcaacaacttaagaaatggggtaagtagttcttatctgttgtttgcttaagagtatgagaatcatcgatcctcatgctattgctgatctgaattgcttttaactttttctttcagattaagaatgacccaaaataaattaaagctttgttccaaagccaatgtgtatactgaagtgcctgatggaggatggggctgggcggtagctgtttcatttttcttcgttgaagtcttcacctacggcatcatcaagacatttggtgtcttctttaatgacttaatggacagttttaatgaatccaatagcaggatctcatggataatctcaatctgtgtgtttgtcttaacattttcaggttagtacatctttcggcctaaccatgacgtaagtatagggcccttttaatttggctaccttggtaatggtagtcgatgtgtttgtgatgctttcattcccttatacgcctgttggtccttcctagccctgactaacagggttttcagagcattgaggattggcaagaaacaaaaggcactgaagaaaaaaagccttatttgccagccatgacagccttcagtttaacacacatgtattaaacatctgctgtctgcacactcttaggattctgtagattcccttaaggagtgcagtcaacctccttttgtgaggatgtgaggatatagtcactgtctaagaagcaacatcaaaaagttgctgatggccgggcacagtggctcacacctgtaagcactttgagaggtcaaggtgggtggatcasttgaggtcaggagttcaagaccaggctggccaacatggcgaaaccccatctctactgaaaatagaaaaattagccaggcacagtgttttgcacttgtaatcctcagtacttgggaggctgaggcacgagaattgcttgaacccaggaggcggaggttgcagtgagctgagatcacaccactgcactccagcctgggcaacagagcgagacaccatctcaaaaaagaaaaaagttgcggccgggcgcggtggctcacgcctgtaatcccagcactttggaaagccgaggcaggtggatcacgaggtcaggaattcgagaccagcctgaccaacatagtgaaaccccctctctactaaaaatacaaaaaattaactgggcatggtggtatgtgcctgtaatcccagcactcaggaggctgaggtaggagaatcgtgtgaacctgggaggtggaggttgcagtaagcccagatcatgccattgcactccagcctgggcgacagtgtgagactccatctcaaaataataataataataattgctgacataccaggccccaatctcataattccaagtggaaacatgtaaatgtggatgcatgaagcaaaatgagatgtgtacaaggagataaggtgaaattacaaatattgttctgaggagaccttctgaattccaagcacctgtttccctaaaggacttcactgattcatcattacataatatactcccagacccaatcgcataaaataaaatggggcttcagtatcatttttaacatactaatcttcacttggtcctataaagggctattgaatatacatgccaggtctcatgagttcattggtctgtcagaaataattgccaagggttttctaagagaaaagggctgttgaactcacctcagaaagttaaccaagctgggcatggtggctcacgcctgtaatcccagcactctgggaggccaagatgaaaggattgcttgagccctagagtttgagactagcctgggcaacatagcaagactccatctctacaaaaaattaaaataaaaaattggccgggcatggtggtacacacctgtgatcccagctactcaggaggctgcagagcgagaattgcttgagcctgggaggtcaaggctgcagtgagccatgatcatgccattgcattccagcctgggcaacagagcaagaccccatctcaaaaaataaaaaaaataaagaaagttaaccaggctgaccttaaacttccctaagtttacacttacacactgtcatggaactgttatctctgaagttattgctgaaattaaagcccttctttaaatgtagtccatttttagccatagaatgtctttacaaggcagttctacatgtttttaccctttgggtaaggtagaaatttctcgttagccgggtgtggtggtgggcacctgtaatcccagctactcggaaggctgaggcaggagaatcacttgatcctgggaggcagaggttgcagtgagctgagattgtgccactgcactccagcctgggagacagagcaagactctgtctcaaaaaataaaaaaagagagagagagaaatttatcttgttagttctcatactatcccttacaagtttcatgaagtcattcctggttctattttaagtgagtatcaagataacttaattttttttttttttgagacggagtctcgctttgttgcctaggctggagtgcagtggtgcggtctcagctcactgcaacctccgcctcccaggttcaagtgattctcctgccttagcctcccgagtagctgggattacaggcacctgccaccacgcctggctaattttttgtatttttatagtagagacggggttttgctatgttggccaggctagtctctaactcctgaactcgtgatccacctgcttcggcctcccaaagtgctggatttacaggtgtaagccaccgcacccagccaagataacttcatttttaaattgtggaatgcttaattaccttcttagaaagataacaaatgaattaggactaaaatgttacatttggtaatctaaataaaaagaaaatcccaaagcttaagttttaggtcttttataactaaaaataaaaatgtagtcaacaagaaatttccacttaatactattataccagaagataattcttccaaatgctattattctagttgttaatgctttgagccaacatcctggctcaaaatgatgagagtggttttattatgagctacatccaagattactttgtattctaatagttaacatagtagatacatatagactaacccaaaaaaatggaatcctttttttcccacttccttttctagcatgttgttgttccttgacccaactctcaatggctcacttacgtcactgttgtcaagttaatattaagtaacctataactaggaaactaatttgccagatttaaatgtcctaggggatacagcttatagaagctaagcaaatgatgattcactttcaattatctatcccatagcaactctccttcaggagtgcataacttagaattcacattctttcatcctgtcaagaaactaactaggctgggcgcggtggctcacgcctgtaatcccaacactttgggaggccgaggtgggcggatcacctgaggtcagtagttcgagaccagcctgaccaacatggagaaaccccatctctactaaaaatacacaatcagccgggcatggtggcacatgcctgtaatcccagctacttgggaggctgaggcaggagaatcagttgaacccaggaggtggaggttgcagtgagccgagatcacaccactgcactccagcctagaaaacaagagcaaaactccatctcaaaaaaaaaaaaagaaagaaactaactagaatctgaccccaaatggagctttttaaaaagaatccaaagtagtgagtagagaaaaaataattcaagcaatcataggaaaaccaatttttattatagaataacataaattcaatacatatctaattttataggtgctcatggtgagtcagagtcatctaaaaatatagataaaagttttatactgttattctggctttctctttcaggagtctgacaaatcgtgttgaatttgaacaaatagtaaaataattcctgcactgactttgcatgaaatgtgttatggtttggttttgttttttcttgagrcagggtctcactctgtcacccagtatggagtgcagtggtgcaatcttggctcactgcatcgtctgcctcccaggctcaaacaatcctcccatctctgcctgccaagtagctgggactacaggtgcacaccaccatgcctggctaatttttgtattttttgtagagacrgggtttcaccatgttgcccgggctagtcttgaactcctgggctcaagcgatcctccgtcctcaacctcccaaagtgctgggattacaggcatgagccactgcgctcggccatatttatattcgacatcatctctccatgtgcaagacgtggaggaaggagtcttatggcagctaaccctgaagcctctgtgagttaaaatatcgttttgttctttcccggcagctcccctcgccacagtcctgagcaatcgtttcggacaccgtctggtagtgatgttgggggggctacttgtcagcaccgggatggtggccgcctccttctcacaagaggtttctcatatgtacgtcgccaycggcatcatctctggtaagtgttcctctttggctcagaagttgtctagacacttagtttgaagaacaaggaaggggaaggaggaaattaaagccaaactatatttctttctctttctttttttctttaacattaacagtgtctcagatcagtagttttgaactgagctatatggacttcaggggacctgggaatctgttctcaagtgcccaagggtttttgtttgatcttcaccaaagatgatgataatttctcttttgcwgtatttgcagccaaaagatagcatttttacaaagtaagacgaatttctgtagccagtatttctcacatcagtgtctgaggatccagggctgtaggggaagtgcaacatgccagacttattcttgggggcctaagaaaacctttttccattcaaaaggagtagccagcatggtggctcatgcctgtaatcccagcacttcgggaggctgagacaggaggatcacgtgagcccagcagtttgagaccaactggggcaacatagggagactccatctctacaaaaaataaaaactagccaagcgtggtggtgcgtgcctgtggtcccagctgtaaccatcctatcactttggaggctgaggtgggaggatcacttgagcctgggaggtcaaggctccagtgagctgtgatcacaccactgcactccagcctgggcaacagagtgagaccctgtctgtttaaaaaaaaaaaaatgaaatgaacaataaaaggaggccatatattcctcatagatgatagatacacacacagttgttaagatttgcagactttaaatttttcctgtatttctgcacatatgaaatgacttatttctttctagatacaaatcttatataaaatttcatgcaataatagtttcatccattgtgaattatataaatttgaaaaaaagtgttgcaaagataaaaaaaaaaaaagttatatttttagtatcccaaacaaccactgaagtttatccagaccgttaatgaaacccatttttctttgcaacrtcacctttgtccagaatgaattacttggctcctagaacttaagattcaaaaagcaaaaccaaaaatcccagatcttttaatgcatccttccagtctcaagcagtatgtgggtctcattggcttttttgacttttctttcacaggtctgggatactgctttagttttctcccaactgtaaccatcctatcacaatattttggcaaaagacgttccatagtcactgcagttgcttccacaggagaatgtttcgctgtgtttgctttcgcaccaggtaggtggactacaacagcctaagtatgaatgtggatgagagacgtcactcaggtattcttgctacgctaacttttgccaacagtatggatgactttcagtgtatgtgtaatgagacgttatttacgtctcttctccagctcatttttaggatctgtcctccctaacccccactttaggtattcagaccaccttaataataggtttcaattcctaactgggcacatatgcagtggtagggctttcttgacacatgcattccagaataatctagtaatttgcaattattcacctgttatgtcctctcgtttttcaaaagasctacattcaatgtggatttagattatgctaataaacacagcattcttatctgtgtgtagatcatctcaaaacaaaatctgtaactgagcacggtggcttacacctgtaatcccagcactttgggaggctgaggtgggcggatcacctgaggtcaggtgatcgagaccagcctggccaacatggcaaaaacctgtctctacttaaaacacacamaaaaaggccaggtgcagtggctcatgcctgtaatcccagtactttgagaggccgaggcaggcagatcaggaggtcaggagatcgagaccatcctggccaacacagtgaaaccctgtctctactaaaaatacaaaaattggctggtcgtggtggcgcacgcctatagtcccagctactcaggaggctgaggcaggagaatcgcttgaacccgggaggtggaggttgcggtgagctgagatcaggccactgcactccagcctggtgacagagtgagactctgtctcaaaaagtaaataaataaagattgagtacattcatactgctgagtataataaatttccacagaacttataacaaaatctggatccatatttcttcttgatggcttctcctgggtcktgagtccattaytgaccttatattatttcttcttcactcctgcctattcaagcaatcatggctctgaaggagcgcattggctggagatacagcctcctcttcgtgggcctactrcagttaaacattgtcatcttcggagcactgctcagacccatcwttatcagaggaccagcgtcaccgaaaatagtcatccaggamaatcggaaagwagcgcagtatatgcttgaaaatgagaaaacacraacctcaatagactccattgactcaggagtagaactaactacctcacctaaaaatgtgcctactcacactaacctggaactggagccgaaggccgacatgcagcaggtcctggtgaagaccagccccaggccaagcgaaaagaaagccccgctattagacttctccattttgaaagagaaaagttttatttgttatgcattatttggtctctttgcaacactgggattctttgcaccttccttgtacatcattcctctgggcattagtctgggcattgaccaggaccgcgctgcttttttattatctacgatggccattgcagaagttttcggaaggatcggagctggttttgtcctcaacagggagcccattcgtaagatttacattgagctcatctgcgtcatcttattgactgtgtctctgtttgcctttacttttgctactgaattctggggtctaatgtcatgcagcatattttttgggtttatggttggaacaataggagggactcacattccactgcttgctgaggatgatgtcgtgggcattgagaagatgtcttctgcagctggggtctacatcttcattcagagcatagcaggactggctggaccgccccttgcaggtaatttaaatacacaaaatacaaacacttgtctactttcccttgtgaattgtgctagcttcctgttcaagccataaaaaaaacttactgccgttttatatttccattgaattttagagctgccagggattagagattacctgagccagccctcttgatttaaatatgaggaaactgaaggccaaagaattgaagctaaaggtcagatggtaaattagtggtcgattcaggactggaagctgtgtctrtagtccagattgaccctggccttttttttttttttttgagatggagtctcgctctatcacccaggctggagtgcagtggcgcagtctcagctcactgcaacctccacctcccagattcaagtgattctcctgcctcagcctcctgagtagctgggactacaggyacccaccaccacgcctggctaatttttgtatttttagtagagatggggtttcaccatgttggccaggatggtctcaatctcttgacctcrtgatccgcctgccttggcctcccaaagtactaggattacaggtgtgagccaccgcacccgccaacccaggctttttctgtcaccttgccttctctcatgctaggcaagaactcatggatttatcaccttcagagcccacctgacttttggaatgatagaactaatggacttctgtaagtcatcttcctttcttaggaaaggtatttgggaatggatagcagcactctgtaaatacctaactgatttgtacagaatatttccttgtaggagggacataggtatgtttcatatcttagatcccaaatgggtctttaaagtgtttgtgattagaaatcgtaccccctgtcaaaagatacctaaaacgggccgggcgcagtggctcatgcctctaatcccaacactttgggaggatgaggcgggcggatcatttgaggtcaggagttccagaccagcctggccaacatggcaaaaccccatctctactaaaaatacaaaagtagatgggcatggtggcagacacctctaatcccagctattcgggaggctgaggcaggagaatcgcttgaacctgggaggcagaggttgcagtgacctgagattgcaccatcgcactccacctggggcaacaagaataaaactctgtctaaaaaaaaaaaaaaaaaaaaaaaaaaamcctaaagtgaactcaagtgaaaataatacagttccttcctaccgaagaatattaccttttcaaagaagtatgcatcgaaatgtcccaggttttaggtcctctgctaggacaggcttagcccaagaagaacaagtatattgggtgtttgtctctttctcctctccagtctagtaaagatttctgcccttaacacccatttttctttagaaacacaaaagaaaacaaggaaggcagtgaaactgagaggcttctgaatgggatggtcgcctgggtgaggggcttatgtctaggaaggatgctgttaacggacgccatgctctcttccaggtttgttggtggaccaaagtaagatctacagcagggccttctactcctgcgcagctggcatggccctggctgctgtgtgcctcgccctggtgagaccgtgtaagatgggactgtgccagcrtcatcactcaggtgaaacaaaggtagtgagccatcgtgggaagactttacaggacatacctgaagactttctggaaatggatcttgcaaaaaatgagcacagagttcacgtgcaaatggagccggtatgacacactttcttacaacaacagccactgtgttggctggagagggatggggtgggcccaacggggacacaaggaggcagaggagctaacccctctactccactttcaaaactacattttaaagggaatgtgtatgtgaagagcactaccaacatcgcttttgttttgttttgttttgttttaagctttttttttttgcttgtttttaaagccaaaacaaaaaacaaccaagcactcttccatatataaatctggctgtattcagtagcaatacaaragatatgtagaaagactctttggttcacattccratattaaaatagtgacatgaactggcaaagtggttttaaaagctttcacgtgggataaatgattttctttttttcttttctttcttcctatggtcttgtctgaataaactactctcctgaataaaacaacatccaacccaggtcattgaaatgaaattggccagtcaaaaaaaaaaagacttcaatcatttttaaaattyctaattttcagaaatatgaataaatagtttttgttaaaccctttgtaaaataccaaggttcccgttaacaaattacggcctctgcttgctggaaatgaaatatagtttaagaccaaacattttactaataaacaaattttaagtatatatatatatawaacttgaacttcataaatgtgaagatwaccacttctttttatggccagtccttatcagaagtgtttcagtacagaatatacaaaatggcatttaaaaatgtgtttcctgttgcttttagttatacagaaatatgtgactgtagtgtctttaatttaaaccgctatttattattaagttattctaggatgattaaagtaatcaaaagaaataaaatctgagacataagcagcatttttacctcctttctgcaatcctttaaatgcctcacagaatacgtcttatcttgtaaaaatactttcataaaaggccaagttgtcatgattcttccatttgattaggggcaacgtgtgctattaaaggggaaaaaataatggattgcaaatcgccttagctttcaaaactaatttgttttatcatttaagaatacttgaggaacttctttgatcagaattatatttcagagaattgttaaagcatttctgatttaaagaaaaaaccatctaattattgaagcatttctgtatttcacatgggggtaacagagacaattatgttatagcgagttacaagttgcaatttacatcttctataacacatgacttgattggtctaagttgccagaggtatcgggtaactggtcattgttttgttttgtttgttttattcttcctttttttttggagtcacactacatgtayagtattgctcacgttagcagttttctgtaargaggrcaagtgtcaggataataggtggactttttactcacctattttacyrcaatctcaccctgcaggtgayggtcaatgcttgctgctccatctttattcatcgttaatgttaatttatgacaactcagggggaaaaacataacaagcctagtttggttacaggtacacacaagcttgaatatttctctgcactgaaatgaaagtggcatagttcatcaccacctgctacattttgtagagcatcttaycagccatagaaataggacaatctataaaactttggggagggtgggggaggaaatgacamagtgtctgtcaaaaacaggcataatctaaaacaaggtggatgtagcaaatctctgtcactgcttgagaactttgagcttgtggcagttttgcagacttacatgacttcagcactttacracrtattttttactatgaatgttcaatacaatttaatatttataactgatttcwgagggatctgctccatgtctattctgttatctgcatgaaaacaaaatgtatgccaatttcagtatgtcaataatcaaggttttaaatgtttgraagaaaatacaaacaagattgctgatctgttctgtattagtgacattctggtacttctagatttgcaataaatttatggattttttatttaaagagaccgattctcttctaagattttttattgactctcacagcattcagtgtttgaggcaattaaagttataaaaactcaccaaagattcactccaaataaataattttttaacgtttatcttctgcaaaaccttttaactctactagagacacataaagtttcccaagaagtttctactgaactttttatttacttatatttattattattattttttgagatggagtttcgctcttgttgcccaggctggagtgcaatggcacaatctcagctcactgcaacctccgcctcccaggttcaagtgattctcctgtctcaccctcccatgtagctaggattacaggtgcccgccaccatgcctggctaattttgtgtatttttactagagattgggtttcaccatgttggccaggctggcttcaaactcctgacctcaggtgatccacctgcttcggcctctcaaagtgctgggattacaggtgtgagccatcatgtgcagcctaaacttttttatgtctttttttttttgtatactttttatacaaaaaaaaagtatatatatacatatatatactttttatacaaaaaagtatatatatacatatatatactttttatacaaaaaaagtatatatatacatatatatacatatatatactttgatcattgaaaacaggacgattttattttatgttgagtttcatacgaactattttaaagcaccttagaaaaagactaaataattcaagggaagtattaagtaatgaataacagaagagggaaataaaaattaaacaatataatcaaatgaagaagcatattttcatctaagaattgaaataagaatgaaagcatcaatggaatttaattattaatcaaaaatacatgaatgaaatgatatcatggtagccagagtaagcctatcaaaagtcataaaggcaaatagttaaagaccacaaccagttacagagtcattccaagaactgttgcaacctgtaagtaaacagcacagactctacatgccaggggttggcaaactttttctgtaaaggtccagatagtaaatatttaaagctttgcaggccatgaggcctctgtctagtcaactctgccattgagggtcaaaagcagccacagacaatatataaatgaatgaacgtggccatgtttcaatggaattttatttacggatactgaaatgtgaatttcacaagattttcacacaggaaatatattttttttcaatcacataaaaatgttaaaaaaaaaaaaacaacacacactattagctctcaggctgaaaaaaaaaaaaaacagtggactggatttggcctgtggaccacagtttccagccccttcaccacacatctgtaacaccggcacaggtcagtaccgccagaagcaaagctctgagaactaacatcctgacccatgggaaaggattcattgtggtcaaagtaattcttagatcataactgccccaaaataggaaagatcaagcagctaacactttttcattgttgttgttgttttgagacagagtcttgctctgtcgcccagactggagtgcagtggcacaaccttggctcactgcaacctccacctccagagttcaagcaattctcctgcgtcagcctcccaagtagctgggattacaggcgtgcaccaccacacccagctagtttttgtatttttagtggagacaggattttgccatgttggccaggctggtctcgaactcctgacctcaagtgatctgcccactatggccttccaaagtgctgggattacaggcatgagtcaccgtgcccgacattatagctaacacatttgttaattacgttttcttttttcttttttttttttttttctgagatggagtttcacccttgttgcccaggctggagtgcagtggcgtgatctccgctcactgcaacctccacctcctgggttcaagtgattctccttcctcagcctccaaagtagctgggattacaggcatgtgccaccacgcccagctaatttttgtatttttagtagagacagggtttcgccatcttggccaggctggtctcaaactcctgatctcaggtgatccacccacctcggcctcccaaagtgttgggattacaggcgtgagccaccacaccaggccgctaattatgttttcatttcccctgattaaaaagattctgctttaagcttgttgacttcaagaggtttcagtataaaccttatgtagactttctctacccaaaagtaaaattattctacttataaaaatgagttgggccaggtgcagtggctcacgcctgtaatcccagctctttgggaggccaaggcgggtggatcacctgaggttgggagttcgagaccagcctgaccaacatggaaaaaccccatctctactaaaaatacaaaattagacaggcatggtgctgcatgcctataattccagctactcgggaggctgacaggagaatcacttgaatccaggagatggaggttgtggtgagccaagattgcgccattgtaccccagcctgggcaacaagagcgaaactccaactcaaaaaaaaaagagttgagaccatgtactcttttaagacctatgtatccgtaactaatacaaaatgtgtccaaaccttttaacaaagttatacattttatactccaataatatgtaatgtagcttttcagcatttatttgcctttccctttgcttaatatctggtgataaaacagaaaatggattctatgtcagcattcttgtggcgcagattcaaatcaccaggtggtatttattacatttagatttccatactccaattcaactattgtaaatcagaaatcatcatgatccttcagctgggcgtggtggcgcacacctgtaatcccacccagcactttgagaagccgaggcgggtggctcacttgaggtcaggagttcgagaccagcctagccaacatggtgaaatcctgtctctactaaaaatacaaaaattagccggacatgttggtgcgtgcctgtaatcccagctactcggggggctgaggcaggagaagcacttgaacctgggaggtggaggttgcagtgagtcgagatcacgccactgcaccctagcctgggcgacagagcaagattccatctcaaaaaataaaaattaagaaaaaataaaaaagaaatcatgatccttagtttcacaagtttgcaaatatggggctcaccaatagggaactagagtttagaagccattgtctttaattctttaaaccgtggccaggtgttgtggctcatccctgtaatcccagcacttcaggaagccacggtgagtgaattgcttgagcccaggagttcaagaccagcctgggccacatggcgaaaccaaaattagccaggtgtggtggctcatgcctgtggtcccagctactcaggaggctgaggtagaaagagcacttgagcccagaaggcagaggttgcagtgagtccagatggcatcactgcacacagccttggcaaagagtgagaccctgtctcataaaagaaaaatagtaatggttatgcacattacttaaaatgacctatttaaggaattcagacatgttacacgcaaaaatgatcactgctataagtatacattgcattgataaaagagaagctgcccttgttttcagatttgtgtttatattgcatgtgtcctaagtgagggcgatcgtagcgtacagctgggccagccgccgttgcataagtaaggaaactgggtccccctagtgttcagttctcgttaatgactctctaaaggtgcagaacaagaaaagtggcaagagaacttacaacttccctttccatgtaacaactcacccaaatcaaaactacttcaatgactatccatttcctacatggaaaattagacgggaaacctgatgcccagaacatttcaccaaatattattgagaaaatacagattgtggccatgtatttgtgtcatttatatgcctttccagcaactcaagaacaagcacgctaacttccctaacaacttatacaccctagaattcaaccaaaactttaagcaccctctctgcactggcacctcccattcttagtcccaactttgtccctgagctcctgatttatatctgcccgcatggcagggcatggatataaaactaggcatcttctacttaaagtgtcctcagcagaactctggatcatcctcctcaaacccactcctccacacatccaatcggctctcctttctaaatatatccaggagctgactgcttctgccaactgcaccaggacccttgatccaagccaatatcatcttagctggattattacagtagtcttctagctggcctgcctgcttccactcttggaacacgccacccccaccttaattttccatacagcagccacagtaatcctcttacagcacaagtctgaactaaatccttagcaatgggccctgcatgaactgcctgatggatactattacttttccctctgctcctgctacactagcctcactggctctttttctgggggggttgggggggcagtctcgctctgtcgcccaggttggagtgcagtggtgcaatcttggctcactgcaacctccgcctcccaggctcaagcaattctcctgcctcagcctcccgagtagctgggactacaggcgcccgccaccacacctggctaattttttgtatttttagtagacacggagtttcaccgtgttagccaggatggtctcgatctcctgacatcgtgatccgccgacctcagcctcccaaagtgctgggaattcaggcgtgagccactacgcccggccctttcttttttttgtttgtttgttttcgtttgagatggagttttgctcttgtcacccacgctggagtgcaatggcacaatctcgcctcactgcaacctccgcctccaggttcaagcaattctcctgcctgagcctcctgagtagctgagattacaggcacccgccaccacacccagctcattttttttttgtatttttagtagagatggggtttcgtcatgttggccaggctggtctcgaactcctgacctaggtgatctacctgcttcagcctcccaaagtgctgggattacaggtgtgagccaccacgcccagcctctcttactgtttctggaattgttcttactgttgcaagcttcaggccttagcatttgtggtttcctttgcttggtactcccttccctgagatgtgtatgcagtgtgacccttcaatttgatcacttccaaatgccacctccctagggaggcattcctgtctatcctattcaaaatggtacttgtttctatccatttactttgctgttattaggttataacagcatccactttgggaggctaaggtgggcagattgcttgagcctgggagtttgagactagcctggtcaacatggtaaaacccctctctacaaaaactacaaaaattagccaggcatggtggcacatgcctgtactcccagctacgtgggaagctgaggcgggaggaccacttgagcccaggaggcagaagatatagtgagccaagatcacaccactgcactctagcctgggtgacaggacaagactctgtctcaaaaaaataaataaaataaaataaagcatctgtttactccttgactctctgtctcatccactagtgtattagggtaggagttctttgttcactgctgtattcccaaggctttgagcagggcctggcacccagtaggcggtgctccatgaatattgttgaatgaaaaaatacatgaatgaatgaatgagttatagacttttttccctttagttacacaagagaaaaaaaatgttatctattgacagttacagttcaagagagtctgtgctgctacgaaacagctggataaccataggacactgaaagcactgtgctgagaacccaccggctcagcatctgaggatggatgggtctcagagtgcccagcagtagtgt

SEQ ID NO: 97864 - DNA, 94833 bp, Homo sapiens
gtgtttaaccaacattctaattgaagatgagtcaatagtcattccagtcagtttcctcatgttacagagggaattcattatttggaagtgctatacatactttaaaaataaaatcccagatatatttgtgtccctctcacacaagctgttaaaatatttgcccgtccctctatatagctgtagtcacaggcatgttaacgttttctgtaaaatagatcaaaatataaagaaacattaggaaaatacagctgttagaaagaggaggggagagtacacaatgtatttatagcaagtgtatatattatatcaagtagaacagacacccagccttttatgagcagttttaactctgacatgcatgagttttaaataagaaataactatagaaatctccaaagaattttaaaaatcccaggccgagcatggtagctcacgcctgtaatcccagcactttgggaggccgaggcgggtggatcatgaggtcaggagttcgagaccagcctggccaatatggtgaaatcccgtctgtactaaaaatataaaaattagctgggcgtggtggcatgagcctgtagttccagctgctcggtaggctgaggcaggagaatcgcttgaacccgggaggtggaggtggcagagagccaagatcacaccattgcactccaagctgggcgacagagtgagactctgtctcaaaaaaaaaaaaataaaaataaaaataaaaattccatcagttggttatgagctttttgctttattataagtgatgtttaattgatttttgttttcagattccaaagaaaattccaaaactagttttcatagccagcagatacatttctaagtgcttgggatgatgaatcacataaaatatgtatttttgagagtgtttaattacaatgattgttcaccaattaaataatttccatttatgtttctaataaaactctcaggtaaattataagaagttagtttcttaatcatatgataaatggaccgtattctaaaattctgattaatatttctgaaggattcatgataaggaagcaatgttcttaccaagtttgtttaattgttagatggaaattgtatttgtctgccacctgggggattcatggaaacattgcaattgacaaaattcatagtcacaaaaatattgcaatatatgtgttaatagtgttgtatttgttttatgaatgatgttggctgacacacacacacacacacacacacacacacacacacataattgtgggcaaaaaagtagttgcaaaaccaatagacttgtgttctggatgtcgagtgaagaaaatgtttccaggccggacacagtggctcatagctataatcccagcactttggaaggctgaggcaacaggatcacttgaggccaggagttcaagatcagcctgggcaacaaagcgagaccctcatctctacaaaaaaacttaaaaattagctgggcacagcagtgcatgcctgtagtcctagtcacttgggaggctgaggcagggggattgcttgagcttgaggccacagggagccatgatttgtgccactgcactccagcctgagtgaaagcaagaccttgttttatttatttatttttattttcactgttaagactttgttgtgtgtgtgtgtgtttttaaaaaaaggttccaaaagaagggagtgatcaacttcatcaaatactgctggtagaatcccataagataaagaggactaaaactgaccagtgcatttggcaattgggaagtcataggtgaccaggaaaagagctgttcctggatgttttatagttgttattgctattgtgaggaaatctttctatttatgatttttttcttttttttttttttttgagatggagtctcactcagtctcccaggctggagtgcagtggcgagatctcagctcactgcaagctccacctcccgggttcacgccattctcctgcctcagcctccccaatagctgggactacaggcgccccccccaccacgcccagctaattttttttttgtattttttagtagagatggggtttcaccgtgttagccaggatggtctcgatttcctgaccttgtgatccacccacctcagcctcccaaagtgctgggattacaggcgtgagccaccgtggctggcctacttatgatttttttctaatcatcaatttacattttttgaaacagggtctctctctgttgcccaggctggagtgcagtggtgtgatcatagctcactgcaacttttaactcctgggctcaagcaatcctcccatttcccaagcagctgggaccacaggcatgcgacaccaaaatcagctaatttttaaaattttttgtagaggggtcatgcgatgttgcccaggttggtcccaaacttttgtgctcaagtgatcttcccctcttggcctcccaaagtgctgggattacaagcgtgagctaccacactcagcccccttatatcttatgtgaatatggaagagaatgtcattattcacagaaaatacaaattgaccattttgggattgtcacaatgtctgtaatttattttcatattattctgtgaacaaaacctcaaactgtaatactaaaagactctaggcagaaaaataaaaataaaaaataatctggctccccctgccaaaaaaaaaactatgtacgtaaatacatacatataaagcaaacacactaaaatgttaatcaaggtggtagttatacaggtattcattgcattattatttaaacttttatctctatatttgttaaaaacactggaaaaaatgagggccaggcgccatagcttacacctgtaatcccaacaccttgggaggccaaggcagacggattgcttgagtccaggagttcaagaccagcctgggcaacatggtgaaaccctgtctctactaaaaatacaaaaattagccaggcatggtggcaggcgcccataatcctaactactcagaaggctgaggtaggagaatcgcttgaacctgagaggcagaggttgcagtgagccaagaccgtgccactgcactccagcctgggcgacagagggggaccctgtcaaaacaaaacaacaaactggaaaaaatggcatttgagacaaactttgaaagagtatgaatactgttttaagactttgttgttcttacatcagttcaataaagaaaaatcagaaaacagataaaaagagtaaatttatgtgacacacaatgtagatataaccacttttaatttttttaagctatatacaggttgaggctggatgtggtggctcacgcctgtaatcccagcactttgggaggccaaggccagtggatcacctgaggtcaggagttcaagaccagcctgaccaatatggtgaaatcctgtctcgactaaaaatacaaaaattagcccggtgtggtggtgggagcctgtaatcccagctactaaggaggctgaggcacgagaatcacttgaacccaggaggcagagcttgcagtgagccgagatcgcaccactgcactccagcctgggtgaaagggcgagactcagtgtcaaaaaaaaaaaaaaaaaaaaaaaaaaaaaaaaaatatatatatatatatatatatatatatatatttataacaggttgagtatccctaattcaaaaatctgggccaggcgcgttagctcacgcctgtcatcccaatccttggggaggccgagttgggtggatcacttgaggccaggagttcagaccagcttggccaacatggtgaaaccccttctttactaaaaatacaaaaaaattagccagggcggtggcaggcgcctgtagtcccaggtacttgggaggctgaggcaggagagtggagtgaacccaggaggcggagcttgggagcttgcagtgagccgagattgtgccactgcactccagcctgggcgacagagcgagactccgtctcaaaaaaaaaaaaagaaaaagaaaaaatacaaaaattagccgggcgtggtggcgcacgcctgtaatcccagctactcaggaggctgaggcaggagaatcgcttgaacctgggaggtgtagggtgcagtgagccgagatcgcaccactgcactccggcctgggcgacagagcaagactctgcctcaagagaaaaaaaaaaaaaaacctaaatgttccaaaactcaaaacgctccaaaatctaactttttaagcactgacatgactctcaaaggaaatgctcattggagtatttcagattttggattttcagattaggatgctaaagtggtaagtatatatacgtaaaacactttcatattctgcttttcttcatttaatacggtggttgcctttctgtcagtcatcgtacattagcatcagtttgctgtgtgatattccattgcagagataaatcttgtgatatttttaaccagtcctccattgctggatggtgcaatgaacatctgttaatacatatcttttgctcatgtgtctgattattttaagggtaagatttcagcctgtggaaagggagtaagtgtaagtttgagcagaggaaaggagacctaaaagaataaggcgagtctgggaacagttcactaggttattttagggcattggacccccgtaggcgagaaatgcttgcagacatcttacgatgacgcttaaatggaagagcagtttgagaagatttagtatcatttaattttttattttttattttttttgagacggagtctcgctctgtagtccaggctggaatctcggctcactgcaacctccgcctcgcgggttcaagcgattctcctgcttaagcttcccgagtaactgggactacaggcgcaaaccaccacgcccggctactttttttgtatttttggtagagacgagatttcaccaagttggccaggttggtcctgaattcctgactttatttatttattttctgagacggagtctcgctctgccgcccaggctggagtgcagtggcgcgatctcggctcactgcaagctccgcctcccaggttcacgccagtctcctgcctcagcatccggagtagctgggactacaggcgcccgccaccacgcccggctaattttttttttgtgtgtgtgtacttttagtagagacggggttttaccgtattagccaggatggtctcatctcctgaccttgtgatccgcccgcctcagcctcccaaagtgctgcgattacaggcgtgagccaccgcacctggcctagaactcctgactttaaatgatccatccgttttggcctcccaaactgctgggattacaggcgtgggccaccgcgcccagtcaatctcatttaatcttaatgccaggtactgttctaacacttttctatgtataatttatttcacttgcaggtactattattattcccatctataggccagaaagctgaggtacgaagtttaattaccagagttacttatcttcgttaaaatccaagcagtctgggctacaaacaattatacctactttgcagtcaaggaaccaagctgagatgttgagctgaaaacccaggtctcagacttcaaagctttctacacaagagtcgacggtggcagtaaaaattaatgggggcttgatctatccctcccacccccaagaaaagtaaaaagcaggagctgggaccagagaaaacctccacggagtccttatcccctaaatataagaggcatttaacgtttagcattgctgacctgcaatcaggcttcaactgtgagtagccaggctctaaagcttgataactgaattccaaaaagcgcgcgagcctccaggcgaaacagcttcccgccttccagccggttggagccggctcagcaacagcctctccaagccagggtagtgacgtcagcccaggaattgggcccgccccgggatctcgctgctttctgcacgctcggaataaccagagtcgcgaaattagccccgcccactgccccggaagttaatgcggaagccacacacctcctcctcggccggcaggggcgcagccattttaattcatatytgagtgggcggtggcgattggtgttggcggtctggctcagctgggcagggggtaactttactgatttgggggtggtttttagtttaatttttcytttctagcttcccatcgacggtcagtgcgcacgttgtaatcagctgaggccatgtcaggagacggagccacggagcaggtgaggaaggagagtggtggggcctcgtggcgacctcttctccacgtctgttcctccgactgctccagacatgttcggctgaggaaggaattgggtctagtgaacccgggggacagggtatatagaagagtggtgggaatggggagcaagatctaagatttaatttttttttttttacttctctctcttaggcatgaatacgagtaaatacttgatttagacaatagcggtaggctgcttcgtcctatttagattcatgggactactccagatgggatgctttcctttgatatcgttttggtattagagtggataggaattattttaacgtgcacccgacgttttagaaaaacttgacagtgtttcttttaccccgccaaatatactgtacccagaaataggttactagtttgagaaatatttgagacaaagctaatctggagaattaagacytaatgagagcgagtgaagaaagaagcaagttatgctgaggttttgggaattttgtggctttctttcgttttcttttcttttagycacatttcgttttcatttttccagctacataaacattgcaggtataagttgaaaatgagaagtctgttttggccactgtaaataaaagcatctgttttaatagtaaatatgagtgacaactaaatattttaaaattcacacttttaggttagatcagtgtgatttgtttcttttgctctttgtattcagaattttgtaggatagtatttaccttttagtgtgaaagaggaagctaaatagttatgaaaaatgccattaaatgtgtttttcgatctaagtcctggtgtgtttagataaatacagtttctaaaatggaggctaggtagcctgcagtctcaatttcctgaaatttcccattgccatagcaacgacatgcacttaggttttcgtttttcaggttccctagcttataacgtggaagatgttattggaggttggcagagatgaggcaaaataggagcgttctattgcatagtctgtaagactgtagatttcattatgtcggcagtttgattaaattgttttgtgtttgcccgaggactggtttcagtccagaaatcttcgcactatttacattttacatagtgttagcatgcccaagcatgcaaagtcttaaaattactgtatcaaaactgtttaccccttttctgatctagtatttgttatctgaaagtgaaggactaatgaactgaggtttcattgaaagttttcgaaattcattgttaattcttagaatttatctaaaattacaaagacacggaaatgttaccatgacctcttgaatgttttagaactgtggtgtttcagtgggacagatggtggtgaaaatttatagaaaaataatttctcccaaaggttttattgtgcaaagtttagaacatagagaaaagttgaaagaaaagtgcagtgaacacctgtaggacaactcttcgcctggaatcaacagctgaaagccttgccatatttgctttatctccccatgctgatagattgagaacagagtctttgtcactcacactagagtgctgtgrcgccatcacagctcaccatagcttcgacctccctgcgctctgtgatcctgccacctcagcctcctccgtagctgggagtacaggcgcgcgccaccatgcccagctaattttttttttttttttttttttttttttgagatggagccttgctctgtcgcccagactggagtgcagtggcgcgatttcgccttactgcagcctccgcctcccggttcaagcgattctcctgcctcagccaccccagtagctgggattacaggcgcccaccaccatgccccgctaatttttgtattttaagtagagacggggattttgccacgttgcccaggctggtctcgaactcctgacctcaagtgatccgcctacctctgccttccaaagtgctggatttacaggcgtgagccaccgtacctggcctratttttgtattttttttgtagagacaggaattcaccatgttgcccagcctggtctggaactcctgggctcaagcgattcacccacctcagtgtccccaagtgttgggattacagacaggcacgagccaccacgcctggtccacgcatgtttatttgaaagtattttgacacattgcagccccaagtatttcagcattctcttataaataagagcaaaatgttgttacataaccaccataccatttccccacccaagaaaatagtatttctaaaatctagttctttaaatttccccatttgtcccaagaatgtgattttttttttaaccagaatcaatctagatttacatattgaatcatttacttctgtctcttaagtagtctcaccattcttctcccctggggctgttgtctattcgaagtgtcaaggacacttaacactgcttttctgggtgtatttgttttttgttgtttgtttgcttgcttgcttttggtttgggggttgatgatgtcatttaacttgtcccttcatctgtatttcctgaaaactttacagttaggtctatactcagccttgatatttgggttaagtatttttggatagaatacttaacattatatcattacattagcaggtacttctgctgggttctgttaggatggttaagtttgatcacttggtttagggtgatctcattgttaagggtcatgttcccctttgcagttaataatctgtgagttgataaccgttttctttaaaatcaccttatacctagttatcaattgataaatcttgactaaatcagctcttacattggaagtagcaaatggtggttttgttttgtttttaaaacccacaattctgttggtctgtgtctgtttactggctcatactttctgcaaaaaagactttttttcttcctaaagattaagtatcgctatggattcatggatttctcttagtgtgttagtatcagtgatagccatttttcttttgcacactcaacttgtccaaacctttttggtggttcttatatcttttccttaagtctgaaaggcaatttagacatctgattatcaacaaggaagycatcttcatatagccttttctttaactttttaataatacatttcaaacatgtaagaaaaacagwataatatatgaagtacctgtcatagagcttcaatttatggctaatcttgtttcctccatgacttcatttgcttctctcacccccattacttcgaagcaaatcctagatactgtattcagcttcaactaaaataaccattaaataacaccttaaggatggaaaatatgaatgagctgtaccttgcttgatatttaagacaatattgaaaatctggaggaaaagagagtatccaaaataacctgaaatcatggatgagaaaaataaactcaatgagactaaagaataataagaaaaaaattaaaaccattgaatcatggatttgctttggaaaaatgccaagggatggggtggacaaagagtcctacaagatgcaggtgtagatttagccttttagtagcattgaagttcaagtttgtagaataaacctgatactatcttaaatttattactaaaatatatggatagtcatttttctcttggtgctaagatttgtgatttgtgccccctaacagagggaaattattgcagacaagcaaaatcactgctaaaggtttattgctgtgatttttttttcaactctagtagggaagttcaattttgcatgtagagagctattggaattaccttatagtgttcaaggatctcttctgaagctccttgcttattgtttttgccagtttaatggtgaaaaaactatttgcatataggtttacccccctaacaaacatatgatttctgtgtggaattatggctgtattatttatttcatggttttgtttttttgtgtttgttttttgtttttttgagatggagtcttgctctgttgcccaggctggagtgcagtggcacggtctcggctcactgcaacctccgcctcccaggttcaagcaattctcctgcctcagcctcttgagtagctgggattacaagcacacgccacaatgcccggctaatttttttgtatttttagtagaaatggtgtttcaccatgttgaccaggctggtcttgaactcctgacctcaagtgatctgcctgcctcagcctcccaaagtgctgggattacaggcgtgagccactgcgcccagcctgtggtgtttgttttttttaatgcctgattcaacttttgatctcattcttaggtctatttaaccttgtgcactactcttaaggcatttaatatgctgttatttagacattttccattgggttttgaacttctttagttgaagagatgatgttattcatctttatgtcttaaagacctaagaaataatattttgatgcttaaaggtattcagtaaatgaatggattaagtttgcatcttttaaaaaaaattatttatttactatttaggtagagacgaggtctcactgtgtttcccaggctggtcttgaactcctggacttaagtgatcctcctgcctcagccttccaaactgttggattacaggtgtgagtccagccatatttcaccttttaaataatgtataacttatcctagaatttggaaggcctaaaatacaagccaaatgatcctcagcttggaaaagctacatgattctaagaagcgcaaattaattgctggtagttcttaacaaaggagcatttaggctcataaatacgtgtttttagtgaaaaataattttgggaagatttagaaaataatgaagagtatgtgtcctattatatacttattattaataaggaaagaaaaagttgaaacacccacagcattgaaacctgaaacctggtttatttcgttaggtaaacattagtacttaagctgtttagaagtaacagtatcgccaattttagtcaaggtgcatatatgtgtaggggttagaagaggcagagaaagagccaactatgtgtgttggacaatgtgtttttttggatttattttttccaaaatctttctgtaacagcccttcctagttttctgcctcctatttttagtgatgcttgtttggtgtaacagttttgggcaggcaaattgatttgatctttattgttgatatttcttaggaaactggagcattatcaaatattctgtttggggacagttgttcctaagagaagttgctctgtgcttaaagaatgagaattgggtttttcttagagatacagcagaaaggtactgtgttaggtgatactgcattccttcaacattatttcagggaatgtaggcatttacatcccagatagaccttcagaagggcaaaatctgtatttgggtgtttttacctattggacaattacccataccaattcatgattttaagcttttttttttaaatcttcgatttggtgayggtgattttaagcttttctaccatgtctctgaatctttctctttagataggacctacctgtgaatttgagtctttttgttttgttttgttggacagttggtaatggtgtgagaattgggctaaaaaagggatttgagttggcagttgtttaaactatctttagattaatggacaacttaggatacatagtaaatattgaataaaatcagaagggcaaagcttctgtgtgtcctaattaatgtttttctaatgtttgacttagtttatttagtgtattaaatctggattattcatatttgaaagaagtctcatcttttaagttccaaacggttaagattttaatttatattttgtagctatttgtttcctaggggatgaatatgcaagtttactaagcagataatggtaaatataattatttgaactaatatgttaagccaagatcttttttttttttttaatttttttatttttattttttcgagacagagtcttgcactttcgcccaggctggagcacagtggcgcaatcacggctcgctgcaagctccgcttcctgggttcacgctattctcctacctcagcctccctagtagcggggactataggtgcccgccaccacgccctcacgcccagctaattttttatatttttaatagagatggggtttcactgtgttagccaggatggtcttgatctcctgacctcatgatccgcccgccttggccttccaaagcgctgggattacaggtgtgagccaccatgcccggcccaagatctttttttttttaagtttttgagttgtttgtatgtttagatttttaatctatggatgatttggagggattagttttgtattgtaggatacatgttcagtttcattcacaacaaacatgaagtagggtttggttgcattggtaaaggaacacagaactaagctgacatctggtcctaatatccggtctcattgtgacacctgtcacatatagttctttattatctgggcatatgaatggaatcagttaggttactcctctatgaaagtctcagcacggcaccgtggctcacgcctgtctgtaatcccagcacttcgggaggctgaggctggcggatcacttggtcaggagtttgagaccagcctggctagcatggtgaaactccgtctctactaaaaatacaaaaattagctgagtgtggtggtgcatacctgtaatcccagctacttgggaggctgaggcgggataatcacttgaacccgggagtcggaggttgcagtgagccaaggtacagccactgcactccagcctaggtgacagagtgagacttcatctcaaaaaaaaaaaaaaaaaaaaaaaaagtcttacggagtgctactccggtctacttttaattttgaaaaaaagttaaccacagagagagacttaagacttcaaatatatagtatattcagttttcttaatattttagcaaaaaattcacttggaatgacaggtttgttgccaccttatttttaatgaaacgtgacatttggaaaacatttgtggaacagatagatgaggtggtacatatttcttaaagtggagcccatggcccatttatgtcataattaggtgcgttataaaagtatagatacgtagactctgatttcaaacctaactgttcagtggggctgagaatcttcgtttgaaacaggtaccacagtggtttttatgtcaataaaagcttgcagaccacagagttagatgatagctggttgttttaaaatatattcttgataaataagtggatgaaaaaatggcagatatttgaggatggtattttactgatttttcctgcccacctgctccccacccccatatatttagttattaccctgaatagcgagaaatactcattataaaaccagggttgaggctcaactctgctttttctgttggtcatagtaaaaagcttacatcgtcttaaatctttcartctaccatctttctccccctctattcatacttttgtgttatcactttaactgatccctactttaayttaatttcartatggctcctaatataacacccttctaatttatcatgaaagtagctatttggagaaagagaattatctttttttttttttttgtctgttttacctgcatggtcgaaatggaagaaattagattattattattattgttattattactattttttttagagatgagatcttgctctgttgcccaggctgcagtgcattggcgtggtcatagctcaccacagcctcaacgtcctggcctcaaggactcctcccacctcagcctcccaaagtgctgagattacagktgtgacccactgtgcccagccttaaattatattatttcagtcattaacatgatagtgtctgtcacctcttcacatcccaccttcccattaacaacctcctaataaaagttatgagctcatatagaaagaaagtggttaggagtttcaataaagcataactcatagggctttccagaggctacatcacctatccacaattgtatgtaaaggctgttaaaaatggtctttcctcccttttccaactacgtaactgtgaggctaaaattttttcatatttttcatctaaaacaatatattgtaacagattgaaagaagcagataatgtcttctattcagccagacatttaaaagatcatgaaaatgtaaaatggtgccattcttttgacttttttttttattttggaaaatttccttcagtaaaatatttatattcatatttaaggaatttattatttttaagtgaattaaatactttaattttttgttttaatttcttatgtgagtaatgatagaatccctctgggctcctcaattattattgttatttttttttttggaggcggagtctcactcttgctcaggctggagtgcagtggtgcgatcccagctcactgcaacctccacctcccgggttcaagcgattctcctgcctcascttcccaagtagctaggactacaggcatgtgcccacacccagctaattttttgtatttttagtagagacagggtttcaccaaattggccaggctggtctcgaactcctgaccttgtgatccgcccrcctcggcctcccaaagtgctgagattacaggcgtgagtcaccgcgcccggcccaagctcctcagtttttaagaatgtgaagcaatcctttacaaaatgtttgagaatagttggaatagtacatcatgtctgtgaagccaagattgtaagttctatttctctgagttagttagcttcacataacagacggttaaacatggaaagtggcaaggcatcccacagaataggatacagtttttgtaaatcatgtctgataagggatttgtaactccaacatgtaaaaattcattaatgaaaaaacccagccaggtgcggtggtgcacgcctgtagtcccagctatttgggaggctgaggcaggaggattgatcgaacccaggagttcaagtccaacctgagcaacatagcaaaactatacctctaaaaagtaataataatacgtccagtttttattttatttatttctattttttcaagacatagtctcgctctgtcgcccaggctggagtgcagcggcacaatcttggctcagtggaacctctgcccctccccgccggctcaagggatcctcccaccttagcctcctgagtaggtgggattacaggtgcctgtcaccatgcctggctaattttttgtatttttagtagagacaaggtttcaccatgttggccaggctggtctcaaactcctgataagtccagtttttaaatgggcaaaatatttgaacagacatttctccaaagaagatgtacaaatggccaataagaaaatgaaaagacgctctactttgatagccatcagagaaatgtaaatcaaaaccacaatgagatatcacttcagacccacaaggatggctgtaataaaaaagataatatcaaatgttggtaaggatatggagaaattagaaccccttatactggaaatgtaaaatagtacagcccctttaaagtctggtagtttttcagaaggtaaaacataagagttaccacattacttagccattccatttctaggtatatatccaagaaaaaggaaaacacacaaaatgaactccacaaagaaatcttacacactaatgttcatagtaacattattcataatagccaaaactggaaacaatccaaagtccatcggctgatacataaacaaatgtaggatatgcacataatggaatattgtcaaaagtaaagtacttagtatatgcaaaaacatgaactttgaaaacacgctaactgaaagccaaaacaacgccagtcatggtggctcacggtggtaatcccaacactttgagaggccgaggcaggtggattgcttgagcccaggagttcaagaccagcctggacaatatggcaaaaccccatctctataaattataaaatttagctgggcatggtggcacatgcctgtagtccattatcgggaggtctaggtgggaggattgattgagcccaggaggttgaggctgcagtgggccatgattgtgccactgcattcgagcctgggtgacagagtgagatcctgtctcaaagaaaaaagaaaactagaaacaaaaagaacacatattgtatgattacattaaatatgggcacatccctagagacaaaatagattagtagttgcccagggcttagggattggagggaaatgggagtgactgctaacaggtacagatttctctttggggtgataaaatgttttaaatgtgtgatggttctgtaaacttgaatatattcataaataaaaactattgagttatacacttcagatgggtgaattgtatgtatgtgaatcatgtctcaagccagtactaaaaaagaaattataaaagcttaaatacataatatgcttattctactttcaaaccttttttttttttttgagacagggtctggccctgttgcccaggctggaatgcagtggtgtgatcttggttcactgcaaccaacacctcctgggctcaagccatcctcccacctcatcctcccaagtagctgggattacagatacctgccaccacacccagctaatttttgcgttttttgtagagatggggtttcgcaatgttgccaggctggtctccaactcctgagctcaagtgatccacctgcctcagcctcccaaagtgctgggattataggcgtgagccactgtgcctggcccccctaccttctttcttttagccagttgtacatggttgtgttattcacagagaagataaaattaagtcattggtaatatgtatgtcttgataactagtccagtttttgctctactcctttgatttggggtccctgcctgttccccattaacatcrcctgaaaaatgatattaggattatagattattatttcagaagcaaaactggattttgatagtttttgatagtaataagtttttgggatgcataagcatgggacagctgttcttgctacactaagcagtttgttacagaagggcattggaaacttgccctgttttcttttttcttttcttttctttttttttttttttttttagtttgagacagagtctccatctgttgcccaggctggactgcagtggtatgatcttggctcactgcaacctccgcctcccgggttcaagcaattctccggtctcagcctcccaagtagctgggattacaggggcctgccaccacgccccgctaatttttgttttgktgttgttgttgttgttgttgtttgtttgttttgttttcaagacggagtctggctctgtcgcccaggctgcagtgcaatggcatgatctcggctcactgcaacctttgcctcctggattcaagcaattctcctgcctcagcctcccacgtagctgggattacaggcgtgtaccaccatgcccagctaatttttgtatttttagtagagacagggttttaccatgttggccaggctggtcttgaactcctgacctcaggtgatccacctgcctcggcctcccaaagtgctgtgattacaggcgtaagccaccatgcctggccaatttttgtatttttagtagagatggggtttcaccattttggccagactggtcttgaactcctgacctcgagtgatctgcccgtctcggccttccaaagtactgggagccactctgcccagcctgttttcttaaaatgacctgttctggcaacagattcaggtaataatacaacttcattccttatggaggcccagtctctcttttgggtactacaaaactgttcagtttttctttgcccagtagcattatggtaaccaggccagaaaacaaaaatgcttcactctcagcgttggctacccaagtggttcatagctgttatgttaaaaggctttttattgtgagaattaaatgtgaccataaccagcaggatatgctcttgagcattctggttaacttccattgttaattaatgcggttgattgagaatcacatgtatagattgtgttacgaacatttgactactgaggagctaggccagaaaaaaacatttagtgatgcaactgatacttctgctaattccccaggtatctggatagcattttagggattctgtgaaattggatgggggaaaagactttcactaatcgctaactgaaattgagcattcccttttattattaatgtaggccagaatttacagaggtaatagtgttagcagcagcactcatcactcatgtagtgaattggcccctaaagcttgttatttgatgtattaagtatatattactataaaaaacctctggagcaaggagcggtggtacacgcctgtagtcccagctacgtgggaggctgagacaggaggatcactggagcccaggatctctagatcagcaatgtagagagagcctgtctctttaaaaaaaaaaaaaaaaaacacagcaacagtacacacacacatgctttttccttggaaatccctcagaatttatgtatttaagaatattattctgagaaaaggctcataggtttcactagactgcagaaagattctgtggcaccaaaggagcaaccaactagagagcatagttttttttttttttgagatggagtctcctctgtcacccaggttggagtgctgtggcgtaatctcggctcactgcaacctctgcttcccaggttcaagcgtttctcccacctcagcctcctgagtgtgtgagactacaggcacataccaccacgcctgctaatttttgtatttttagtagagacggggtgtcactgtgttggtcaggctggtcttgaactcctgacctgaagtgatccacctgccttggcctcccaaaatgctgggattacaggcgtgagccactgcacccgatgagccatggttttcaactaggactgctatacgttagaattacttgaaaagtttttaaaaaatattgatagtatgtacattcctagagattcaggtttagttgattgagggcgaggcttggacatcttttaaaatctccttcccttaggtgattctaatgcagagccaggattgagaatcactaaagggctggctcatttgatgtattaaggagacatgtatacrtcttattgtgattatgcttggttggatatcagattctatgctcttcagtttgtctcttttacagattatatggtataccttacctgatttggtaggttaatttgagcaagtgggtcttgagctccagaatatctatgaacactaaagtaatttaaatagctctctaaatgcaaaattgaccttgtatcaagagtaaaaacaattatagcagtaaaccttggcagtgattctgcttgtctacaatcctttccctctttcagagggcaaaaatcacaaatcttaataccaagagaaaaacgaccatatgttttagtaacaaatttgagattatatcaggtttattcttcagtgatactgaaaggctaaaagaaatcgacaactcataccttgtaggattctttgtctatcccatcccctggcatttttccaaagcaaatccatgattcagagtggttttgggtgtttgttatcactgattacctaaagcagttcaagtatagatgaactgttttttggttcccatatcagttttatttcttagttaatcgttatcattttatagtcggtatctcaagactgaaattctagtttacgtaaaatttcttttttttttttgagactaagtctcactctgttgcccaggctggaggctcactgcagcctctgcctcctggtctcaagcgattctcttgcctcagcctcccaagtatctgtgactacaggcacgcaccaccatgcctggctaatttttgtatttttaatagagatggggttttactatgttggccaggctggtctcgaactcctgacctcgtgatctgcccacctcgggctcccaaagtgytgggattacaggtgtgagccaccaagcctggcctctttctttctttttttttagagacagtgtctcactgtcacccaggctggagtgcagtggtgcagccttagctcactgcaaccttgaactcctgggctcaagagatcttcctgcctcagtgtcccaggtagctaggactgcaggtgcctgccaccacgcctggctaagttgtttttgttttgttttggtagagacagagtctcactgtgttgcccaggctggtcttgaacttctggcctcaagcagtccgcctgcctagtagctagggctgcaggcacacaccaccatgcctggctaatttttatattttttgtagagaccagtgtctcactatgttgctcagctgctcttgaacttctggcctcaagcggtcctcatgccttggcctctcaaagtgctgggattacaggcatgagctaccatgcctggcctaaaatttcttttaatttttttttttttcaagaagtaaacccattgaaagaattctttattttgttatgtatcccaagggccactacaatgtctgacacatactaggcactgagtgaatatttctcagacraataagaaaaattcaaacaaaccagaagggtatatggcagagtaagtgtatgtgttgtttgcatgtctccctgctcaccatcactttttattttccatgtggctacctgccatgcctttttttttttttttaagtgactacaaattccataatttatttaattggtccttttttatatgtatttatttaattttaacaaatagagacagggttttgttctcttactcggggtagagtgcagtggtgtgattatagctcaccgcatccttgaactcctggggtcaagcgatctttccaccttagcctcttgagtagctgggactataggcatgcaccaccacatctggctatacatagttatttaatttattttcagtcttatgtaactatagtctagtagctgactcattatatatctttgtgtayatgtgcagtagggtgttaatagaagtggaattcagaatcggacatttatattaaacgttgatcagtttctttttttctttttttttgagacggagtcttgctctattacccaggctggagtggagtgcagtggtgtgatcttggcttactgcaacctctgctgcctgggttcaagcagttctcctgtctcagcctcccgagtagctgggactacaggtgtgcaccaccactcccagctaatttttgtatttttagtagagacgggggtttcaccatattggttgggctggtctcgaactcctgacctcaggtgatccactcgcctcagcctcccaaagtgctgggattacaggcctgagccatcgcccctggccacattgatcagtttctacttgcccttgctaacaatatgagaatatctttttctgcttaccctcaccagtgcaatttaattataaaatgttggatctttgttttctggtttatatttgcatttcttttttttgtttgtttttgagacggagtcttgctctgtcatgcaggctggagtgcagtggcgccatctctgctcactgcaagctctgcctcccaggttcacgctattctcttgcctcagcctcctgagtagctgggactayaggtgcccaccaccacgcccagctaattttttgtgttttttagtggagatggggtttcaccctgttagccaggatggtttctgttctcctgacctagtgagctgcctgctttggcctcccaaagtgctgggattattacaggcatgagccaccgtgcccggccaatatttgcatttcttttgagtctttaaaaagttaattataaactgttcatatgctttgcccttttttttatttttaaatttttattaaaaaatgtttttttgacacagagtcttgccctgtcacccagtttggagtgcagtggtgcgatcatggctcaacctcctgggctcaggtgatcctgccacctcagcttcccaagtaggtgggaccataggtgcatgccaccatgccccactaattctttgtattttttgtagagacggggtttcgccatattgctgaggttagtctcagactcctgggctcaagcaatcctcctgcccacccaccaaccccaaagtgctgagattgcaggttgagcctctgcatccggctgcattttctttttgaaccactggtggtttattgattgtactttaataaatttagtatttttgtcatgtgttggaggttttttttacgtttgtctttttttattttggtacttttctcatgcgcaaattttaacttaccatgtaagtttactctttaaaggcttttttttttttaaagacagggtctggctctgtcacccaggcccgagtgcagtggcggcaatctcagttccctgcaacttctccctcccgggctcaagcgatcccaccgcagcttcccaagtacgtgagactacaggtgtgtggcacacacctggctaatttttgtatttgggtagagacgggattctgccgtgttgcccaggctggtccagaagaacgcctgagctcaaggaatcctcccgtctcggcctcccaaaaggcttctgaagagcttttccaatgcagaaatacatttaaccgtattctgctctagttctgtcttgtgttttgtttttaacatttaaatctttgatctctcttaagtttatttgggcagaaagagtaaagtaggaattcaactttattttgataaaattgacttcacagttattctaacagatgattatatagttattctgaaaccatttattgaaaaattcaccattctgatttgaacatgccacctttattatttgctgattttccatttgctgttctttctgagcctgtagtttcatatatgggwagagccaatagtcccttataaactttacagctttagttccttgagcaagctattcataaagttcttatatgttaggaaagcatcctaattttaattttgaattacagtagtcaacatgtctttttttctaaataagtaaatgcttaccagtggtgcaagctaatttattccaaagaaaagagtttatttctcctaggtaattaaaaaaatctgaacagatactttttttaaacttttccaaactggtgttttgactgaattgttccatgaaatactaaaaaaaaagggggagtggtgggggagaaaagtgataggggcagtgcttccctctttatgctcggatattatcaatatatattgccatttatagatgtcaggatgtcctagaaaaaaggcaaaacaaaacttcatataaattaacttttttttttgagacgtagtctctgtcacccaggctggagtgcagtggtgctatctcggctaactgtaagctccgcctcctgggttcacgccattctcctgctttagcctcccgagtagctgggactacaggcgcccaccaccatgcccggctaattttttgtgtttttagtagagatggggtttcaccatgttagccaggatggtcccaatctcctgaccttgtaatctgcctgtctcagcctcccaaagtgctgtgtggctttgtcacccaggctggagtgcagtggcgcaatctcactcacagtaacctctgcctcctggattcaagcaattcttgtgcctcagccttccaggtagcagggattacaggcacacaccaccacgcccagctaatttttctgtttttagtagagactgggtttcamcatgttagcckggctggtcttgaactcctggccgcaagtaatctgcctgcctcggcctcccaaagtgctgggattgtagatgtgagccaccacacctggcctgtataaattaacatttatctggcttatttgaccatccctttttgtggtacacagtagtattctgaacaacaatttgagaattaatacttttatttttgcttcaagtgctggctactattttaggcatttttttcaaaaattaaatttctataataaaagtaaaactaccttaccaaaggatttggggaatattgaaagaaaagggraaaaaaaatcagcctctaattctactgcttatcttccaaggatgaccagtctaagcatttgaatatattttaaaaatctctttaattgcagatttcttttatagttttcattgtattgtacatacaattgtgaattgtgtttttaaaatttctttacatcgaaataagatttccatgtcatttcatgcattttctttgtggcgcaggatgaatgctttaacagcagtgtttctcaaagttggtccaggaaccccaagggttcctaaggactttcagaggatctgtgacttcaacctctctcataataaatctaagacattatttgccctttttcactcctaatctctcacgggcatacagtggaatttttcagcatctgtatgatctgatagggcagcagattgaatacagaagcagatgtgaaaattcagctgccttttaaaaagtcaaacattgaatggatttataaatacgtaaaaagcgacattcttattactgaattttaagttattttttataaagaaaaaacatgtaaaaagttttatttgtaaatcaatcaatatttaaatttgttttaatttctaatatggtaaatattgataaaacccacataaaagctctttgtggttcttaaattttaagagcgtagaggggtcctgagaccataaagtttgagagctgctgttttatagtatttaatacaaaagtaagtttatttgaataaaaaatacttgatcacttggttttattatctttatgcaagttacttctgattacaaatacaatcgtccctcagtatctgtgggggattgttgccaggacacccccttagataccagagtccatgtgtgctcgtgtctcttatataaaaataatgtatttgcatatagcttacatatgtcctcccaaatacttaactcatctagattataataacgtcatataatacagatgccatgtaaatagttgttatactgtgttgtttaggaaataatgataaataaaaaggctgtacgtgtttagtgctgtcttttttttttctctctgagtattttcaatccacccttggttgagtataaggatgcggagcccacagataaggaaggacgattgtacacatcggttctaggaaacacacttctcttttataagaggatatttttatgctttgtaatgtgacattgcatctgaggactttattgttcatgaattaagttaggcatgagatttttaaaacagtaactttagttcactgttgttttttttccccaggcagctgagtatgtcccagagaaggtgaagaaagcggaaaagaaattagaagagaatccatatgaccttgatgcttggagcattctcattcgagaggcacaggtttagtgatataggattacatttccttctctatgggtccaatcacactacttggttctgcagtgaataatattttcataatcctaacattgtaaatgctgtttattggttttcaattttagaatcaacctatagacaaagcacggaagacttatgaacgccttgttgcccagttccccagttctggcagattctggaaactgtacattgaagcagaggttactattttattttattttttcttatatcagtattgcagcattcactgtagtgatagaaaacaagttaggaacatagccaattaggacaaggaggatttaaatgtgtcttacctttattttgtaaaataggtataaaggagtaattaaaatgaatttttgaaatttgggtcttttacaagctgatgattgttgcattttggagttgcaacaacattaaaacagtttcaatggtattggagtgctttagccttttatttacttgtcatgtgtcaatttattgcctcctgtgtcatttatttagaactcatttttctttttattcctacttacaaactaatatgaatgggagtatatgaaaatacagaaatgttaacttagtttttcatagagtattttgagtgtctggtgaaatgaaacattttaagagaagaattacttcacattttaattttgtgaaaatgcatggtttatcaatgtaagcacttcaataatttaacgatttttctgtaagatagtttatattatgcaagaataagctaatgtgattcaaacctatttaatcctatttaatcataattttacccaatgatactttgatatttttttcttgctttttatatcttgaaatttgaacccaggcatgtatattttaaagagtaaggaccccattcatgattatggttaggaggaaaatgttaatttttgaagactggaattagtaaaaatgataataaaagttttaatgtgtcaataacaattggcaccaagtagtcattttcaggttattaatataaattaatgatatggaaggggtaagatgtaaataactgatatccacattaagctgaaaattatacgcatttctttttgtaacttatgcagtactcttatttttaatattaattttgtgatatagattttcagcataatcaagtacactgcagcctcaacataacattttctgctgtacctgaaatttgataatatttaggtctgttttggacctattcaaagggctttggtcatcagcagtactgaatatacttcagcacaacacagtgtcatctgtgatatgtcctcagaatggacccaaccaatagcagatttaaatagaggctacagtgtactcattgtatttgtgctatagtttagattgtattacttggtggggagggaaattactggataatagcaggaacaytgtgtgtgttttatttttgtgtgtgtggttgtgtatgtggtatgtatgtttgtgtgtttgtatgtatgagagagattgtgccttatgtggagtctggtagttttggcccatgaccataccttaaagtttcatcacctatcctctgggaccatttctttccttaatatatttaaatcaccaaagtagcttggcacaaaacaggtgaggcctgtctgaaatatgctgaagcccgtgctgctttgtattaactcattaaaacaaggaacctggatcacctgcacctgatctgcattctagtctggctttagaaacacattagacttaaattcaaacgcaccagaaatgaaaataattgatatataattgtttttgtatagtgaagtagaactttctgagtttttgaaatttccttgtttctcaattattcaggcattattcatgcattttattatagcgtaagttaaactgaaataggcagttagatactccattctgtaactctgaacacaatgggtttgtttctccaatttcctagctgtaagttacaaactgcatcctaaaaaaaagtttcaggaagaccagatgttattccaaggggctgaaagttgtctacataacaggctcaattcatataatgaaatgaagagctgctagcagttgcctgatttatttagttggtaatatttgcagttacttcacacacacaaacatacacacgcgcacaaataggtatatataacatgtattaagaacaaatggtaaataatatatatgtatattttttaaaatttatatttttggtttaggaattaaggttttaaattgaatgctggttttagaaatgcatatcctgagctgtgtttttctctttcctggtttgctgtttattttttattttcacattctatatttttgtttagcctgtgagaggctaaagttttctttgatcatatcactcaatgtggccattaatatttctggagaagacacaaacctatttataatactttttaaaaatccgaagtgataataagaatgtttttacattgaaagtaatacttaagtgtttacataacattctgtatgcactcaagaaaataaagttttgttaatacatttgttgtaactcagtacttcatggtgggaaaattgtaatgttcatttctttatattctgctaagccaacttgtgtgactccaaatacctttttttaatagaaaatacatacatctttagtaacggaagataatttgcttccccagagaaactccttgcaaatcctatttaagtacaaaatgtcaaaggaaaaaagtattaaactttttaaaaaaatttgaaacatcagttggaaatgagagcatattaattacttttaaaaaaggttaatgatgctgctatatgagccagtgcatcagatttgctcataactgagagttgagcagtatctatttagctatgtaaaatttggatttaaaatgtcattctgaatttgtcacatgctttcatttttttgctgtagtgtggaaattgttggaggtaaaattatcttgctctagtgaatggcatttaggacaaacttctgtgtattcttaatatataatttcaaaaactaggccaaattactttggtgttatatataatacataggagataacattttgcctccactccctgaaatacattgttctactctttattccaaaactgctaggtcacatgatttaacagtattattataagatgagcaagtcattaattgtatgactattcttaaagtgatagttatcaagtataaagtttaaatatcactatgatatgaaagtacttttgtgacttcttagtttcaaataaaggaaacatttaaatatgtctccagctatttaatcggataaggatatcttaaatgcagtttagtatatttttggatttaataaatgagaggttttaaacacttgagttaagtggaatgccccagtcagagcctcagtgctctttaaagaactactttttacaatgatcaaaaaggtcactaaataatcacaaaattgagaaaacctacagaattttgacatattcttttaaattgttctgccccacccagcctgtggtttctgtagcttttcatgtaattaggtgatgagtgacaacatgtaagctacaatatcttattgttagagaagtaatttgttttgaatcgggccacattcataaggaatttttttactgaagcatgttttttattggtggctgaaggagaaatgaagaaggtaatgctgctggtaatagcaacgatgtatcttgctgtctgtgaaagctgtatttctttaataaaagcatatagagaattgattgttttatttaaaatttttacaaaagatgaattcttttctctatacttggtttttccttccttataaataatgggttgtgtagcatacatttcagtttttcaaaatgacctttcttcttggaaaatggaagtgaactcaggatgcaacatgagtgtcctaaattgaaataaacttttccactgttgatactgttttaatacctttacatagcaatttaaattactgtattataatgttttctttctgttgagcaatgtgattttaaaatgcagatacaattactgcattatatagattatggtgatttctatacttcagcttgcagcctttttaccaaaaaaaatctgtactcttttcttatagatctacacttttcctgtttgtaataaatgttggtccatgtctgtgtgattattcagatttttactttaaaactcaatatgcttttttatctagtttcttagatgcatatataaatgtagaatagagatgtattacaagaaaaaagtacttgtaaacagaactgagtgataatctgaaagtgctttgaataaagtactgtttgataagcaaaggaaatatttgcatgttgactataataagtagtaaactattttaggttttattgaattatctgattccatcccttttccctatccattctataacagagatgtttagatgctgtcacttctactaacatggtctatacattttttcccttgggactttttttctcagccaaagcaactactttcaaaaggatgtagtcacttagataatgacatttctttaaataaaactgtatgttttctaatctttataatttctagataattcttttatgtgaaatgtagccatttattttcaagcaaaatcttgtgctagtcaacctgattgcctatgtatttctcagctttataaagcaaaactaatctctgcagtcattagtaaacacattgaaaatatatggtcattttctttaccctgcaaagactcttacgttttaaactcagcttctttatattctattctttggtgtaataagagtcatgatatattctgaaattgtggaaaaaggtttatgataaaaaatgcatatacattctaaaattaatggtgaaacaaaaaggactattggatcagacaatttgaagtttttgggggaggtagtaatgttttacctaaatttcctagacattcatggaataacataataatatgtaatacctaatacttagttgttaaaaatattgggtattatagtcattaggatcataggggataattttggttcaaaactctatccctgtcccaaaaggtattaaagatacgctgcaacgtagcatccatgaatcaacacaaacatgtaagcccctcataatatcacagagctagaaacctccatatttggaaataaaactaattctaacacatgagactttttacagtgctgagcatttttggttataacttgagctcaggggaatcaggtggcaattgactttcctttataaaacaaaaggaccagtttaagtcaaaagcttaaatattttctaatggattgtttgtattttctttaacgcatcagctttgaaacagctattcctttggaatgagtctggttcaaggcacttccaggaaatgaagatgtctaaaatattaccagtgacatctgtaaaaagttgcacctctaaataaatgtggacaatgcatttattagttgtaacttattactttcaattttattactttaattttactgaatttttaaactttaaattttattattaaaccggtttgctcctagcaacttggtagcaraaaacaaatagttggtttgtataatggcataataggttgaagtctgcatctagatttttttcccccacataccagaatccacaacagtttgaaaaaaaaattgtgaatatttgctttgaatacaacttcttgagaaactcagctgcttttctaagactcaggaaagcataatgtgggtaagttttaccattttgtatgctagacctccaaagaaaaattttctatttgcaagtgttaattaagcaatagttctaaagacaaattgacatcagcgataggattcaaatgtagttttgaaatagtacattgcaccgtagtaagggtcaaagataacaagatcccaaagctgtttttagtctttctgaaatgaaatctaaatacttctattcatgtgacagaacatgttcagttacaaccttttatttaaatgcaacatttcagctctagcatgtactgttgacgttttaagtcttcctttgtcctaagattcatattctgcaacttttcatactggatttgaagaaaaaagaaggttggctattttgtgatgatggtttccctggaaattttttcattcaccagactatgactactgtacattttacatatagttgaagtggacataatgttttaagtcagaaatttttagagctggaagatgaattagtttagccccctcattttatatgtgagtaaactaaatcaagacattgttatccctggagccaaagtttacaaacttcactgctttagaatcacttggaaagcttttaaagcatacaagcttcccagttagcataccagcactgctgactcaatctctagaggatggacatatggtatgtgtttctggcagctagttttgggaattgaggctttkcagggcagtaattgaatcttactgctgtcagtaaattttatagtttgcagaatatttcctatacttgcctggacaataaagtgattagtctcctggcttgctttttgtatataatcgagtgatctttgaagcatctactatgtgcttagtatattgtaactgttagattcacagtcagggtcagggttagggttacgctgttttaactgtaaccgtttttttactaactgaatttattcctgggtttgaaaactgattttctggttgcataaacttttttaaaaaagacagtcacatgagtgccaaactaagaatcagataacctttaaggacacttcaagtgttacgggagaatcatctaagctgaagaatgtggcttaaaagaattaactgcagctaacttgtaccctgtgtagagtttgaacaagagtgccacatcttggtatttatttttggtttatttagctaacatccttttatttcagtgcaacttgagtgttgtgctggtacttctcattcttctgggtggtggggaatgggatgttttctcacaaataaccagttatttctaacttactatagtcaggttcagtccatttctgagcttttcactagaaagatctgtagtgtttctcaaccattttaaacccatatccttataaaaaatgaaaactcaaatgcttccttaatggcttttgacagttttaaagtcaaatttgatgactaaaaagtccaccagtggtaattttagaatggtcttttcagctgtagttaagaatccaagtactaatgatatttagaattacattagactaaattttataaaacttaaatatccaaaatgacaacactactaagtattacagaagtgcagtgtcattggagggaagattgtcagcaaaataactttgtttcctgtgtttgtacatttcttttagttccctcatccaccatttcctttggttttggctatcgtgtatgaagagaatttttgaaggttttgtgcttcccgtatttggggtatggtattgggtattaggtgaaaaaatgcttaaaactttgattatttaggttatcagagttgaagatccaatcacggcagatcacatggtttaatctgctttgtattggttgaataacgagcattgcttttagggtttacaaactgacagttatttaagcaatttttgtaatgcatttgtaactttattttgaaattactttgaacttacaaaaaagttgcaagaacaatgcaaagaactcccatatatattttgcactgctttttaacatcttgacataagtgctttactgaatcttttttttccgaactataggagattgcattgaatatattatgaactttaatgctttgatgtgtttgctaataacaaagattcttatacatacacacagttgagtgatgcaattcaggaaatgtaacattagtagaataatctgcagtctatgttatacttttgtcatggtaatactcttaaatttcttcggattcattatctaatccaaggccattatataattgtcattcctcttagtctccttcaatgtggaacagcccctcagccttaatttgttttgtttttgagtcttgctctgtcacccaggcttgagtgcagtggcgtgatctcggctcactacaacctcagcctcctgaatagctgggacaagtgtgctccaccacacccaactaatatttgtatttttagtagagatggggtttcaccattttggccaggctggtctcaaattcctgacctcaagccttccaaagtgctggattacaggcgtaagccactgcacccagccctcggccttaatttgaatttgtttgatgcttcatcattagatttaggttataggttttagctgaaaagccaccaaaatggtcatgtgtctttagtgtatttcatccagaggcgtagtaatgttcatttgtcccatattggtgatgtcagttttcatgatgtggttcaggtgttgaccagcttgtccactgtgtagttaatattattcctttgataattaatagaaaaaataatggggagataatttgagactaaatattgtattctcttctaacaactgtccactccatttaaaccctattgattcttggttgaatcagtgatatttttccatggaattatctggtgtttttcaatatgtttattgagtggaaacaggtattctattcatgactcaaactttattgtgtttgaaaactattggaaagtcctagctttcccctccctacyatgatttttttcatttaagaagcttactagtgagtatagttagtaaagataattttcaggattttgtcaaatataaaatcatttactgtaaatgatgcctgtcaattctgtcataaatcatatggggaagaaaacttaaaaattgttacttcaagcattaggttatatatattgtatgttacatatatattatatataaactgtatgatataggaaatggatatctatattgatttacttgaccaaatggcaaattattttaaataagaatttagatattttaaaaataatgccatctttygctttgtaaacaaatagtcaaaaagatcatctagacaaatacgtgatcatttgcaaatgctacattatttaactcgttaaaagttttcagttgttagcaacacaaataatgaaattcttagcactttaaaggaaatagtttctattagcaattaaagatgtcagattgcttatccatgggaatatttgccaaaaaggttcctttttaaatttgaatttcctgagttgacagaatagttaggagattagcatttaaataacaggtattccaagtcaaaataactttgaaaaaaagtgttttatctggctgggcgcagttgttcatgcctgtagtcctagcatttgggaggccaaggtgggcagattgcytgagccccacgagtttgagaccagcctgggcaatgtagtaatcaccccatctctaaaatacctttttttttttcttcaacagaaaattattattcaagttcagttttttattatgggggaggggaactactctgtcctgtgcctcaactgcagggtcagaatttttcttactgtgttactgtaacagtggtctgatcatatttggtagtatggaaaaggtatgtttaaaaatgtcttcatttatttaaagaaatgcagtgcaaggaatctgcaggtaactctataaaggatatatgcagaaataggaatgaaagaatttgaaatctggggaccctaggatattctgcttgcagcttccttattactaggaccttagccaaacaatktaacgttttttctttccaactatttattataaaaattttcaaacaaatttgaaagaataatatatagtcaatacctgtgcacctctacataggctcaataaatgctttatattactctgcttatataaagaatagtaccctgtaaaaccacaaagaatagtaccctgtaaaaccacaataccattatcacacttaaaaggaacaataatgttcaaatctttgtttttttgagacggagtctctgtagcccaggctagagtgcagtgccacgatctctgctcactgcaggctccacctcccgggttcacrccattctcctgcctcagcctcccgagtagctgggactacaggcgcccgccaccactcccggctaattttttttttttgtatttttagtagagatggggtttcactgtgttagccaggatggtctcgatctcctgacctcgtgatccgcctgcctcggcctcccaaagtgcggggattacaggcgtgagccaccgcacccggcctgttcaaatctaatttaatattcagttcatgcttagatttttcctccatgtgggcttctagtcactagccattatacgaactgacctaagaaatctaaaatacagtataattgtggaaatagctattaatatatagtaggtttataactgactctttctttgatcaggagttttttgcattcttcattagctgtctcagtattaggtctatcaatattttggtgggcatttgaaaaaatggattatgtatagctactcacaaccacataaaattgcttcagagaatttaagcaaacctttttagaagattttatggtacaataacttctgtgtagccaggttatcctttgtataaaatcttatctctaaaattctagttgctattctccatacttccatagttttttaatttttagctgtagatacttggacttaatttcagagagtacaaaggaatgctgtacacaaaaggggcaaatctttgtaattttggattttaagaaatttataagagcatgtattttcttacctttttgagacagggtctcactctgttgcccaggctggaatgcagtaatgtaatcatggcctactgcagccttgacctgcacaggctcaggtgatcctcccacctcagcctccagagtagctgggaatacaggtgcataccaccacacccggctaatttttgtggtgttttgggttggttggttgttgtttttggtagagacaaaaataacaaaattttgtatttttttgttttgccatgttgcccaggctggtcttgaactcctggactcaatcaaagaacatattctttaccactttgaatatttttttacattccacattatagagagagcagtaatttttacatctgtttctgggttaggaattaggagtgttattaaaatggcatttacttaaatcaaggccaaaactaaggatttaggtagagtgtattagcctttcaatacctgcttattaaacagttgttttcatacttttcaaaggtgtgtagaagttttgtaaataarttttctgataggataaactagattccctatgatctcttatttatttatcattgttttgagacagagtctcactcttgcccaggctggagtgtagtggcgcaatcttggctcaccacagcctctgcctcctgcattcaagcgattctcctggctcagcctcccgagtagctgggattacaggcgcccatcaccacacctggctaatttttgtatctttagtagagacaggctttcaccacgttggccaggctggtctcgaactcctgacctctggtgatccacccgcctaggcctccgaaaatgctgggattacaggcatgagccaccatgcccagcctgatctaaaaggaagtttttactaattgagattatgaaattttatgaaaaataaaaatgaaagaggggcacaatatctagctctgtatttaaaaatattaaaaggatcttgacttttctagttaatgggaaaatctgatttattaaaactaaatctttatttccagttatttgtaatttgtggtgcatcaggcttagggattcaagataaactttttgagcacatctccagtctatgccactgaaaactcaagtatcttcatgtagctacctgatattcctcagttgattgtaagtaaaccactatgatgttgcatcagaatttgtattatttacctataaaacagtttgcaattctaagcatcccacaattgaagtgttttggaattttactttagtgtattcagttatgcttgtaagatacttttatgggtaagaagaaaagtttacaagctgcagtttgtcatttttaggagactgtgcaaactaaaaatgcagaattgcattgttagcaaaccttggaaagtaattttgtatgtggaggactagtccttaaaagttcccaaaaattgtggccttttagtagaatgaaatttactgatgcctactgacgtatttgcctggattatagtcacataaaattgtccaaagtattaacacctttttttcaatagtacagttggctgttgaatttagagattctcaagaaaagtcatctggtagtaactttgtagacccccccaccatctgtatatttttataggtttttatgtggatataggtaaaaaaaaaaaaaagtaggccgggcttggtggytcatgcctgtaatcccagcactttgggaggctgaggcgggcagatcactcgaggtcaggagtttaagaccagcctgcccaacctggtgacaccctgtctctactaaaaatacaaaaattagccaggtgtggtggtgtgcacctgtaaccccaactgcttgggaagctgaggcaggagaattacttgagccctggaggcggaggttgcagtgagccaagatcatgccactgcactgcarcctgggcaacagagttagactttgaaaatgtcttttttcaggttcttccatccacgttattttttcagggaagatgaggacattatcttcctaaattgcttctaaaatttattaacttttccagtatctgttgtgtaaatgcatgccagacactgcatgggaagatgggggatggtgagtcaaggaaatctggaagaacaggacttgtgaactgaggtttgaagtacatgtatgagttaagcagagaatacctggcagagactgccagtgcagaggccttaaaggaaagagagaaaacatgctttatttgatgagttgaaacaattttagcttgatgatttataattttttacattttagaaatagatgaatggcgtgtttttttaatttttaagctgaattttgcttctagtcattcccagtatattaargcagatgacttgtggcttacatgaacgttatagaaatatgagaataatatagaaatattatagaaatatgagcttaatggtcattagctcatctagaattgtaactaagcagtgagggagaataattggagaataagcatgaacatctgaaataattgctaggttaataagttggctgtaattttgctctaggaagagcttaagttgagatatcatttataattctgggcccttattttactcaaatgcctacataaatttataagttaaatgactgtggaagcttcctgttcaattctcaaaaaaaaaaattacatgttgatttataaattctcttttggtttctttttctttatttttagtttctatttgagtattgagaaactaatacaattaagaagccataaaattttccctttaatagtcttcatagcgattgaggaaaatatgacagtaattggccagagttttcactttttgagagggggaaaaacatttcctaagataaaaaattggttattttccatagtaggtaaaacctgagaagttgcatgagtttgattcctagaaatgtttttaccatgagtaaaatttgtttttactaaatgggaatcctaagataccacattgycagcgtctagcttatccaatgacatacagtttctaaattgacttattttgtacagaaaaaagattgcttattttatatgaattttttaaatgaaaaaatggaaagttttccccccttttggataaatatttaagttaatttgcatgtgtttactaaaagggataattttaccaaagggacaaatatttaataaccaagattaagagatactacttattttactgattctagtatcaaagtctgaaacttagttttaaacagaaccctgtaaaatgttttgatgtcttctggatacttttggaatacccaaagactggttaaaattgagaaaagcgaaagcacaagaacagtagtttccaaacatctctcaaaacccaaaaacatcgcgccattgcactctagcctgggcgacagagcaagactctgtctcagaaaargaaaataaaactcaaaaacgttggcagatcatgtcagtttctaaattttcttttctaattttattgatttgtaatatccaaaaattagggagaattgcctacctaggtggtatgaggagagaaatataaataagaatgtgttgatgtaatagtaatgacattttttaaaagacagtggtattacatgaaataaaatgtttttatgggtgttaagagtaaatgaggattataatggaactttgatcactgaattagagttctgatacaattttttaaattgatgaattttaaatgaatttatatctgtattcttagtaattatgtgaaaagcctaacatttgtatgtttaagaatcaggtttttttagtacattcaggtaggctgatttaataattagtagaaaattattaaatgctaggatacccacaagtataaaaatttgtgcataatgtctgcatgatagataatccacatattaatagtaaagtctmttctctagtcacactggcctccttgatgttccttaaatttattccagacattcctcccttagggcttttgtctacattagctcttttatctgttctaaagatatttttccagatagctgctttgctagctgctttrctttcttcagatctacaaaaatgttaacttctcattgagatctactgtgaccactctgtttaaaattgccacttctatcccctgcagaactccttatcctttaccaagttctccttttcccctataatactcatcacctaatgtactgaataatttacttatagtttgtctcttttgtatgttgctatattccaggaagctacaataatgcttggcatataatggcactatgaatacttgttgaattaaaaatccacagtgggaaataattgtattttacaagttgaatttctaaaaattcaaaggtctcaaaaaaagtaaaatgagttatttcagtttataacaagatgtattttcatgaatataaaattgtgattggctgatacctttactgtgacaggttaaaaaaatgtctttatttttagaacactaaaaagaaactgttcttttgaattgtctaatacccctaaatatttaagtatttcagagtaagctgctttcacattatttagaattatgttgatgtataacataagagaaagatttatactttttttttttggagtcaggttcttactctgtcacccaggctggagtgcggtsgcttgaactccgctcactgtaacctgtaacctccaccgtgtgggctgaagtgttcctcccacttcagcctcctgagtagccaagaccacagttgcaggccaccacgcctgattaattgtagagacaaggtcttaagttgcccagcctagtcttgaactcgggctcaagcaatcctcccgcctcagcctcccaaagtgttgggattacaggcatgagccactgtgcctgaccagatttttaccagatctggcttctttaatagattacttttggaatttagtgcctcagtgaacattggattttagagtttttagttacttttcaaggtagtttgcacacattttttttctaatctttttgaaagcttgatattaataaaatactatgaaggagactagcaggtaatatggtgagttaggttactcagattagctctctcactgaaaacagctaaggctgctaggtagaattttaagaatgtcttattaacattgaacttacagcactaaggaattaccaggtcaaagcctaatggactggggagggagaaaaaaggaacgcgaggagataagcagaatgcctaaactgttttggccctgaaagcaactgccaaactgggaagacttgagcttcaattttaaacgcttcaggacytcaggcagcaaaagtcaaaacccaaggcctgcccaaggtacagtgtccaatgggatatcctttccccttaaactatgtgctccaaaagctacactcaggatgacagtgatctagaagtaaatccatgccaccttcctacctgtaagggactgagaaaagttgcgtccgtctgagtagagcagaatgggggaatcctgagatgttctttatgtggatttgtgtgaataaacatcacctgagaatgattcagaaaaactgaagccatgtatgtaaagtagactcagcctgaattatacccctaataggtggtaatagcttattcataccctttctggaggaatgcaccttcttcctacgcctcagagagtttccacaataatctttgaagggaaaggaacagatcagttgttaaaaataagcatataaggaaaccacatacatcagaaacagacctccaaagacttcagaaactagaatttagataagattagcttaataacacaggtgaagagagaattggagaactgaaggcatccagaatggagcttaaagagccaattagatggaaaatatgaaagggatatctgagacacaaattgatagtgtgaaaatgtgtctacttgaagttctagaagtagaggaactacatggggcggaagcacaatttgaagagagaaatactgaaatttccagaatgattgaaggcttcaacagattcaagatgctcattgaatcccaagcagtaattttaaaaattcacaactggacacatgaggatgaaactatagaaaactaaagttttttttcttaaatcacataaatggttggaaacaaaaagataaatgaccttcaaaggaatggcagtaaggttggtaacttcacagcarcaagggaagctagaagacagtggaattgactcttcagtttgctgaaagaaaatagctgtcaacttgaaagttctgtacccagagtcatgttaataaaataccattgtggaagttacgcatgcatttttgaacatgtccaattgtaggtataacttaaatacatatattamattacaagctcatttattaagtatccaggtttctcttcatatttgcttcctagcctaaagtcactctgttccaatgaaagttttcataagtgaaaggactcttaytggaatttgaattggtggtctgtttttagcttcacttttttcagggcaaaaatgattatgagttttatttttatgtttattataagtagaattataaatctcacttgattggtttagtrccacaagtttacagtttgggcattaaacaagtagtttcttaaatgctgaatttcagttaaatttttacccaagtatatcacttcaattttattgttaaatgtttataataaccctttgacttggttggaaattagtatttttaataatcttgagttacgccagtgtcaaattccattcattagtattcattttttaggtttggaaattaactaaatgaactaaatttttatggtagtgcctctggactttaccagtttgtgttaaggttgatagttttcttttttaaatgcttaaattatactatgtttagaggctgcaaaggtaatcctttacattaaaaaatgttaaatagttttgacaatattatacatctaatttctgtatgcataaygcatattgtgttttatttgtacattttttgcaaattttaacattttgggggtttttggaatacggttttgagaattgatgaaaatatagatatgtgtttaaatgtaaaaactcaaaagttatatgtcacctagacattccatatatatgtgtatttatattcatatatgtatacacatatgtatatgtgtatatattaaaataaggttcaaaaatcagaagataacaaaaggaacctacagtgaaaagtcacctacccctgttcttgaggcaccagttcccctcagagacaatgttcagaatctagagatgtttaatgcacatacattcatgtgttctgtcctttacattaataaatacctattacattttgttttgcaccttttttttattaagaaagtaacttttggaaatctttttctacaagtacataatattctatgtttcttttaacttgtctcctactgaaggacatgtaagttttttccctgtcttatatattattacagacggtactgcagtaattgtgtacatatcatttccatttgtgtaaatattcttgtagattaaattcctagaaatggaattgctggatcaaagagtatatggggtttatttgaattttctatttcctaatgttcttccacagaggttgtcatagttttaaatcccattgataatcctgtaaagggcccatttttccaaatcctctttacacaatgttttataatcttaatttttgccagtacttataagtaaaaaatggtcctctcagtgtggttttcatttgcatttcccttatgaatgagattgagcatattttcatttttaagagccctttggatttctttttctgagaactaatctctctagtccatttttttgtttttttttttcatctttacaagagcacattagggaagttaagggaaacttttaatgttagcacaatttcccatttagaagttgaaataattttgataaaacatttaaataatgtgttacatttattgctttacctgtttttctcattgtcagaaatggaaggaatgataaatatgttctgagataaaagaacatactttcctttgttattttgatgttcttactgacctgttttacatacttttcttttcttttttcttttcttttttttttttttttttttgagacaggatatcactgtgttgccaaggctggagtgcagtgtgtgatcacggcttagtgcagcctccacctcctaggctccagcaatccccccacttcagcccctcaagtagctgggactacaggtgcacgccaccatgcccagctaatttttgtatttttttgtagagacagggtcttgctctgttgctcaggctggtcttgaactccaggactcagtctaaccaccagccttggcctctcaaagtgctaggattacaggcttgagccaccatgctcggcctatattttctttcaaatgtgtgttttgtgcttaagtatttcttctgttggccaaatctctgatttcccattttaattaagtcttaatgtttgcaaattatttttttcatctttttaagctttttatgttgcatctcaacattagacatgaggagactcacatactgttatataatgaaaatagttttgtacatatatatttttttcctgaaaactgatttgcttatgaaatagttatgaagaaaaatcttgattcacattacagattttcaataaggtcatgtatatagagaataataaggtcatgtatatagagatatcaaaatcatgaaggcatctttcaacaatcagatccttttgaagtgagtttatatataaggattatattctattaacagtaaacatttcaaaaccagttttctttcccattggtgagctaattaaatactttatagaatttggttttcaacatgcacactttgctatccaacaatgtatctcaattgtagtaatttgaaagctaatccatagattattttatatcttgtttctgtgcattttgcagtaggatgatgggatatggggagaacagaaagtggttttatgcctgctctcctttccttcctcaggtttaggtattgattgggaaagggctgccaggagctcagtttctttgagaaacagcattaggaaacttgttgttgttgttaatttaatttttttatttcttacatgtcacagcttttgataatctgatatctctactgacctgttatagtagtcatggacaaaattagacctgtatagtagaatcaactaggaagaatggccatatgtgtttattagatttggggagccttccactgcagacttcatttgctggtgaaagtatcaccaccttaacccagagcttgccattcaggtttttttcccttcaactgtctttacattttaatgacagcaccataagggtctgttcttagagcaggaatatcaatataatcttcatttcattcttgcctactaaagccttcatggcagctttccatatagyatttgaacttaattctttacctttggtggcatcactttggaaaatatcacaaatataattagaggaggtaaaatgaaatacaaacatttcaaactataaaataagattccagagaaaataggatatgttttcgttaagcctttaaatgtggccgtgtttggagaaatgcactcaggaattcataaagttaggaaaaagttttaaaatctagtagattttatgaaataattttataaatattctggagataagtacgtagactgaagccattaaaatagagccaaaatttcaattttggaacatgcccattagaaaaaagaaattcacgtctaaatcttcttgattctcctggaacttaatatttacctgaattttttctttgtttttcttaattggttagctatgtctacttttcaaacctccaaagttcctaatttcccatcttttacatggctatttgaaacagcatttttgcttcaaatagaaatcatgttttcattcaagaaaagtaatggaaaatggaattgatttgggtgtgctcacggaaagatcgaaatcctgtgaaaaatctaactttcaaaatccatattagagcttcaattattcctccattttagtctgaatttactgatagtattatacttagcaccctttctaaacctttttattgaagtgaggttttaartyaatattttaacaaggattataggactcataaagacctttctgtaaaagttatacatttacatttttcatttcccttgatatttaagacagtataatctaaaacctatttttgaatgaatatgtgaatagtaactggtagttttatccacatttatttagcaattattattgaatgtctgctatatgttaggctttgttctaggtgctgtgaaataaaaaacgttatgcctttgtggaattttttaaattatgttgactcgcttgttttctgagtaagcagaataatacctagatggactactgagaaaatacacttaacctaaatacatgcacaaataatatttttggaattaagtggttgaattttaaaaggcaagcataatgaagtaatatcaagtgattgaaacctgagagatgggagggaaagtggagtttgtcaagattgttacaaaaaggaaaacatttttcttatttaaaagggtaatatatgtgtttattataagaaaaaaactctaatggagaaaaaaaccatattcccactacctttgaactataacttaatcacagttaacttttccagatctgtctataaaaccttaactttttgtagcttgttttttccacatggtagcatatttttgtgttatttagtctataaaatcgcttttaatggtggcacagtagtacatcctagatacatgctgtttagccagtcctaattatcatttacagtgtttccagtttttgttttataagaatctcttgcatgaatacaattttatttcaatatttttacatagtcataattgtttctttagattgaccttttagaattcatattttactatcaaaggttgctgttgctggtgtgatcttttgaattgagctgggtaatgattttttaatctttcagaatttaagtaaatatgaccaatgtgtactttgttcaagaatagagaaacagggttgaataaatatacaattttggggaaaacgatgattatttgataagcattttctaaaaaggaacttggaattaggtcacttcaacaacaaaatagaaataaactatccatataggattgagaaggctagaattgggtcataatacaaatgttgattgtatgttcttggaaaaagtgatagggtatcaaaaacagttgcagaatagaattagaatataatttctgatgtaaagttaaaagtattggagtagcagtattgataaaaactaaagtagtctgaggaatatactgtgagttttatagaatgaggaaatgggctatttctaaaattatgcttctctactaataggtaaaaactagaggagtgggcaagttgcttaaaaaatacagaaaagcaatccattgaatttgtatctacttcattgtggaagtttaatcctgtttttggaaagtgatttttaagaaaggttaaatgaagcattactcatgatactgggtatctactataaatgttatacttgatttcatagaataaataaatgtgtacttagaattaaattgccaacaagaaagttacatggaaaaaaatgtgaattcattggatgacactgaaaattaagtaagagaaatagtattctgataggaatctctatcaaaatgggaaagattgtcttgattagtgaactagaatatctcaagtagaggaaatgactaaaggcttttgtccagtgataatacaattgctaatatttttaaacagcagttttcaatttgtatgtagtgagaagtacagtaagagatgaatgaattataaacagttttaagtaaatggttttctgaacaacttcccctctgcacattaaaaaaaagtcatgtgactaatggaagattaactcagcaaacaaaagtgagattagatattataatattttataaagcaatatataaagttcctgtagtaatactagagaagttatattgtttaatattttaagtttgcctggaaggacttttattaagatgatagttcataaaagctgcaaattaaggtagaaaagactataagttgatgtgcaataaactaatattagacgtttgagggaagcaaatcagcaatctacttgattaccattctggctgtgcagtatggaattaatgtcattttttgttttttttttttagatcagaggtttatgaacttgatttcttgactttcctgatagctggagcgtctcaaatgattgyacacatttcttagtctcaattttaattaacctttagaaagatctatgccactcagcaattttgaggagagacaggggagatgacctaatgggaggtagagtagcaaaaccaattgagccatgaatgttaactagtgattttgatacttctggctaaattactcacttttctcaaaaagcaaataccctgctgtatttttcttacccmaaaattacagattattctttgaaaggtaatgtttggcatgctgttgacaagttatttacagagtttagatgtttattaagtaaagtaggctgagtctataaatgttaagtgatggttgttgatagatgccctatatattgggacaaaatcaaatctgagccaaggttttacctttgagattcttgactgaaattagtattgtctaatttatctagcatttatttaactttttaaatcctcataggcctggctaagaatttgagaggatttaaaagtagattttaaagtggggatgtttatgttcagagaaaaataccaatgaattactccgaagagaaacttaccgttcaaaatcagctgtaattttctttctcttrttaaaaaaaaaaaaaaatccctaatctgtcatgagattagagataaaaaagaaaatgttgagttattttttaaaaatcccaactctctcctttgtgaaattgatatgaaaataaaatgtaactgagacagaaaaattgtctcaatccttccagtgaaaatagttttggtcaacagttattgtgtgcatttcttcctactcagtatatattttttggatttcacttyttaaatgtactatggatatatttccattcagtattatacatcattgcttttaaagttcctgtgggtgtgtatatatctatatctcatcccattgtttagacaaaacaattacttagacaaagcacagtttaatcattctaccttttggtaatataggttctcaaattttctgtgtactctttcaatgaacatcctcatatatatatatatattgtgctgagagcagtatagtatagtggttaagagctcagttgtgtgatctgggggaagttattaaatctccttgtgcctcagttttctcatctttaagtagggaatagtactttacctgagtgctgtttatggattaaatgagttaatacatataaaatcttggagtagtgcttacaaacattaaatatttaataaatgctgctagtattagcagtatttagtcattttaaattataagaagctgaattgcttcaacttttaagtgtgtaataagcaatgagtttcttattgccagatccttcgtatacccttatttttgacctgtggcatattccaccagatccctttttcttataatgttcatctttgacttcatacatattattatatcctgtttttcttatgtcaagtactctggggttctcttcctttttgttgcctgggaatggatagtttggagaaatgagtctttgcttgtctgaatattctctacttcagagaatatacttaatgccttaggtattgtataccctacatatttataagaaaagttttttttacaaatgacaaatatgcatctttaattccactgtcttattgatgaaaccaacccccatctgctaactttaatcagacaatttatacctgagttgtgtcacctcataataaacctaataaaaagtaaactttacagcaactctcataacacttttcattcttgttcccattaaaaaaaaaaaagtctgttgttcttccctctacattactggttttctctccttgttctaccttctctgagccaaagccagtattaccccacttaaggatgacagcaatagcatctttcctattgtagctagtacctgcttgtctcatcccatagcactaaaagccacctctgtattctccccagcctgtattccctaacctacttatgagtcatcttttttcaactttcctcattgtttacctgccaggaaaacctcagtggcattcagtaaggttttctgtgtgtcagatttaactctgcctttttatgccctctgtaatggaccttcaccataatcagccaacttatttttcctatgcatattctttttttcttgcttggatgtcctcattattccaccaaaaactaaagaaactcatgttgtttcattgacttgtacagactcctttttttcattaatggcctggataccatctgctcagtgaagctttccttgttaactctagtttgcatggaacaccttttcctctgaatcttataggacatagagcatacacaaaataatttaaacttaaatttagtcctttattgtttccatcattagttttatgttttcaactgggtcataaactctttaatagttcaggtccacatccccacttccacttggtaaatcctaaggacacatgacaaatactttttagttggcttgggaaagtggaagactaattaatacctaatggttagtacaaggaattaaaatgaaactaaatttaatctagacccaaagataatcatagttttgtttagcacatttcaattttaatcataattaaactatacttcacagtggtctataatttacactcatttttgacaagtagttctgtgatatatttaagggcctggataattgaaagtttataggacatgtagaggttgtggccaacctgttatatctaaatcagtatatattataggtatacatttgtatgtacatatttatatttttaattttatagacagaatctcaccatgttgcccagactggtctcaaattcctggcctcaagtgagtgaccctctcccttcggcctcccaaaatgctgagatataggcatgaactactacacctggcatttatatctatatttaatatgaaaatacaaattgcagaaacaatacaatttatcataggaaaattaggaagtacagataaagaaaactattctttaggtagtggctgcctcccaaaatataaccaaaatataattccatgagttatgacttagtttaatccaccactttatctccagtgctagaaaagggcctgccacatagtaggcacttaattatttgtcaaataaaaatgaatttatttgcagacactactttcctgatttctttaccttaaaattgggagtgggtggtggaaagaagaatattctgcaaccactccagcagctaacttaaaagcctgtttgtagatcttaaaatgtcattcttcaatatttccaaattccttaaaacgacttgtattctgtaatcttccaagatatttttcaggttgcagaggattagagaatagctgaaaagagtagtgaaaaagtaaatgaacaggagatgaatttatatttaggattccatttgctttcagatttcaggatttggctaagctttttggataattaatacaagtagaatcagacagcttctctgcatctcaaattcagtttaagatgattgtcttaagtcctaggaaagtctatgtgctatactttagagtagaaaagatgcagggaacaarttaggaatgcgactgcaattcatttattcgtttgttcacattgtgaacaactaccataagaactcactttagatggatcctagccctgcctctgctatgtgcccagtactgtctgaaaacctaagtgttgacttgtcccaaatggttattgtgtgaaaacctacacaaagtatatagagacttactttttcctttagattataaagcttcttggtgttcctctatagagttatgtcaggttaatttatttatcaatttttttttttgagacagagtttcgctcttgtccaggctggagtgcaatggtgcagtctcgattcactgcaacctccacctcccgggttcaagcagttctcctgcctcagcctcccaagtagctgggattacgggcgcttgccaccatgcccagctaatttttgtatttttagtagaaatggggtttcaccatgttgtccaggctggtctcgaactccggacctcaggtgatccacccgcctcggcctcccaaagtgctgggattacaggtgtaagccactgcacccagcctcaaatatgtttttaaaccatttcaagttaattgtataatgattcttataactggtgattttaaaaacagcgtactttttaaaacttttgactttatgggattttttttttccccaagggataagggaaaaaattgaatttgaggaaacctgtcaaaatgctgttgacatagagttttatttctctggtcagaaaaatgtgaattttgtcggcacttacatcagcatttcctaaaacatccaatgaagcatgaaatatgttcctaacattaggaaaaactcatttatttttgaacaagtgaatatcatgctttctttagatctcaatataaatatattccagggaaaggacatggctagtctaaactgttaaaaatagatgttagtcaaagggtcattagaccttttctggcaaagttaacactttaaaaattaagtaattaattttgttttaacctattaagtaataggtgatcattagttccaataatttatctgaggatagttttagttccaaaagatacgtgatgaccaattaatgcttgggaaataattgtggaagttaacaaaggcctrgaaatatgaagtattcaaaagtattgggaaaagatctgtgtttcctcatcatgttatacttgttttactctccctaagataaccactgatttttttttttaaacagagatggggccttgctatgttgcccaggctggtctcaaactcctgggctcaagagatccattcacctcagccttccaaagtgctgggattataggcatgagccactgcacctggccgttaaccactgatttgaatgtaattaaacttaaaggttaattgatcttgatattgctattctaattatcatactcttctattaaaaaaaaggaagttgaagatttaaaaaatttattattttttctcaatagacacttttcatatctttgtaaaatttggataattcattaaaaaggtaatgtaattgtatgacaaatttttatgatagtatgtgtaccagataagtatttatttgttttttgtttgtttgtttgtttagacagggtcttgctgtgtcacccaggctgaaaatgtaatggtgtgatcatagcacactgcagccttaaacttctgggctcaagcaatcctcccacctcagcctcccaagcagccgggattacaggcatatgccaccacacctggcttaaagttaattctattaagagcctctgtcattgaaaatgatgcactacttttaatagattaaatataagcaagtcttagtaagttttgcaaaattatttgtatgcatataatggtcttattcatttatttatttatttatttatttatttatttattttgagacaaagtctcactctgctgcccaagctggagtgtgtggtgcgatttctgctcactgccacctccacctcctgggttcaaatgattctcctgcctcagcctcccgagtagctgggactacaggcatgcgccaccatgcccagctaattttatatttttagtagagacggggtttcactatgttggccaggctggtcttgaattcgtggcctcaagcaatccacccaccgaggcctcccaaagcactgggattacaggtgtgagccacatgtaatgtggtttataatggtctttaaatggagacctataatggtctttaaatggagacattttctattgattaatggcaggaagttctgagaatcccaaatgtcaaaacaaagtaatcttaggtatcaagaatttttttttatttttagaatttaaaccaggctttgattatcaggtagaatggaatacttatagctaagatgttttcatgtaaatattagtaagtaatacataggataataatcttttaaagaaggaaaatggtgggatggctaaagacagggtattggtgtgctagtctcaccaataatgccatttgaatatggcctgcatttttcctctgcatcaaatgggccaattatagtaacaccattgctctttctggctacttggtttacatagttctgtttagagaagatataatgaaaagttatactcctttagtttatagctttgttgactagtatgatttatgggcacctggaacatctagatgctttatattctttttaattcttgataaccctttgaaatggatgttattatcattcccattttataggtggaaaagctgatactgtaagagaggaagtaattaatgcaatgtgatcaaattcttttcattttgtcacactgcagatttaatctccaaagcacattgatgattttttttttttttccacacagagtttcgctcttgtcacccaggctgcagtgaaatggcacaatctcagctcactgcaacatccacttcctgggttcaagtgattctcctgcctcagcctcctgagtagctggaattacaagtgtgcgccaccatgcccagctaatttttgtatttttagtagagacggggtttcatcacgttggccaggctggtctcgaattcctgacttcaggtgatctgcccgccttggcctcccaaagtgctgggattacaggcatgagccactgtgcctggccaatgatttttaaaagtatttttttaatgaatgatgttttaaaaaataatgagattatagctattgtggtaaggccaccagtaccagctctgtagaaggtctctcaaataatatttactggttgcattaatgaatgacaatcagtggccacgtactagagatcagagaatttttctgtattagtcaaaagtgtctttctacatacatttattgggctaataccaatttaccaattaaagaaataattgatgaatccaagatatgggaccactttgttggggacgggtatgcaaaatttggttatttcgtagatatacataatagacataatttttactgaaatgcatagatgatagtaaagtcttttttcttgtctctatttttgcatccacccgtatcaccctgccaaccataattatgtttaacaaccttgtgggtattccttatttttctctatgctaataatacataaacatatataggatttatttttatttattttataaagatagattatataaattttactatcttttcattcaataagatcttgtggcaattcctcccaattacctgttaaagctgaatacataatattccatgatgcgaatgcatcataatttattaaactatttccccactggtggacatttgrtttttaaactgtttttgctactacaaagtttacagtaagtaatcttgtacaattacctctctattctgttgcttttatttttattttatttttttagatggagtctcttgcctgggctggagtgcagtggtgtgatatcagctcactgcaacctctgcctcccgggttcaagtgattctcctgcctcagcctcccgagtagctgggattacaggcgccggccactatgtccagctaattttttgtatttttagtagacacggggtttcactctgttggccaggctggtctcgaactcctgaccttgtgacttgcccaccttggcctcccaaagtgctgggattacaggcgtgagccaccatgcccggcctgcttttatttttataggatagatcctaggagtggaattcctgcgtcaaaagatacattttttttttattagaatagctgttactaatggcttttcaaaaatgctgtaacaattcatatttcctccagctgtgtatgaagtgccttttcattacatggcttcagtagtgttaatacctttgtaagtttttgccattctaatggtttttaagtaatatctattattttaatttgtctttcccacattggaagtttacacattgtcatatagcttttaaccatttaaattttcttttctgggaattaactattaatattctatgcctattttctcaatgggtagctttggttttcctgaccagttgtgtgaactgtatataatctcaactgcacctaggaagctggtgatttaaattcatcctactttattcccactctgtttacctctactaagccaagcagccgaatgcaaggaagcttcaggttctatgggaatctcaaagaagaggcccagtagagggcctagggaaaggactaagaagctgacccatagaaaatttggaacccctcaaatgtctttaccccagacgaatgttgacatcagcctggcctcttggctgagtcctccctactcttgagtagagatttctttctggtttcttggcagagggctagcagcagcttgtttgctgcctacacctgctacacagctgtcatggtagagaagggtcaatttctactactttaggactgccaacacagcttcagtgaataggcaggaaaaaataatagcacatctgaaggatccaccaaccagaaaggaatataaactaaaactatcaggtccttaacaaaatagagctgctagaggagaaatacaactggaacaaagtaatatgaacacaggattcaaagtgctgtattaaaaactctggagtctaaaaccgttatgtatgaaccaaatacagtaataggctaagtggaagagaatattcacatggagccctaaatgaattgcctggggaatctactggacaaactattttaacaccttgagcaaaaattcaaaggaagggtaaagataacagatttcaaggacagaaccaggagatctaacttatatagttctagaaggagaaaaaaggaacaaatagaagagagacacttattcttgacctaaaaaaagccctgagtatatgggttcaaagggcatgctgagttccaagcagattttgtggtaataaaagtaaatgataattactcagtgctcaacctgctaggcaatattctaaaggcttcacatttattaactcattgagtcctcagaatagccctgacaaagtaggtattattatcccccttaatcagctgagggaaaaagaggttaagtagatagccagattgtgaacctaagaggtctgactccagagccttgattgaactgcttcaaagtacaaagagctgtgtttaagtgtgtgctaaaatttatgaactctaaagatcaagataaaaaagtccagaagagaacaagttatcagcaaaagcaaaaaagactgtcatcagcattctcacctgcagtagtttaagccataaaactgggaatactactctattactgtactacttgagataaaaggaccaaaacttctctaatcagccaaaatatttatttacctatctgggtgaaacagatttgctgattaacacagttgagcacctaaccccacccactctgtgatgaaaatactcaaagaaaagagaaatctaatagtatttaatcttggtctttgcacatgctatttctcctgcctggaataactcttccctttcttcagcaaatagctcagattctcctagaaaaagttatctttttcccggaaatcttttgcaattccccaagtctaagtcttttgctcttccaaaatgctgtagcacccagtactttcttcattttagcacttaaccataatatcttacaatgaccttccacttcgttgtcttattttccccataagattgtaagctctatgagggcaggggcagacctgtcttgtcacagtggtagcccccacgcctagcacaatatctgcaatatattaggttgatggtgtgactgaatgtttatatgtagtccaaatttgcatatcttttttgccgctcagattgttctggtagctatacagggaaaggaaagccttaagtttttcttcagtggatacatcctattcaggtagacctatcgggtatgtgtatatttctgtattcatctcatgacttttacagaattttattaaattcacaaaatttatatgtaaatgtatgaaaatccatatagattcaatttacacaggtatatttacaatgcattttatccatgtttgcttcacacttctgttatttttgaaagtaacagaaaaattaataagaaactatagggatgaatttgcaaagttggttaaaaattggtcaaaaattcagactgatgctctaaaaaaatartattaattctatatttttctgtttctcttcagattaaagctaaaaattatgacaaggttgaaaaggtgagtcctcaaatactttgaattttatattgaagtttaacttaaaacctagtatgtataagacagatgtagtaaaatgttaataataattgaatctagatagtgattttttacaagttaattgtacttattcagcttttttatatgcttgaaaatgttcatcataaaagttttggaaaaggaaaagaaaataattatactcccctgacaaatcatgagaagcattttaattatctaaactgaaaatggggaaattatttgctttttatttataagagataaattcataaagggagctgaatttgtgtttttaatgttccatttcatctatgtccatgtgaaatttatttaactggattctgataatatattcttgtatttaaagctatttcagagatgccttatgaaggttttgcacattgatttatggaagtgttatctttcatatgtccgagaaaccaagggtaaactaccaagttacaagtaagtgaaaccaggatcttaagaatgcaagtcatctccaggcacacagttaatcccacataaactcacaccttctgttagccccaagtgggaagaattatcaggatttgaaaagtcaggatttcctaagaattagtaaccttgaaaaaagtgcttcagagaaagtcactggcatgagtcttactctggagaattgaatcgcccaagccctttctatactgaaacactgtataattgcaacaccaaaccactttgttgacagacttgttgtcaaattttttcaaaaaccatcttcatacttgtgctagtaccacttttgtgaggtcacaatgcaatgtgctacttaagtgatctaaggggtctctgacatttgtagtgatataagggatctctgacaattgtattgtgaagttgccatccccactccgaattatacccacctccccatctttgccaaatctaaataatggaccttcttctgaggtgccatttttctatgtaactaacaggcaagttatgtctgttactaaaattctgtctttattgtcttttcctgattatactttttgttatgatttttgtgttttgagacagagtttcagctctgtcgtacaggctggagtgcagtggcacaatcacgggttcactgtagcctcaacctcttgggctcaagtgatcctcccacctcagccttccaagtagatgggactacaggcaagagccaccacacctggctgattttttttctatttttttgtagagatggggtctccttatgtttgagactccaaacgtagcagggtctcaagcataagttaatgtccctaggctggtctcaaactactgagctcaagcaattctcctgcctcagcctcccaaaatgctggaattacaggcataaaccaccacacctggtctgtttattgtcttatattgaagtggaagttctttttccctaatgtaccctttacattttaacataagttgcattttaataaaactatactttccagatttctacattttactttagagctaaagatcttaatgtctcattaatgagagaaccacaaatttccacatttgaatctgctatgtatagaattatgcaacttaaatgatataaagataagtaagacatgagccttatttttgataagctcacaagcagtagataaaggaaacaatttatgatattgacaagcttaacatcaaagaacgactttatatacttaaaagatgtctttaatttatgtttatagagaatgttcaagtgttgttctgatcctgtgatcagaagctacattttagttatatatacatttattatttatttatttatagagacgaggtctcactgtgctgcccaggcttgtctccgactcctggcctcagatgatcctcctgcctcagcctcccaaagcattgggattccaggaatgaaccaccacgtctatcttcaaataataatttatttttaattttttttagagacagggtcttgctctgtcacccaggctgaagtgtaatggtgcattcataactcactgtaaccttgaaatcctgggcttaagcactcctcccacctcagccttccgagtagctaggattacaggtgcacgccaccatgcccagctaatttttttaatttttatttttttagagactgggttttgctatgttgcacaggcaggtcttgaattcctggtctcaagtgatccttctgcctcggcctcccaaagcagtgggattacaggcatgagccaccatgtctggcctaattgtagataaattttaataacaaaaaaatttaaaaaccacgtctttcatgttcatttcagagaaaaaatggctcaagcatatgactttgcactggataaaattggaatggaaattatgtcctatcaggtagagttaaaactttttaatgtatgcacttaaatgtaagaataccaagaaagatattaacatttcattttatttcttagatttgggtggattacatcaatttcctaaaaggcgtgtaagtatttgtatagtttttttttacatctacagttgatttagctaaaatataatttttagttctttgagaaatctccatactattttccatagagttgttctttgggtagatatccagtagtgagattgctgggttgaatgagatttggttataatataattgatggcatttcttatccaatctcagggaagctgtaggatcttatgcagaaaatcaaagaataacagctgtccgaagagtttatcaacgaggttgtgttaatccgatgatcaacattgaacagctctggagagactataacaagtatgaagaggtaaattaggtcagagtagttgtttattataaaccaagccattttaatttctatgcattgtggatttgtagattatagcctttctgtatcagtgttacactttttttattgattgtaatgaaagcactataatgtttttgcaaggtttgagagtctccatatagtgttattttttagaggatactctgaagaacaatagttcttataaaactatttttattctttgctaagccatatccacacattcatacacacacatacacattgtcattgacctataaaacagtaccttttgggaattatgtttccaatagtaccttttgggaattattttttggttgctgtgcacctttttcacctgattacagtgatgtgatgattggtttgaatttgtgaagtgtgtggctacaatccaagatctttgtgttattggtatctacttttaataactgagctaatcaatctgaatacataaatacacatgccaaataagctctagcattaaaaggaagttccttggctgggcatggtggcttacacttgtaatcccagcactttgggaggccgagatggaaggattgcctgagcccagtagtttgagaccagcctgggcaagatggtgagagcccgtctctaaagagaaaaaaagaaagtttttcgtatgtatattgtgatttggaagaactatatagggtagtgaaattgttccctcacaggcatcagctgtggttttcaaactttatggtttttggattttaacagttattgaagatcacaaagaattttttgtttttatttttttgagacagggtcttactctgtcaccgaggctggaatgcagtggcacaatcacagctcattgcagtctcaacttcctgggctcaggtgattctcccacctcagcctcccaggtagctaagactacaggcatgccccaccactctcaagctaattttttgtagagatggggtttctccatgttgctcaggctggccttgaactcctgagctcaagcaattagcccgcctcggcctcccaaaatgttgggattacaggcacgagccaccatgcctggccaaaaactgtattttccaaaacaaaaaatgtagtgtgtagtgagaagagtggcattgttttatattttcacaaatctctttcatatctagtgtaatagaaaacagctggattttcatatctgcttccatttagtgtgttataatactaaatgtcacgtagcctctgtaaaactcctgtattttatgagagaggcaaataatgtcttagtgttataatgacaactattttgatctcatggactccctgaaagggtcttagaatccttggagtactcactgagtggtaatgtttatctttccttgctacttctgtttgtctttttaaaaagtgttatacaacagaactagttagaaaagggctattagccaggtgtgatggctaatgcctgtaatcccagcactttgggaggctgaagtgggaggattgcctgaggccaggagtttgaggccagcccaggcaacatagcaagactatgtctcaacaaaaaaaatttttttaattagccagatctggcagggcacacctgtagtcctatgtctgaggcaagaggattacttgagcccaggagttcaaggttccagtgagttaggatggcaccactgcactgtagcctgggtgacagaggaagactctgtttataaaaaagaaaaagaaaagggctatcaaagtcaagccatggctattcacccagatgaatctgtacatattttttttttctttgagacagagtctcgctctgtcgcccaggctggagtgcaatagcatgatctcagctcactgcaacctctgcctcgccatttcaagcaattctcctgcctcargctcccaagtagctgggattacaggcgcacaccaccacacccagctaatttttttgtatttttagtagaaacggggtttcaccatgttggccaggctggtcatgaactcctgacctcaagtgatccacccaactcggcctcccaaagtgctaagattacaggcatgagycatgtcatttttttttcagtagaatcttatatgaaattattgagccttttcaaatgattctatctttaaaagttcctgataaatggaaacttactgccagctcataagacataagcacatcctccttgatcttggaaatgtataatgtgattgaaccttttttccctgcttttcatgagctgtatgaacctttattaaacaagaaatcttttaaaataaaaatttaaagttatttagtaaatgaataaattaactgtattgtactaatttttaagaaactatacttaattttaaaatatttttgtttttttctagggtatcaatattcatttagctaaaaaaatgattgaagatcggagtagagattatatgaatgctagacgtgtagcaaaggtatggaattccatcaggctattttaatgattattatgagtctgttgtttacagcagagctttccctgtctggtattactcttgatattttcagtcattagcaatcttaacagcaattaattgcaaagtctgaggagatgacatatttgaaatgaaatctctctttgtaagaacaaaatataataaattgggtttagaagaaattgttttttaaaatatggaaacagaagacatagagagagacaaggctctacttagaattgatgaagtaattcttttccctctattatttgggttcatctgaatattgtattactctgtggtctaataacatagctctcagggacacattttgattgtgtgcatacctttccattcattgacactcttggaagttaggaaaaatagcctattaatacaaactattgaaattttaaaagacagtttctccaaagatggcaataataatgccaccagatcttcaatcctattgatctgtcaactcttacatcctggaaagtaacctcctagatcacttacagagagggcccatgggtgttttgtttacccactcctgggaacctgttcttgagtgggtaatactcttatctttctctctactcttaaatagtttttagattatattaacaaagtggtatttggaaaaagtaggcatcttgaacagtcttccaaactgatctaccccatccgccatatatctcagttgttcctggctcaccaaagaattctaaatccttgttgtctaggaatatgaracagtaatgaaaggcttggaccgtaatgctccctcggtgcctcctcagaatactcctcaagaagctcaacaagtagatatgtggaagaaatatatacagtgggaaaagagcaaccctcttcgtacagaggatcagacccttataacaaaaagaggtaacatgattaaccctcatgggacttcagttacatgtatgttaggccacttggtatccccataggttactaaaattttcttacccctaatctttttttcttttgttcttcagattcaataattcctatagatctatctccatattcactgaacctttgttttcatcatatgcagtctgcaattaagcccatccagtgaacgctttatttcagatactatatttttcaattctataaatttccattttagaaattttttattttttatatttcttttttatggtgtccatttcttagttgagattccttgtgtgttcattaccatctttttctttgtttcttagaacatatttataatagtagttataaagtcctcatctgccaattccaacatctgggccttcaaccaccatggagtttattttctttgattgctttttctcttgactgtggtttacatttccctatttcctgtttaaattttttcttttagatattgtacaaatgtacaaatgaaacattgtaaagactgtagattctktcatcttcctctgaagaatgttttattttagcaggaagttaaataytactgtcagattacttggactttgtggaggcttagttttatactatgaagacaggtctgttttagttttaccattaatctcagattaaataccttattcttgggacatagtctttactcctaagacaatgaaaagtctaaggtgtttaccccaaccatctaattggatsggactcaaattctaaacttcatctcccttagttgctgaggtatctatttaactctttctgccttccagctttgttttctgctggtctgtttgtattcttccctgtgtatgtacattttagggatcagctgaggatttgagaacatttatgcccagattttcgggatctggctttctccttttggggatgtctcctcaatttccagctgctctcataggccagaactccatgttacttcaagacagtaagactgcagcatttgacttgagttctagctatcccagaagtgcacaacatgggcatgcgtttgaagggaaaagccatatttaaatatggatctcacctagtgttgttctgtctttttaagggctcagtctcctgatttctgcttcttttggtcatttccagtacatttagatagttgcttttgtatttgtgttttgtttatttataatttttacttgctgagggttggtctgatacaaactactctgtcagtgccagactcttaatttggagctttattgaattcctcaatcttgccttgctgttgccttgctgtcttacttgcaggtctttgcaaatattgtttcctttgcccactccatttttgtatctaccccatccttactccacttcacttatttgcctctgaccagcttcatcccttcttcaggtgttgtgctagatgtcagttccttagtgaagcctttcttgagtccctaaactatgttaagtcctgctgctgtaagttttcagagtatactgtactttcatcatcataatccttttgatctttgctttctgtctgtcctccccgtatactgcagacttcttgaatataggaagtcttactcactggtatattcaccgtgccttccacattccctggcatatagttggtgctcaataagtattaacttaggctgggtgcagtggctcacatctgtaatcccagcactttgggaggctgaggcaggaggattgcttgagcccaggggttcaagacaagccttggcaacatggtgaaaccccgtctctaaacaagattttttttttttttttttgagatggagtcttgctctgttgcccaggctggagtgcagtggcgtgatctccactcactgcaagctgtgcctcctgggttcatgccattctcctgcctcagcctccagagtagctggggctacaggcacccaccaccatgcctggctaattttttgtatttcagtagagacagggtttcaccatgttagccaggatggtctcgatctcctgaccttatgatccgcctgcctcggcctcccagagtgctgggattacagatgtgagccaccgcacctggccacaagatttttaaaaataagccagatgtggtggcacacacctggtctcagctacttgggaggctgaggcaggaaaaccacttgagcccaggaggtcgaggctgcagtgaaccatatttgtgccactgcactccagcctacgtgacagagaccctgcttccaaaaataaaaaaaattaataagtgatggatagatggagggaacttggatggatgatggtgccagaaatcactaaagctttttatttctaattatcattaatttttgaggagcctaatttggttatgatatttacattgatagttttacaaataataattattttaattgaatattgtttgttaatttcttcccttagttatgtttgcttatgaacagtgcctgcttgtgctgggccatcaccctgatatttggtatgaagctgcccagtatcttgagcagtcaagtaaactgctcgcagaaaagggagtaagtgttccttccctatccccactttgatatttttgtggttttgatatagcaattatttactgaaaaatataactgaattttggtaataaagcataagtattgaaaatttaagtttacgttcatatgaatcttagtgacactcatataattagacctccttagaattaaaataaactggcagttttttaacgtatcaaagtaatgaatcatttagagtacttgcatggttattttgtaagttaaaataatgaaaggagtttttggaatttttttagaatccagaaatgcatatgtgtttatgtatgtgtgtgtgtggatacatatatatgtgtgtacatacatgtatgctttcttagacacataaataaaataaagtagatgtaactttattaattttattctctcacaactatattaaaattattgaagatgagctttcttttttttctaccaggatatgaataatgccaaattatttagtgatgaagctgctaatatatatgaaagagccataagcactttattgaagaagaatatgcttctttattttgcatatgcagattatgaagaggtaagtaaaaatgtttagagccttcttataattcaattttttagtgcaggactgaactttttttctggctgcttgtttgccaggcatattgcttttggtagacagagatgatgccaaatgaacagttattagttgtcagcttatactatatttatgctcaatggagatgccattgggggtgggaggttatagcctttggattccttggagctcaaatcctgcttatttatgaccatatgttgatactcacttcttctgtaccaccttagagtcgcatgaagtatgaaaaggttcacagtatatataacagacttctggcrattgaggatattgaccctaccttggtgagtaactttacaaatctttttttccacctttacagtcttatctaacaaaaaataatttaaatttatatacaataaaattcactgtttttgttgtatagttctattaatcttgacaaataacattgagtatgggatccccaccacaattaagatagaaaacacctccaccatcctccaaaaattcccccatgtgacccctttgtagatataacccttccctctgcccttacctctgacaattactgatctgttttctgctagaattttttctttttaatgcagcagtataaaatagatacagaggcactttctctaacactttctttgtgatcatggtttgaagtcactttatgccacagaattgttgcttaatagatatttctttttaaatgaggcgggagaaaccgacatcctgggaagaaattagactgaaactcactttatgctaaatcctgctctatcatagtggttttcaaagccccaagtgcaaaagtgcagtgatgctctcccattgggagaggaaggggacaggcttgtgggtgtgtctctagaacctctgcctcaagtcaattatagctacactactttttcttgttaatgatttatattgggattccactgctataattcctacatttattcatcatcttataattcattccacaaacatatctggcaaatatattgctagagtctatgcattgtgctagactccagcaacattaatgacaaactagatgaaattccttttcttgaggaactcatagtccatccatccatccatcaaaactgggtaatatagctagacattatcaatactgggcaaaccaggaccctactaattagtcatttgttcactaaacaaaactgcatactcatgatgtactggacactctgtaggtgctaggtataaaatggctcatagtttatccatgaagttctattatatgttgtttggaaaatagagtagtgggcttttaaaaagaaaccaagaaaatgtgaagttaaacatgtattgcaggctgggtgcggtagctcacacctgtaatcccagcactttgggaggtcgaggcaggcagatcacgaggtcaggagattgagaccagcctggctaaaatggtgaaaccccatctctactaaaaaacaaaaattagccgggtgtggtggcgtgtgcctgtagtcccagctacttgggagcctgaggcaggagaatggcttgaccccaggagacagaggttgcagtgagccaagatcgcaccactgcactccagcctgggcaacagagcgagactccgtctcaaaaaaaaaaacatgtattgtaagacgtgcttgtattaaaccaacacttgagttttttagatattgacattcattaatggagtatgttctagtagtgtcacacttttcactcttaaactttaatttacatattctagaattagataatggtgatgattgcacaaccttgtgaatatatttaaaaccactgaattgtaaagggtgaattttgtgctatgtgaattatgtctcaataaaaaaataaattaatttgcatgcatctctaataccagaaaaaaattagtttgtggatttaaatagaatattatctaaattcctactttctaatttattgggtattgaggattgctttcttatgcaggaaacatactgtctaatttatagaacacaaatactttcttttcataggtatatatccaatatatgaaatttgcacggagagcagaaggcatcaaatctggaagaatgatatttaaaaaagcaagagaagataccagaacccgccaccatgtctatgttactgcagcactcatggaatattactgtagtaaggtaaatactgaaatacaagtgtaaagataaaacaacttccttcatctgaggttcgtaaaagaaaggtgattttagcttctgtcattaagcttttattgctccatttcgtaaaggcagtctaagtgtatctgtgtaaaattttatggagcatcatccaaatccccaactacttgctaatttatgcttcattaatcactatatttctaatttgtgctttattaatcactatattaatcactatttmgtgatttctaatcactaaactcctttgaatagtttctagctcagcaatttttacttaacatgattttaatttgttttaattcttacatattttgtcatatgtaggtataattttaatattctttcaagtgttttttatctgacatttcayggaaatctgtactttactttctttacttgtaggacaaatctgttgcctttaagatttttgagctggggctaaaaaaatatggagacattccagagtatgtcctggcctatattgactatctttctcacctcaatggtaggttgattctagaatctataatgattacttaatattaaaccatgtggaattatgttgctagatttcttccttcttgaatgtattataattttgacatagcagacaggcacttgttaggcactcaagaaatacttgtggtatatcaaccatgaatatatttactgagcaatggtagatgttttttgactctgcagaactgtctttattcagtaaagtaccatcagtagtgggataaagcttcagagtcagagtcaggagacacagagttgtttatattcatctctgatgactctgggcagatcatctcctgtttcctggaaggaaaacaaacaaacaaaaaaccctctagccaccaaaactcaaactcaaaagatgcccaaatagtaaagtaaaacactttgaggatactggggaaaagattcaaaaagaaacattttggtttttagtatttatttatttatttatttatttatttattttttttgagacggagtctcgctgtcgcccaggctggagtgcagtggcgcaatctcggctcactgcaggctccgccccctggggttcacgccattctcctgcctcagcctccggagtagctgggactacaggcgcccgccacctcgcccggctaattttttgtatttttagtagagacagggtttcaccgtgttagccaggatggtctcgatctcctgacctcgtgatccgcccgcctcggcctcccaaagtgctgggattacaggcgtgagccaccgygcccggccggtttttagtatttatttccctattctgttgtacgaataacactggccatcctttattgagttcctaccaggcactgtgctagataattcatatacgtatatcatttagtctagttaacaacagtccacaatatgtaatttcttaacaaaaaaagatgtagtataaaagttggttttttagctaggtgtggtggcgtatgcctgtagtctcagatacttggatcacttgagcccaggaattggaggtcacagtgagctgtgatcacgccactgtactccatctagcctggatgacagagcaagaccctgtctctaaaaaacatttaaaaataaatgaataggccgggcgtggtggcttatgcctgtaatcccagcactttgggaagccgaggcaggcagatcacccaaggccaggagtttgagactagcctggccaacacggcgaaaccctgtctctactaaaaatataaaaaattagctgggcgtggtggcaggcgcctgtaatcccagctactggggaggctgaggcaggagaatcgcttgaaccctggagggggaggctgcggtgagccgagattgcgccattgtactccagcctgggcaacaagagcgaaactctgcctcaaaaaaataataataataaagtaaataaataaatataaataaatacatcactaaaagttggcttaagaaatatgcaattatatgtcatgtaaatgattatagaattagatatcataggtataaatcagtaattttaatatttcagaaaaatagagcattccatttacctaaataatataaaagagtaaaacttaaatatgattttgtatttcagcttaatgattctacattctgggaaaaagacttaactccaaaaaatgagatagtggggcatttaatattcctcataaatcttaaattgttttgcctaatttttttttaaaatagttactagtatatgtatttttatttttttaaaaggaggatatctggtgttagcactattgtcttccaaaatcagtgtcttagatgattctttcattcatctatccatctatccatccatgaaacatttattcattaccttctggttactagagtctgggaatacaaagatgaataggatccagaaaaacgtttttgtgggggaatccaatgtgtaaatataattgcatcatcatttgatgtttcactgtagcatagttctgaggttaggtgtataatcttaaacttcagttttctcatctgcataatggtcataataagaatacctttcataggactgttgagagggtaaatgagtttttgcatgtgtttcacttatatatagaatgttgtgattattccataaatgttatgatgagggtggtgatcattaaaaatgtgctaaatactgtaatagattcctgaaggaagtactatggaagcacagagaagagagtataatttaagttatagagctatgctgcacaattatggtagtcactagactattaggtattgagcacttgaaatgtggatagcctgggctgggtgtggtggctcacacctgtaatcccagcactttgggaggccgaggcaggcagatcacgaggtgaggggttccagaccagcctggccaatatggtgaaaccccgtctctactaaaaatataaaaactagccgggcatggtggcgtgcacctgtagtcccagctactcaggaggctgaggcggaagaatcgcttgaacctgggagacagacgttgcagtgagctgatattgcgccactgcactccagcctgggtgacagagtgtgactccatctcaaaaaagaaaaaagaaatgtgactaggccaaaatgagttgtggtgtaagtgtgtaaatacataccagatttcaaagacttagtacaaaaaaaaatgtaaactatcttaacaatttttcatattgattacatgtggaaataagatttggatatattaggttgattaaatatattaatttcacctgtttttacccattttattaaattccatatgtggcttgtattatattgctgatggacagtagtgttctagagggtgtcatagagaagggcacatgagttggattttgagagatgagtggtagttagccaggtaaagaaagataaatgcattattccaggcagagagcacaacacataggcaggcagtgtgaaagttctgtggaatggtaaaaagtgtgtctggagcaaagcttgggataaaacagaaaaagataaaatgtaagatttgtttaacattttttaaagtataatatgttaaattgaagagagaagccaaaaaaatagcgccatcttctttggtctaatatatttaatttcttggttttattttgcttatggacatgtaataaactgaataactactctcaggcaataaaaaacaactcctctgctgggttaatttttcttttgaacagctttattgaagtataatttgtatactataagtccatccattaggtgtacagttcagtggttgttagtagtagattcaatggttgttgttactgttagattcttaagttttaaaagataacttagagtttagcaagaagtgtcattttcccacttccagatatagaggacctcctgagactcttaaaatttaatacacctctgtcaacaattcttaattcatttacatttccatagttacctgccaacctagatattgtacctctgcaagagttaaagtagctaaatatagcatagtcctggtgcctcaaaataagaaactcaattatttctaagtttgagtttgccatccttccatgttcaatgtatttaaaaaatagcagtagtctgactaatgtcagcagatatgtacttgtcattatttttaaaaggcaaatgggatacctggttcagacggcactgttataaatggttttgcattagaactgcagtatagtagaggagggctgaactagaagggaaaaaaacatggcttgcagttactgctctgctactcaatcaccaagagccagatcaaatctcttaatctttctgaagctcaagtttcctcatctataaaaatcaagtgtgataatagttaaacctttctgcataggatttttgtaaggatgaagtgagataatgcatatgaaaatattgttgcatcgtaaaagtgaattaaaaaaaattaaaatctttttcaatatcctagaggacaataatacccgagttttgtttgaacgagttttaacatctggaagccttcctcctgagaagtctgggtaagccattgtgaaaagttgttgatcaggttctaaagacagctttcttacctgaattgtggtctatggggtgaatgtttgcttgagtatgagtttcaagagaaatttcctttccttctcaagttttattttacctatcagcagtacttttatacctgtttaarattatttttaaatttctgcacagtgattagaattgtttttaagagatgccatagcaatttattatcatctttcttgtatactatatatccctaaccagaaattgtggctcatgtctgtaatcccagcattttgggaggccaaggtggaaagatgactttagcccaggagtttgagaccagcctgggcaacatagtgagacccaatctatacaaaaaatgttaaaaattagctgggtgtggtggtgcatgcctgtagtcccagatactgggaggcggaggtgggagctggaggactgcttgagcccaggaggttgaggctccagtgagctgtgatcacacctctgcactccagcctgggtgacagagtgagactctgtctcaacaacaacaaaaaagatacctctctctctctccctagaaattgatattaacatgttaagagaggcattctgaaattttcacctcccttactcaaaagcaaagactcttgtaaattcgaagtttgttttacatattatgtctctgacttacggttttgtctcttgttagttttaccatacagaggaacaacactgtcaagtggtacagcggaaatattatagtaaggctttggagtcttgggttcaatatccagctagatggcaaatttcatagctataccaatcttcactttcttattaacaataatgtccaccagtgtaggattttttgtgatagccacatatctggtatataagaggcacttaatagattactttagtacaaaggtgcataatgacatttaagtagtctcagagcattaattttagctgttagaacaacgatgaggcaccagtttttccccagtgatccacgttaatgggaaacaatagcgtaatcatattagattttggagtatatttctattcatatattagatgaagaatgtattctacattataattcctgccacttaaaatgaagccacattattcaggagaaattagaaatctgtctaggttccttttccaacttctccacctagagtttatcctctctaaggtaagtctcatgttgaccacaaagaagcagcagctatactaaataagtaaaaactcaaaaatgggcttaaatactgaagtgataggtttataatttactttgaaatacttaagcaaaaataagatgaagcaaatatggcaaaatattagcaatataggtagtggtatataggtattcattatactattctatttttctatagtctaaaaatctttataataaaaagtcactttttataagttaagggaaaaagagagagcttaaggcgtttttgtaaatgaactccctgccctaaacccagaataattaaagtattgattgtatttcttttcttgcagagaaatctgggcccgatttctagcatttgaaagtaatattggtgatctagcyagtatactcaaagtggagaaaagacggtttacagcattcaaagaagagtatgaagggaaagaaacggctttactagtagatagatacaagttcatggatttatatccttgctctgcaagtgaattaaaagcacttggttataaggtatgtacttaggatcaagatgtggagtgtcctcacttttccagtgttttagaagagttcattgataacctgcactctaaattctgaaatgtgaatctagttttagaatagatttgcaggaagcaagaaaaaagttcaaagattttccttgggtttaggaaatcctgagtgtcaaagtagctgaacaaaatgagaattgaaatgggatttaatagtttcattctgtccctgaaattgtcagtgccttatatcttatatctggtgggcaagatggagggagtgtggagggaagaaaaacaaaagaaaatctgaatgtcatcttaggtattacttttttttcctaatagttcttatcaaattgataaatatgttttgacagatcttaaaccaaatgtagttcctgttgcatattttgtaagatataatgaagaaatattacagcttgttaaatccataaagttccttgagggatttgtattcttaaaacagtgctcctycagtggcctttgggggaattagctcatctatgaatagaactcttctatacagactactgagtcataagaaaacaaatctggcacctgaacctgytcaggccacagggagagattaatatttacaaagccccagtaacagcccttgctgataaaaccactgttatatcatctcttaatctttctgtgacatgtgaacaaagactaagatggaaattcacagagaagtccttggttgatctctttaagccaaccaccattaggatgttcctgaccatcattctccttttcctcactgccctcttttagcctgggtcttgctctgtctgatccagataaaatattttgagaaaaaactacccataattgatattcagacatttttgttaatggaagccctatttctgtgccagatgcagattcctggtatgaaccataggattactgctcagggataagtagtttctgcttctagttttaactacttctcaatgaaaagtcaaagatagtttaagactacagtaaatcctcatttaacatcattgataggttcttagaaactttgactttaagctaaatgatacacagcgggtcctcaaataacttttttgtgtttaacatggttttgttataaccttgataagaaaaaaattggttttcctatacatcgtttctgtcttttttttttttttttgagatggtctcactctgttgcccaggctggagtgcaatggtgagatcatggctcactgcagccttgatctccctgggctcaggtgatctcctgttcagcctcccaagtagttgggattacaggcaaatgccaccacatctggctaatttgtgtatttttttgtggagatggggtttcaccatgttgcccaggctggcctcaaactcctaggctcaaggaatccacttgccttggcctcccaaagtgctgggattacaggcagcagccaacacgcctagcccatcatttctctaaaagttgcagtttcctagaacctatacaatgttaagtgagggacttactgtactttgtgcaattgctagaaaaagctatttcaacttttccaagatgaaaatgaaaattaaggcagttaattaaaataaagatctgccaggcacagtggctcacgcctataatcccaacactttgggaggctgaggcaggcgatcacttgagcccaggagttcaagaccagcctgggaaacatgatgaaatcccatctctaccaaaaaaagagagaaaaatacaaaaattagccaggtgtggtggcgcctgcctgtggtcccagctattcaggaggccaaggtgagcccaggagggaagctgagcctactttagtgagccgtgatcaagccactgcactcctgactgggtgacagagtgagaccctgtcttaaaaaaataaaataaaaaataaaaataaacagaaaagaaagatcttatagtggccaggtgtggtggctcacacctgtaatcccagcactttgggaggccaaggtgggtggatcacctgaggtcaggagtttgagaccagcctggccaacatggtgaaaccccgtctctactaaaatacaaaaattggccgggcttggtggcgggcatctgtaatcccagctactcaggaggctgaggcaggagaattgcttgaacccaggaggttgtagtgagccaagatagcaccactgtactccagcctgggtgacagagtgagactctgtctcaaaaaaaaaaaaaaagagagtaagtattcaggagtagaactacttcctgaatatgatgttttccatcttgtatttctatttctactcttttgttttttggggaaggattaatgtgcttctgtgtttaacggtgggtggtatggtatgtatgtatctgtgagaaagatttttaaaaagcgatacccaatgtgtctaccatttagatttgcttatataattaataccagatgtcaccaactccatttcaacaaattttgagaaagtggaatgcttttatatcccttgatggcggcaaaaaggggttcttttgtttctagacagacagagtaacactgggttgtctggagcaaaggagctcctctgagatagggcctctgttcataggtgactgtattgcttcctttggcatatcttgtctcagccctggcagggcaatgctagtgtactgaaaagaagactgtggatggatttgaggtcagagaggcctgccctcccaatcctcctctctctacttcttattagctgtgtgacctgggaaatatcaaaacctttgtgagcttcagtcccttctatataatggagatgttactatttccctcattaaaaacagaatggctaaaattgcctgatgaatagtgtctgctcagtaaatattccttgtcccctgtaataaatagtacattggaaataatttttcattgcattagcaaaatcttaaccggtgtgatgccttcacaaaacaggaagtcacttaatccagcttcttcatttaatgaaactggtgttcaattctaatggaagggaggtgtcagaagatctaaaatcttgaattttcctccaaattatcctggcctctacttggttcccagtctgactacccaaaaaagcttgtatctgtcctacaaatgtcctgcctggcaacactaagtttaatgacttgtaacttgtgtggggtaaagttatgatacactgagtcttagaaccaaatagctttccttgttgagtaacaatctttaccatcattagagtccttgcttatccgtctccattttctttctgtggttttgacccagatattcacactgtatcctcaaggttattgcatgattattctctagtagtccctttttcaggtttaggattcttctgttctgcattttcaggatgtctcccgtgctaagcyagcagctataattccggacccagttgtagctccttctatagtgcctgttctgaaagatgaagtggatagaaaaccagaataccctaaaccagacactcagcagatgattccatttcagccacgacatttagcacgtaagccatgactttagatccagtactgagacgttggtttgtttgttgatttaaatccaaagcgtgggggtaaagtgacatggcctctcaattgtgggttaattattagacttaggatcactatgacaagtgatttagctttaatctttgaactagattaactaagaatgtcctaaaaacaaaacttcaatgatccagattccaggaacccattttggcagtaatacttggttttcagaaatgctgctatggccaggtgcagtggtttacacttataatcctggcactttgggaggccaaggcaggtggatcacctgaggtcaggagtttgagaccagcctgactaacatggtgaaactttgtctttattaaaaatacaaaaattttctgggcctggtggcatatacatgtaatcccagctacttgggaggctgaggcaggagaatcacttgaacccgggaggcggaggttgcagtgagccaagatggtgccattgcactccagcctgggcaacaagagcgacactctgtatcaaaaaaaaaaaaaggaatgctgctatgtgcagattacctgaacagctggtggaaactttcttcactgatagatttggtttctttacttaggaatgggttagtagcctctctagattctttttgaacaaggcccttctgattaaatacactgttgaataattgacttgaaacaggattgctaaacaaatgacttgtgtaactcagaaacactctttgacaaaaactgactttagttcagtccctggttgtcttacacaaagtcacttgtctacttctctgcctcccagtggccacggcattgagactgctctgtctcacccactttggtttggtaaagccctagaagtattttcagtgtccagaacaaagcagcagacatggaagatctttatgtgcaagtcacttgattttagctctgtgtagaaattcttccattccacttgattcatacttttctttttctcacagctccaggtttacaccctgtacctggtggagtgttcccagtccctcctgcagctgttgttttaatgaaacttctccctcctcctatctgtttccaggtttgttcacttattttcatggtagatactggctctgtgggtcatagtaattgtgtataaagttactactactttaacttgtcagattactgggattaaaatttattcatgtcaaaaatagggtccttttgtacaagtggatgaactgatggaaattttccgaagatgcaagataccaaatagtaagtaacagaagctccatttcagagtgtcattccacgttgttgtctcataggcagtagagattattattctctgccactgaagttttcgaaaccagccagccaatttgaagtgcagtgaaacccaggagttacccaaaccctctttggcagagagaggcttattcacattgaattccactaagtaaaatgtcataaaactttatcttttctattcatgtgaacatgcactatcaggcttggcttatgaaaattattagttttaacagcagcttttgtctttttctttaattatttagtatcagtagtactatcccatgttttgctaaaatagtaggctatgaaataaactataaagtatccacagttgaacatacataccctttcatagtggaatatgtttttacgttttgttgttttgttttaatagctgttgaggaagctgtgaggatcattactggtggggccccagagctagctgtagaaggcaacggccccgtggaaagtaatgcagtactcaccaaggccgtcaaaaggcccaacgaggattcagatgaagatgaagaaaagggagccgttgtcccccctgttcatgacatttacagagcacggcagcagaagcggattcggtagggttttaaacgcctctrcagaaaactcctgtccaggattccttttgcctcaagtggtatgtttaaaagagacaacgctttgttacaaggttcttggaaacaaagttgtattgtcattggtgcctctatcacatggttcttgagaaaaaacaaaccaacctgtgtgaattttagaatacggaacagacctatgctctaagcaaaattaggttttcaaaaatgtgagaacagtacaaagtggcagaaccacattttgttccctcttcaagggtgtcttgtatgtgccgcttgaagatttgtgagtttttcaacagttttattttaaaaactggatggcttatgattgtaaagcattttatcacattttctgaaaacaattgttcttggtttgcttatgtagagtcctgccttattgtttgtttttatttatggcagaatgtatgaaatccgttttgtagtttcaaattttaaaagtcctttaaaaaataaaaggattcagaaacatcatgcttcctctgcttctttcagattttatttacaataactacttatgttatttatccaataccatttaaaaataaatgtcaggacaaggaaaagtcatcttgtatttactaaatgtattaatcacatactccttcctggtcttttttggtgctaactaaaaacatttttaagaggcaaattaaacattttagaaatcctcaaatatgaatgcatttgctccccagtaaatctgaggcagattaagatcctgttaatacttttgtctctcttgaaagcaacctaagtgtggaaattcctttaaccacctgctgtcttgttctcacatagagtatctcttatctaaaatacttgggaccagaagtgttcaggattttggatttgttcagatttcagaatatttgcatcatacttaccagttcaccatccctaatacaagagtacaaattccacaaaactccactaagcattttctttgtgcatcatgttggcaccgaaaaggttttggattttggaacatgttggatttcagattttcagattagggatactcaacttgtatattttcacaggggcccagtgctcaagaacatttttttttccatgagctaaacatagataacattaaggaaaatgacatttatttaactaaattctaattacagtgagcaaaaacttgtcatgcaaattaagtccaaagaactagactttgctctttggtaacaacattacctcctcttctcattactagttaaaaactaaaaagcaggagggaaacaaaaaggaggggaggacaagtattatgattataaagaaatgatcttacatattagaaacaatttagtttagaatttgaattcagatgtgattaaataatctgacatttaaaatcagcttcaaatgtcccataaaagtcttacttgtaaaaaaaggttatgctgaatcatttactcatataaatttatatgtagcaaggttatataaattggtcaaaagtgtgtttagtttccagtattttcccattaaagctaaaaatcgcctctcaaaacaaagtcagctgcctctaattcagactttcttatcctttcaagcatcactttcaagttgtgagttttttaaaaatatcagttaccatcaaaacttaagacacaagtaggccaggtgyggtggctcactcctgtaaatcccaacactttggaaggccgaggcgggcagattatttgaggccaggggttcaagaccagcctggccaacaaagtgaaaccccgtctctactaaaaataccaaaaaaattagctgggcgtggtagcccaagcctataatcccagctacttgggaggcgaaggcagaagaattgcttgaacctgtgaggcagaggtttcagtgagccgaggtagcgccactgcactccagcctgggtgacagagcaagacgctctccaaaaaaaagacaagtaataccatatggcatagactttaaaatacagagatgtaggctgggcgcggtggctcttgcctgtaattccagccctttgggaggctgaagattacttgaggccaggagttcgaggccagctggccaacatagtgaaaccctatctctactaaaaataccaaaaaaaaaaaaaaaaagttagctgggcatggtagcacaagcctgtagtcccagctactctgcaggctgtggtgggaggatcacctgagcccaggaggccaaggctgtagtgggccatgattgcaccactgtactccagcctgggcgaaagagtgagaccctgcttcaaaaaatatatagaggtgtagacttgttcctgaagtgccatttttggtggttagtatcgggggtgagcagcgactatctggggctggtggtgtgggggtaagaagaatttaccaagacaatagtaggtagagaaaggtagattagagaaggtatgaaaatgcactgcaaggttggaacaggcagagaagatgcttgtctgcaaagagacaaaggcttgctggggattttataagatagtgccatgtgctgaagagggttttatgtactactgagaatgccagtgttgcagtgagctaacttgcaggtgtctggtgataagttgggtgcagtacggctacatgtcctggaccatgaagaaaggcagactcataatttatctgcttttccctgctcccaccagcctgactccctttccctaattaggactccacagttagtgttttgaagacaaacaggccgggcgaggtggcgcacgcctataatcacagcactttgggaggccaaggtaggcggatcacctgaggtcaggagttcaagaccagcctgaccaacatggtgaaaccctgtctctactaaaaatacaaaattagccaggtatggtggcacatgcctgcaatcccagctacttgggaggctgaggcaggagaattgcttgaacctgggaaggagatgttgcagtgagccgagatcgcaccattgcactccagcctgggcatcaagagcgaaactccgtctcaaaaaaaaaaaaagaagacaaaacagtttcaaatacctgtaagtgatctgccaaagtgttcccacagacaataaaacaaagccatgcgaacatgtgtgaaaaaccattttttagcgtgtgtgcgcgtgcgtgcgtgcacacacgcacacacacacttggtgaaaagtgtctttaatcactttattagtccattcccacaatgctataaagaaatacctgtgactgggtaatttttaaagaaaagaagcttaactggctcatggttccgtaggctgtatagatagattagtggcatttgcttctggagaagcttcaggaaatgtataatcacggcagaaggtgaaggggaagagggacgttttacacggccagggcaggatgaagaaaggggggaggtgccacacacttttaaacaaccagattccatgagaactcactgtcacaagaacagcaccgagaggatggtgctaaccctttcatgggaacttcacccccctggaccaacacctcccaccaagccctacctccaacactggggattacaatttgacatgagatttggtggggacacagattcaaaccatatcaattattattaaggctactatgtatattataattgttcctattgcatttatttataggatttttttctcctagaaatgatcagctctttgagcataaaaaggattctcattagaagaaaacattttcgaatgttctaactgctagagatatgtatgaatttttagtttttaaggtgattctgcctgatatttgataattccttttgttaaacagttcaacaagcagcatgatgttagacatctgaacttacctttggaaatctaatgtgcagactcatgggataatcagtcctacaattccaaggactcatatcagtattgctggacccaaagaaattgccaaaagatatccatctttttcctgtttataaaagcaatgacagcatctcctcaagattctagaactagacaaaagtttcaaggactatatgtatgtccttcctaaacaaaaattagtcaaactctggcctttaccactaaacttcaaacaagaggttgcacctatgtggccacatctagtacagtaaaaggttaatagaaactactagtaaactttctgaacaaccaaactgtaccaaagaaaaagaaggaaaaacacatcatttctgttagtatattgaccctggtcaataattatgaatttatttgatattataaccctgtattggcctatagttaataaatgttgagttcaattttattaaaccatagtcatcatggtcataaattattattattattttttttaacatggtagttctttgactgtggcaatgagcaagtgaacttacgttttacttaataaaaatttcagccaggcacggtggctcacatatataatcccagcactttgggaggccaaggcgagcaaatcacctgaggtcaggagttcaagaccagcctgggcagcatggtgaaatcctatctctactaaaaatacaaaaatcagccgggcatggtggcgcacacctgtaatcccagccactcggggaggctgaggcaggagaattgcttgagcttgggagctgagattgtgccactgcactccagcctggacaacagagtgagactccatctcaaaaacaaacaatcaaaacaaaagaaaacaaaaattttcataagtctttttgtttgttttgagacatgatcacagcataatcctcccacctcagcctcccaagtagctgggaccacaggcatgcaccaccatccaccatacccagctaattttttaaattttatgtagaaacaggatctacctgtgttgtccagcctggtcttgacctcctgggctcaagcagtcctcccacgtcagcctcccaaactgctgggattagccaccatgtgaagcccttcttttttttattttttattttcttgagatagggtctcactttgtcacccaggctggaatgcagtggcatgatcttggctgaatgcaacctctgcctcccgggctcgagcaatcctcccacttcagcctgctgagatgggagcacaggcctatgccaccacgcctggctaatttttgtacttttagtagagacaaggttttgccatgttgcccaggccggtctagagttcctggcctcaaatgatctgcctgcctcggcctcccaaagttctgagattacaggcgtgagccaccttgcccagcccctcttgttttaaggttacttttaagtcaagaaaagtgacactccatcgaaccaggcctatagcttagttctggttcttaagttcggtaggcaataaatgtaagtcaggtgtgacagaaacccacatgagggacagttttaagtagaattatatgtttagacttttaacacatattttgtagaactctggctatttctgaaagtaccagtgaacacttgatcgtttaataaacagagcttacctgggcttaaagattatccccttccccacccattgaagttgctttgaatactatgactaaaaaggctttccattaaaataattatataatgcaaaatccaatataaatacacacttgcaaatatcattgtagttatttatttagattgtttttaaatgagatagtgcctttaaatatgacttcatagcccattatccattaccattcattcatccactcatttgttcattcatgaattcatttagttcaaataatatagaggtggagatrgggagaaatcactggggtgggggtggatgtcaggaagtaagcaaatgtaagactgcagctctagtatagaagagatgatgaacataaacaagtcttaggagaggacaggaagaaaaccttccctgtaggcccgtaaaatgtgcttgaatgaagggaggttgggcgctaccagtggaacgtaacaccacagcaaatgtgcgcccacaggtagagggttacatgttcgcctttgtagttaaaaaagaaaggtatagtccttttccatgtacaaagcattctatcattcattaccaaatgtaatcctcacagcaacagtgtgaattaggagtgttcccatttaacaatgaaaatgccgaggccttggggagaatggctggtccaatgttgtacaaccggtaaggcggcgatagaggagaaaagactaaaacccagatctttctctaaattaggagctttgtgcacaatcctgctaccaccaaatgttagaatcggaagggagcttaaagaccaagtctagtcctttcattttaaaggagttgggaatgggccctgatttgccccagctggtacataacagagtggagatccaagccttggtttcctgacagctcccagtctttccactctaccacctggcctcaaaatgaaaagaaacacaaatgttctacctataaatcagagctcgccaaaaggtcactagaaatcaaacagcaaacacctattctctttgaaattcaccagcaaagctggtggcagcaacatttcctctattcccaggaatcttaaggctttggagaaatgagaataagcacctccacaaaaacagaaccgctgaataatccatttagaatcttggccagtatgtgcatactataggcctattaagtcaaacttattaatagcttttcttcacagagaaaaaagttcatatatacctactgactgcatttgatcagtaagatatcatgtcagtgtccttcttacctgaagtacatttatggctgggtcatatcgtgacataaataatcacattttgtagcttgctttagacggaatgcgattttttttttttttgagacggagtctcgctctgtcacccaggctagagtgcaatggcgcaatctcggctcattgcaaccaccacctccagggttcaagtgattctcctgcctcagcctcccgagtagctgggattacaggcacgtgccaccacacccggctaatttttgtatttttaatagagatgggttttgccatgttggtaaggctggtttcgaattcctgacctcaggtgatctgcccgcctcagcctcccaaagtgctaggattacaggcgtgagccaccgcgcccggctggaatgagatttttaaaaacaccaggactgagaatccatccacccaaccaagagccaacaaagtagtagttactttaaacattcacttatccatgagactactgaagaaatccaagaggcttggtgatactgacctcactctcagttctatccacaagtagtaaagtactgccaaatacacttagcaatttcaggaaaagacacttgtctccacaacctgttactgaatgcagcatatagaatccattcgattctggaggacaacacactccaaaggatgtttcgttttggaaggagagctgtaggggaaggtacagggggatgcttagcaatgcttcctgagtgactaaatgaacgaagtggatctccctggcccttagtaataatcctatgagattccaggaagaaaattagcttatcttcatagagcaacaacaaaatgattcaatatgaatattgtggttctgaagtttgcttccttcattcttgacttttgccagttgcagaactccaccagtggacaccgaggtagtgggcggccaagagtctgtgaagccagttattcatgcatcaagatttcaaacggtccaaatggaactctggcaatgtaagaactcaggaggggaaaaatatcttgcaagaatctactcttacaaaagaagagtttttgagatttaggaagaatgactgcaggaagtggtgatcagcgctgtgcagttggggttaagctcctctccttcagccttggagcggcaggaaaaggccccaaacactctgaggctgaggcttctctgcccaggaacccaggatcatacaaccgccaggcacagtggccacagagcagcctccaccttaagggaacaattccagacacgacctcattgaatacaccatggaagatgttatcttctttaaaagtaccctcatggcagggcgcagtggctcacgcctacaatcccagcactttgggaggccaaggcgggtggatcacgaggtcaggagatcgagaccatcctggctaacacggtgaaaccccgtctctactaaaaatacaaaaaaattagccaggcatggtggcaggcgcctgtagtcccagctacttgggaggctgaggcaggagaatggcgtgaacctgggaggcagaggttgcagtgagccgagatcgcgccactgcactccagcctgggcgacagagcaagactccatctcaaaaaaaaaaaaaacccttacaaggaaaaaggcaggcaactgccatctcccagtcacgcatccccaggaacttggctgtattatatcctgcctcagagacaaactcatctattgtaggcctggcctggattgctgcctttgaaaacaaggaaaggtcagcagaatatcaaccaaggcatggaatttccagggaggtctcatttcaaaatgtcatcaacaagaaccacatggacctctgtgagagggatgattaaactagcctgagtttgaatgaaaggattatgtgtacccaacctgtaacaaacaccaaggaggtaaagtggcagagggtcttgtatgagcaacagccctttcctgataactttgtggaccggcggttcctggaagagctctggaaaaacatccatgctcggaaataccaatattgggctatggtatttgagtccagtgtggtgatcctgcagctgtgcagtgtttttgtttttctggttatctggtggtatatggatgagggtcttctggccccccaatggctttttgggactggcctggcttcttcactgattgggtatgttttgtttgatctcactgatggaggtgaagggcagaagagtgggtggacccggtgggctgacctgaagagtgccctagtcttcattactttcacttatggcttttcaccagtgctaagaccctgacagagtctgtcagcactgacaccatctatgccatgtcagtcttcatgctggtaggccacctcatcttttttaactatggtgccaatgatgcctttgtatccactgtatccagcacactatccttgaacatggccatctttgcttctggatgcttggcttccaccttccccagtccctgcatgtcttcatcatgggaacacttgccatccagatttttgtcctgtggctcatgctacagaagaaactaaaggcacggactcccaagggctatgtggtggtcacactgctttttgccttttcggtcttggaaggcctactgcctattagtgctgtgggagccgtactctttgcccttctgttgatttctatctcatgtctctgtccattttacctcattcgcctgcagctttttaaagaaaatattcagaggccttgggatgaagctgaaatcaaggaagacttgtctaggttcctcagctaaattagggacattctgatagactagcctcctaactagtataaaacttaaagacaggccgggtgtggtggctcacgactgtaatcacagcactctgggaggcccgaggcggatggatcacgaggtcaagagttcgagaccagcctggccaacatggtgaaaccccgtctctactaagaatccaaaaattagccgggcatggtggcgcgtgcctgtaatcccagctattcaggaggctgaggcaggagaatcgcttgaaaccgggagatggaggttgcagtaagctgagatcgcgccaccacactccagcctgggtgacagagcaagactccgtcttgaaaaaataaaaaatgaaccaaaggcttgggtggtgagggtgcttatcctttctgtaattctgtggatgaaaaagctttctgggaccctcttgaattattcgctgtaacaaatgaagtgatgtggtttctattaaaaaaataataatacattcaaacaaacaaaaataaataaatatgaataaaagtaccctcacaaaatgcagccagtctgccagattacagtgacccagattctccagtctcctgcctgggacccaaaaagatacatctggctctacttttttttgttaaggagagacagggtctggctctgtcacccaggctggagtacagtggcatgatcatagttcactgcagcctcaaactcctgggcacaagtgatccttttgcctcagcctcagcttgtagctgggagtacaactgtgtgccaccacaacaggctaattttttttgtattttttgtagagacatgatctcactatgttgcctaggctggacttgaaatcctgggttcagatgatgctcctgccttggcattccaaagtactgggattatagtgtaagccaccatgcccagccctgttttttgttttgtttttttaatttatcacatcattatagattagaaccaacatcagtgctgatctgcatacatgtaatttctacctgagtttctatagccagatccaagtccttgtataaaccctgggaccatcagcaatctcaaaaatcctgaaagcagaatgtattctgactctaccaggtctgaaatccttctcatggagtatctgatttcctccccatcagtcctattggaatacctacccaactgcttcttcaagtcttccttcaaaacacaaaatcactgcacttccttacaaagaaggatcagagaaaacagctgcttgcagtaaaatgtagcccttcctcctggttgtgcaggagtggctgctggccttcctggagtctttctgaaatggcttccaagtttcttttcttttttctttttttgagacagagtctcactctgttgcccaggctggaatgtagtggtgctatctcagctcactgcagcctctgcctcccgggttcaagcgattctcctgcctcagcctcccaagtagctgggattacaggcgcgtgccaccacacccagctaatttttgtatttttagtagagatggggtttcaccatgttgcccaggctggtctcaaactcctgacctcaggtgatctgcctgcctcggcctcccaaagtgctgggattataggcgtgagccaccacgcccggctaacttgtaagtttctcttagcttcctgtacagaaggcttcaggtgccgatattactgcattactcatacagtaatatagtcttaccccttgctgttgtggcagttggtcattccaacttcatggctctgcttctaatataacatccctgtctaaaatgcagacatacatgtgtacactttaaaaaaaaaaaaaaaaaaaaaaagaacagatcgtctatgagacccaaatcactcacgctcagaggacatgtcaggaattctggtcactgaagttccttgaaaaataatgctcaaacaccagggatttcctatgacttcctcatctaggagattcgtgaactcaagctattttatctgaaaacagttaaatctaattccagaatttaattcaatcatcacatctgtgtattgtctcagggtcaatttttcagtaagaattccagacatttctcttcgttcacattacagtaaactatttttcaatacatttcctccttgactttcaaggcttgaaagtcaaagactttcctttcactagatctcataagtcataactgctctcaaccagatgcaggagtaattttgtataaaagaacaagctttttaaagtccaataactgtatctttgggggaaggttaaaagaatgtttaaatacaaaaaagaaagtaaaaaaaaaaagagagagagacaaataactctcctctagaaaaaagggcttgggagccctggctaggccaggcagggaggaagcaataaatagggggagaaaatggcaataagacgttatatagcccttctaacaaaaataccagaagggaggggtgagggacaaggctgtctgagggagggcaggaggtgaggccatggcttggtctcttttgcgcttggatggccgtcagctcagcatgaggcatctgaaagaactacccagattgcagaagagagaggtcccagcctccttggaaggacatgatgggggaggagtggagacaacagctgagtgttacctgtaaaactcgagaacaaaatgcttctttgatttgtaaacttgcactcataaatacaatctctcaaaatagaattcagtggatttctcaacaagtcttttcaacagtgatacacaatattcttccctttggaatcggtgctgttaaatagacatgtactatatagccattttccaatgcaacattagagtacagaacaggtattctgtggctagtgagtaatactgctgctgtagggtgcatacacgttaggatcggacgaggatcttactcagg

SEQ ID NO: 97865 - DNA, 57499 bp, Homo sapiens
ccttttccaacttctccacctagagtttatcctctctaaggtaagtctcatgttgaccacaaagaagcagcagctatactaaataagtaaaaactcaaaaatgggcttaaatactgaagtgataggtttataatttactttgaaatacttaagcaaaaataagatgaagcaaatatggcaaaatattagcaatataggtagtggtatataggtattcattatactattctatttttctatagtctaaaaatctttataataaaaagtcactttttataagttaagggaaaaagagagagcttaaggcgtttttgtaaatgaactccctgccctaaacccagaataattaaagtattgattgtatttcttttcttgcagagaaatctgggcccgatttctagcatttgaaagtaatattggtgatctagctagtatactcaaagtggagaaaagacggtttacagcattcaaagaagagtatgaagggaaagaaacggctttactagtagatagatacaagttcatggatttatatccttgctctgcaagtgaattaaaagcacttggttataaggtatgtacttaggatcaagatgtggagtgtcctcacttttccagtgttttagaagagttcattgataacctgcactctaaattctgaaatgtgaatctagttttagaatagatttgcaggaagcaagaaaaaagttcaaagattttccttgggtttaggaaatcctgagtgtcaaagtagctgaacaaaatgagaattgaaatgggatttaatagtttcattctgtccctgaaattgtcagtgccttatatcttatatctggtgggcaagatggagggagtgtggagggaagaaaaacaaaagaaaatctgaatgtcatcttaggtattacttttttttcctaatagttcttatcaaattgataaatatgttttgacagatcttaaaccaaatgtagttcctgttgcatattttgtaagatataatgaagaaatattacagcttgttaaatccataaagttccttgagggatttgtattcttaaaacagtgctcctccagtggcctttgggggaattagctcatctatgaatagaactcttctatacagactactgagtcataagaaaacaaatctggcacctgaacctgttcaggccacagggagagattaatatttacaaagccccagtaacagcccttgctgataaaaccactgttatatcatctcttaatctttctgtgacatgtgaacaaagactaagatggaaattcacagagaagtccttggttgatctctttaagccaaccaccattaggatgttcctgaccatcattctccttttcctcactgccctcttttagcctgggtcttgctctgtctgatccagataaaatattttgagaaaaaactacccataattgatattcagacatttttgttaatggaagccctatttctgtgccagatgcagattcctggtatgaaccataggattactgctcagggataagtagtttctgcttctagttttaactacttctcaatgaaaagtcaaagatagtttaagactacagtaaatcctcatttaacatcattgataggttcttagaaactttgactttaagctaaatgatacacagcgggtcctcaaataacttttttgtgtttaacatggttttgttataaccttgataagaaaaaaattggttttcctatacatcgtttctgtcttttttttttttttttgagatggtctcactctgttgcccaggctggagtgcaatggtgagatcatggctcactgcagccttgatctccctgggctcaggtgatctcctgttcagcctcccaagtagttgggattacaggcaaatgccaccacatctggctaatttgtgtatttttttgtggagatggggtttcaccatgttgcccaggctggcctcaaactcctaggctcaaggaatccacttgccttggcctcccaaagtgctgggattacaggcagcagccaacacgcctagcccatcatttctctaaaagttgcagtttcctagaacctatacaatgttaagtgagggacttactgtactttgtgcaattgctagaaaaagctatttcaacttttccaagatgaaaatgaaaattaaggcagttaattaaaataaagatctgccaggcacagtggctcacgcctataatcccaacactttgggaggctgaggcaggcgatcacttgagcccaggagttcaagaccagcctgggaaacatgatgaaatcccatctctaccaaaaaaagagagaaaaatacaaaaattagccaggtgtggtggcgcctgcctgtggtcccagctattcaggaggccaaggtgagcccaggagggaagctgagcctactttagtgagccgtgatcaagccactgcactcctgactgggtgacagagtgagaccctgtcttaaaaaaataaaataaaaaataaaaataaacagaaaagaaagatcttatagtggccaggtgtggtggctcacacctgtaatcccagcactttgggaggccaaggtgggtggatcacctgaggtcaggagtttgagaccagcctggccaacatggtgaaaccccgtctctactaaaatacaaaaattggccgggcttggtggcgggcatctgtaatcccagctactcaggaggctgaggcaggagaattgcttgaacccaggaggttgtagtgagccaagatagcaccactgtactccagcctgggtgacagagtgagactctgtctcaaaaaaaaaaaaaaagagagtaagtattcaggagtagaactacttcctgaatatgatgttttccatcttgtatttctatttctactcttttgttttttggggaaggattaatgtgcttctgtgtttaacggtgggtggtatggtatgtatgtatctgtgagaaagatttttaaaaagcgatacccaatgtgtctaccatttagatttgcttatataattaataccagatgtcaccaactccatttcaacaaattttgagaaagtggaatgcttttatatcccttgatggcggcaaaaaggggttcttttgtttctagacagacagagtaacactgggttgtctggagcaaaggagctcctctgagatagggcctctgttcataggtgactgtattgcttcctttggcatatcttgtctcagccctggcagggcaatgctagtgtactgaaaagaagactgtggatggatttgaggtcagagaggcctgccctcccaatcctcctctctctacttcttattagctgtgtgacctgggaaatatcaaaacctttgtgagcttcagtcccttctatataatggagatgttactatttccctcattaaaaacagaatggctaaaattgcctgatgaatagtgtctgctcagtaaatattccttgtcccctgtaataaatagtacattggaaataatttttcattgcattagcaaaatcttaaccggtgtgatgccttcacaaaacaggaagtcacttaatccagcttcttcatttaatgaaactggtgttcaattctaatggaagggaggtgtcagaagatctaaaatcttgaattttcctccaaattatcctggcctctacttggttcccagtctgactacccaaaaaagcttgtatctgtcctacaaatgtcctgcctggcaacactaagtttaatgacttgtaacttgtgtggggtaaagttatgatacactgagtcttagaaccaaatagctttccttgttgagtaacaatctttaccatcattagagtccttgcttatccgtctccattttctttctgtggttttgacccagatattcacactgtatcctcaaggttattgcatgattattctctagtagtccctttttcaggtttaggattcttctgttctgcattttcaggatgtctcccgtgctaagctagcagctataattccggacccagttgtagctccttctatagtgcctgttctgaaagatgaagtggatagaaaaccagaataccctaaaccagacactcagcagatgattccatttcagccacgacatttagcacgtaagccatgactttagatccagtactgagacgttggtttgtttgttgatttaaatccaaagcgtgggggtaaagtgacatggcctctcaattgtgggttaattattagacttaggatcactatgacaagtgatttagctttaatctttgaactagattaactaagaatgtcctaaaaacaaaacttcaatgatccagattccaggaacccattttggcagtaatacttggttttcagaaatgctgctatggccaggtgcagtggtttacacttataatcctggcactttgggaggccaaggcaggtggatcacctgaggtcaggagtttgagaccagcctgactaacatggtgaaactttgtctttattaaaaatacaaaaattttctgggcctggtggcatatacatgtaatcccagctacttgggaggctgaggcaggagaatcacttgaacccgggaggcggaggttgcagtgagccaagatggtgccattgcactccagcctgggcaacaagagcgacactctgtatcaaaaaaaaaaaaaggaatgctgctatgtgcagattacctgaacagctggtggaaactttcttcactgatagatttggtttctttacttaggaatgggttagtagcctctctagattctttttgaacaaggcccttctgattaaatacactgttgaataattgacttgaaacaggattgctaaacaaatgacttgtgtaactcagaaacactctttgacaaaaactgactttagttcagtccctggttgtcttacacaaagtcacttgtctacttctctgcctcccagtggccacggcattgagactgctctgtctcacccactttggtttggtaaagccctagaagtattttcagtgtccagaacaaagcagcagacatggaagatctttatgtgcaagtcacttgattttagctctgtgtagaaattcttccattccacttgattcatacttttctttttctcacagctccaggtttacaccctgtacctggtggagtgttcccagtccctcctgcagctgttgttttaatgaaacttctccctcctcctatctgtttccaggtttgttcacttattttcatggtagatactggctctgtgggtcatagtaattgtgtataaagttactactactttaacttgtcagattactgggattaaaatttattcatgtcaaaaatagggtccttttgtacaagtggatgaactgatggaaattttccgaagatgcaagataccaaatagtaagtaacagaagctccatttcagagtgtcattccacgttgttgtctcataggcagtagagattattattctctgccactgaagttttcgaaaccagccagccaatttgaagtgcagtgaaacccaggagttacccaaaccctctttggcagagagaggcttattcacattgaattccactaagtaaaatgtcataaaactttatcttttctattcatgtgaacatgcactatcaggcttggcttatgaaaattattagttttaacagcagcttttgtctttttctttaattatttagtatcagtagtactatcccatgttttgctaaaatagtaggctatgaaataaactataaagtatccacagttgaacatacataccctttcatagtggaatatgtttttacgttttgttgttttgttttaatagctgttgaggaagctgtgaggatcattactggtggggccccagagctagctgtagaaggcaacggccccgtggaaagtaatgcagtactcaccaaggccgtcaaaaggcccaacgaggattcagatgaagatgaagaaaagggagccgttgtcccccctgttcatgacatttacagagcacggcagcagaagcggattcggtagggttttaaacgcctctrcagaaaactcctgtccaggattccttttgcctcaagtggtatgtttaaaagagacaacgctttgttacaaggttcttggaaacaaagttgtattgtcattggtgcctctatcacatggttcttgagaaaaaacaaaccaacctgtgtgaattttagaatacggaacagacctatgctctaagcaaaattaggttttcaaaaatgtgagaacagtacaaagtggcagaaccacattttgttccctcttcaagggtgtcttgtatgtgccgcttgaagatttgtgagtttttcaacagttttattttaaaaactggatggcttatgattgtaaagcattttatcacattttctgaaaacaattgttcttggtttgcttatgtagagtcctgccttattgtttgtttttatttatggcagaatgtatgaaatccgttttgtagtttcaaattttaaaagtcctttaaaaaataaaaggattcagaaacatcatgcttcctctgcttctttcagattttatttacaataactacttatgttatttatccaataccatttaaaaataaatgtcaggacaaggaaaagtcatcttgtatttactaaatgtattaatcacatactccttcctggtcttttttggtgctaactaaaaacatttttaagaggcaaattaaacattttagaaatcctcaaatatgaatgcatttgctccccagtaaatctgaggcagattaagatcctgttaatacttttgtctctcttgaaagcaacctaagtgtggaaattcctttaaccacctgctgtcttgttctcacatagagtatctcttatctaaaatacttgggaccagaagtgttcaggattttggatttgttcagatttcagaatatttgcatcatacttaccagttcaccatccctaatacaagagtacaaattccacaaaactccactaagcattttctttgtgcatcatgttggcaccgaaaaggttttggattttggaacatgttggatttcagattttcagattagggatactcaacttgtatattttcacaggggcccagtgctcaagaacatttttttttccatgagctaaacatagataacattaaggaaaatgacatttatttaactaaattctaattacagtgagcaaaaacttgtcatgcaaattaagtccaaagaactagactttgctctttggtaacaacattacctcctcttctcattactagttaaaaactaaaaagcaggagggaaacaaaaaggaggggaggacaagtattatgattataaagaaatgatcttacatattagaaacaatttagtttagaatttgaattcagatgtgattaaataatctgacatttaaaatcagcttcaaatgtcccataaaagtcttacttgtaaaaaaaggttatgctgaatcatttactcatataaatttatatgtagcaaggttatataaattggtcaaaagtgtgtttagtttccagtattttcccattaaagctaaaaatcgcctctcaaaacaaagtcagctgcctctaattcagactttcttatcctttcaagcatcactttcaagttgtgagttttttaaaaatatcagttaccatcaaaacttaagacacaagtaggccaggtgyggtggctcactcctgtaaatcccaacactttggaaggccgaggcgggcagattatttgaggccaggggttcaagaccagcctggccaacaaagtgaaaccccgtctctactaaaaataccaaaaaaattagctgggcgtggtagcccaagcctataatcccagctacttgggaggcgaaggcagaagaattgcttgaacctgtgaggcagaggtttcagtgagccgaggtagcgccactgcactccagcctgggtgacagagcaagacgctctccaaaaaaaagacaagtaataccatatggcatagactttaaaatacagagatgtaggctgggcgcggtggctcttgcctgtaattccagccctttgggaggctgaagattacttgaggccaggagttcgaggccagctggccaacatagtgaaaccctatctctactaaaaataccaaaaaaaaaaaaaaaaagttagctgggcatggtagcacaagcctgtagtcccagctactctgcaggctgtggtgggaggatcacctgagcccaggaggccaaggctgtagtgggccatgattgcaccactgtactccagcctgggcgaaagagtgagaccctgcttcaaaaaatatatagaggtgtagacttgttcctgaagtgccatttttggtggttagtatcgggggtgagcagcgactatctggggctggtggtgtgggggtaagaagaatttaccaagacaatagtaggtagagaaaggtagattagagaaggtatgaaaatgcactgcaaggttggaacaggcagagaagatgcttgtctgcaaagagacaaaggcttgctggggattttataagatagtgccatgtgctgaagagggttttatgtactactgagaatgccagtgttgcagtgagctaacttgcaggtgtctggtgataagttgggtgcagtacggctacatgtcctggaccatgaagaaaggcagactcataatttatctgcttttccctgctcccaccagcctgactccctttccctaattaggactccacagttagtgttttgaagacaaacaggccgggcgaggtggcgcacgcctataatcacagcactttgggaggccaaggtaggcggatcacctgaggtcaggagttcaagaccagcctgaccaacatggtgaaaccctgtctctactaaaaatacaaaattagccaggtatggtggcacatgcctgcaatcccagctacttgggaggctgaggcaggagaattgcttgaacctgggaaggagatgttgcagtgagccgagatcgcaccattgcactccagcctgggcatcaagagcgaaactccgtctcaaaaaaaaaaaaagaagacaaaacagtttcaaatacctgtaagtgatctgccaaagtgttcccacagacaataaaacaaagccatgcgaacatgtgtgaaaaaccattttttagcgtgtgtgcgcgtgcgtgcgtgcacacacgcacacacacacttggtgaaaagtgtctttaatcactttattagtccattcccacaatgctataaagaaatacctgtgactgggtaatttttaaagaaaagaagcttaactggctcatggttccgtaggctgtatagatagattagtggcatttgcttctggagaagcttcaggaaatgtataatcacggcagaaggtgaaggggaagagggacgttttacacggccagggcaggatgaagaaaggggggaggtgccacacacttttaaacaaccagattccatgagaactcactgtcacaagaacagcaccgagaggatggtgctaaccctttcatgggaacttcacccccctggaccaacacctcccaccaagccctacctccaacactggggattacaatttgacatgagatttggtggggacacagattcaaaccatatcaattattattaaggctactatgtatattataattgttcctattgcatttatttataggatttttttctcctagaaatgatcagctctttgagcataaaaaggattctcattagaagaaaacattttcgaatgttctaactgctagagatatgtatgaatttttagtttttaaggtgattctgcctgatatttgataattccttttgttaaacagttcaacaagcagcatgatgttagacatctgaacttacctttggaaatctaatgtgcagactcatgggataatcagtcctacaattccaaggactcatatcagtattgctggacccaaagaaattgccaaaagatatccatctttttcctgtttataaaagcaatgacagcatctcctcaagattctagaactagacaaaagtttcaaggactatatgtatgtccttcctaaacaaaaattagtcaaactctggcctttaccactaaacttcaaacaagaggttgcacctatgtggccacatctagtacagtaaaaggttaatagaaactactagtaaactttctgaacaaccaaactgtaccaaagaaaaagaaggaaaaacacatcatttctgttagtatattgaccctggtcaataattatgaatttatttgatattataaccctgtattggcctatagttaataaatgttgagttcaattttattaaaccatagtcatcatggtcataaattattattattattttttttaacatggtagttctttgactgtggcaatgagcaagtgaacttacgttttacttaataaaaatttcagccaggcacggtggctcacatatataatcccagcactttgggaggccaaggcgagcaaatcacctgaggtcaggagttcaagaccagcctgggcagcatggtgaaatcctatctctactaaaaatacaaaaatcagccgggcatggtggcgcacacctgtaatcccagccactcggggaggctgaggcaggagaattgcttgagcttgggagctgagattgtgccactgcactccagcctggacaacagagtgagactccatctcaaaaacaaacaatcaaaacaaaagaaaacaaaaattttcataagtctttttgtttgttttgagacatgatcacagcataatcctcccacctcagcctcccaagtagctgggaccacaggcatgcaccaccatccaccatacccagctaattttttaaattttatgtagaaacaggatctacctgtgttgtccagcctggtcttgacctcctgggctcaagcagtcctcccacgtcagcctcccaaactgctgggattagccaccatgtgaagcccttcttttttttattttttattttcttgagatagggtctcactttgtcacccaggctggaatgcagtggcatgatcttggctgaatgcaacctctgcctcccgggctcgagcaatcctcccacttcagcctgctgagatgggagcacaggcctatgccaccacgcctggctaatttttgtacttttagtagagacaaggttttgccatgttgcccaggccggtctagagttcctggcctcaaatgatctgcctgcctcggcctcccaaagttctgagattacaggcgtgagccaccttgcccagcccctcttgttttaaggttacttttaagtcaagaaaagtgacactccatcgaaccaggcctatagcttagttctggttcttaagttcggtaggcaataaatgtaagtcaggtgtgacagaaacccacatgagggacagttttaagtagaattatatgtttagacttttaacacatattttgtagaactctggctatttctgaaagtaccagtgaacacttgatcgtttaataaacagagcttacctgggcttaaagattatccccttccccacccattgaagttgctttgaatactatgactaaaaaggctttccattaaaataattatataatgcaaaatccaatataaatacacacttgcaaatatcattgtagttatttatttagattgtttttaaatgagatagtgcctttaaatatgacttcatagcccattatccattaccattcattcatccactcatttgttcattcatgaattcatttagttcaaataatatagaggtggagatrgggagaaatcactggggtgggggtggatgtcaggaagtaagcaaatgtaagactgcagctctagtatagaagagatgatgaacataaacaagtcttaggagaggacaggaagaaaaccttccctgtaggcccgtaaaatgtgcttgaatgaagggaggttgggcgctaccagtggaacgtaacaccacagcaaatgtgcgcccacaggtagagggttacatgttcgcctttgtagttaaaaaagaaaggtatagtccttttccatgtacaaagcattctatcattcattaccaaatgtaatcctcacagcaacagtgtgaattaggagtgttcccatttaacaatgaaaatgccgaggccttggggagaatggctggtccaatgttgtacaaccggtaaggcggcgatagaggagaaaagactaaaacccagatctttctctaaattaggagctttgtgcacaatcctgctaccaccaaatgttagaatcggaagggagcttaaagaccaagtctagtcctttcattttaaaggagttgggaatgggccctgatttgccccagctggtacataacagagtggagatccaagccttggtttcctgacagctcccagtctttccactctaccacctggcctcaaaatgaaaagaaacacaaatgttctacctataaatcagagctcgccaaaaggtcactagaaatcaaacagcaaacacctattctctttgaaattcaccagcaaagctggtggcagcaacatttcctctattcccaggaatcttaaggctttggagaaatgagaataagcacctccacaaaaacagaaccgctgaataatccatttagaatcttggccagtatgtgcatactataggcctattaagtcaaacttattaatagcttttcttcacagagaaaaaagttcatatatamctactgactrcatttgatcagtaagatatcatgtcagtgtccttcttacctgaagtacatttatggctgggtcatatcgtgacataaataatcacattttgtagcttgctttagacggaatgcgattttttttttttttgagacggagtctcgctctgtcacccaggctagagtgcaatggcgcaatctcggctcattgcaaccaccacctccagggttcaagtgattctcctgcctcagcctcccgagtagctgggattacaggcacgtgccaccacacccggctaatttttgtatttttaatagagatgggttttgccatgttggtaaggctggtttcgaaytcctgacctcaggtgatctgcccgcctcagcctcccaaagtgctaggattacaggcgtgagccaccgcgcccggctggaatgagatttttaaaaacaccaggactgagaatccatccrcccaaccaagagccaacaaagtagtagttactttaaacattcacttatccatgagactactgaagaaatccaagaggcttggtgatactgacctcactctcagttctatccacaagtagtaaagtactgccaaatacacttagcaatttcaggaaaagacacttgtctccacaacctgttactgaatgcagcatatagaatccattcgattctggaggacaacacactccaaaggatgtttcgttttggaaggagagctgtaggggaaggtacagggggatgcttagcaatgcttcctgagtgactaaatgaacgaagtggatctccctggcccttagtaataatcctatgagattccaggaagaaaattagcttatcttcatagagcaacaacaaaatgattcaatatgaatattgtggttctgaagtttgcttccttcattcttgacttttgccagttgcagaactccaccagtggacaccgaggtagtgggcggccaagagtctgtgaagccagttattcatgcatcaagatttcaaacggtccaaatggaactctggcaatgtaagaactcaggaggggaaaaatatcttgcaagaatctactcttacaaaagaagagtttttgagatttaggaagaatgactgcaggaagtggtgatcagcgctgtgcagttggggttaagctcctctccttcagccttggagcggcaggaaaaggccccaaacactctgaggctgaggcttctctgcccaggaacccaggatcatacaaccgccaggcacagtggccacagagcagcctccaccttaagggaacaattccagacacgacctcattgaatacaccatggaagatgttatcttctttaaaagtaccctcatggcagggcgcagtggctcacgcctacaatcccagcactttgggaggccaaggcgggtggatcacgaggtcaggagatcgagaccatcctggctaacacggtgaaaccccgtctctactaaaaatacaaaaaaattagccaggcatggtggcaggcgcctgtagtcccagctacttgggaggctgaggcaggagaatggcgtgaacctgggaggcagaggttgcagtgagccgagatcgcgccactgcactccagcctgggcgacagagcaagactccatctcaaaaaaaaaaaaaacccttacaaggaaaaaggcaggcaactgccatctcccagtcacgcatccccaggaacttggctgtattatatcctgcctcagagacaaactcatctattgtaggcctggcctggattgctgcctttgaaaacaaggaaaggtcagcagaatatcaaccaaggcatggaatttccagggaggtctcatttcaaaatgtcatcaacaagaaccacatggacctctgtgagagggatgattaaactagcctgagtttgaatgaaaggattatgtgtacccaacctgtaacwaacaccaaggaggtaaagtggcagagggtcttgtatgagcaacagccctttcctgataactttgtggaccggcggttcctggaagagctctggaaaaacatccatgctyggaaataccaatattgggctatggtatttgagtccagtgtggtgatccygcagctgtgcagtgtttttgtttttctggttatctggtggtatatggatgagggtcttctggccccccaatggctttttgggactggcctggcttcttcactgattgggtatgttttgtttgatctcactgatggargtgaagggcagaagagtgggtggacccggtgggctgacytgaagagtgccctagtcttcattactttcacttatggcttttcaccagtgctaagaccctgacagagtctgtcagcactgacaccatctatgccatgtcagtcttcatgctggtaggccacctcatcttttttaactatggtgccaatgatgcctttgtatccactgtatccagcacactatccttgaacatggccatctttgcttctggatgcttggcttccaccttccccagtccctgcatgtcttcatcatgggaacacttgccatccagatttttgtcctgtggctcatgctacagaagaaactaaaggcacggactcccaagggctatgtggtggtcacactgctttttgccttttcggtcttggaaggcctactgcctattagtgctgtgggagccgtactctttgcccttctgttgatttctatctcatgtctctgtccattttacctcattcgcctgcagctttttaaagaaaatattcagaggccttgggatgaagctgaaatcaaggaagacttgtctaggttcctcagctaaattagggacattctgatagactagcctcctaactagtataaaacttaaagacaggccgggtgtggtggctcacgactgtaatcacagcactctgggaggcccgaggcggatggatcacgaggtcaagagttcgagaccagcctggccaacatggtgaaaccccgtctctactaagaatccaaaaattagccgggcatggtggcgcgtgcctgtaatcccagctattcaggaggctgaggcaggagaatcgcttgaaaccgggagatggaggttgcagtaagctgagatcgcgccaccacactccagcctgggtgacagagcaagactccgtcttgaaaaaataaaaaatgaaccaaaggcttgggtggtgagggtgcttatcctttctgtaattctgtggatgaaaaagctttctgggaccctcttgaattattcgctgtaacaaatgaagtgatgtggtttctattaaaaaaataataatacattcaaacaaacaaaaataaataaatatgaataaaagtaccctcacaaaatgcagccagtctgccagattacagtgacccagattctccagtctcctgcctgggacccaaaaagatacatctggctctacttttttttgttaaggagagacagggtctggctctgtcacccaggctggagtacagtggcatgatcatagttcactgcagcctcaaactcctgggcacaagtgatccttttgcctcagcctcagcttgtagctgggagtacaactgtgtgccaccacaacaggctaattttttttgtattttttgtagagacatgatctcactatgttgcctaggctggacttgaaatcctgggttcagatgatgctcctgccttggcattccaaagtactgggattatagtgtaagccaccatgcccagccctgttttttgttttgtttttttaatttatcacatcattatagattagaaccaacatcagtgctgatctgcatacatgtaatttctacctgagtttctatagccagatccaagtccttgtataaaccctgggaccatcagcaatctcaaaaatcctgaaagcagaatgtattctgactctaccaggtctgaaatccttctcatggagtatctgatttcctccccatcagtcctattggaatacctacccaactgcttcttcaagtcttccttcaaaacacaaaatcactgcacttccttacaaagaaggatcagagaaaacagctgcttgcagtaaaatgtagcccttccycctggttgtgcaggagtggctgctggccttcctggagtctttctgaaatggcttccaagtttcttttcttttttctttttttgagacagagtctcactctgttgcccaggctggaatgtagtggtgctatctcagctcactgcagcctctgcctcccgggttcaagcgattctcctgcctcagcctcccaagtagctgggattacaggcgcgtgccaccacacccagctaatttttgtatttttagtagagatggggtttcaccatgttgcccaggctggtctcaaactcctgacctcaggtgatctgcctgcctcggcctcccaaagtgctgggattataggcgtgagccaccacgcccggctaacttgtaagtttctcttagcttcctgtacagaaggcttcaggtgccgatattactgcattactcatacagtaatatagtcttaccccttgctgttgtggcagttggtcattccaacttcatggctctgcttctaatataacatccctgtctaaaatgcagacatacatgtgtacactttaaaaaaaaaaaaaaaaaraaaaagaacagatcgtctatgagacccaaatcactcacgctcagaggacatgtcaggaattctggtcactgaagttccttgaaaaataatgctcaaacaccagggatttcctatgacttcctcatctaggagattcgtgaactcaagctattttatctgaaaacagttaaatctaattccagaatttaattcaatcatcacatctgtgtattgtctcagggtcaatttttcagtaagaattccagacatttctcttcgttcacattacagtaaactatttttcaatacatttcctccttgactttcaaggcttgaaagtcaaagactttcctttcactagatctcataagtcataactgctctcaaccagatgcaggagtaattttgtataaaagaacaagctttttaaagtccaataactgtatctttgggggaaggttaaaagaatgtttaaatacaaaaaagaaagtaaaaaaaaaaagagagagagacaaataactctcctctagaaaaaagggcttgggagccctggctaggccaggcagggaggaagcaataaatagggggagaaaatggcaataagacgttatatagcccttctaacaaaaataccagaagggaggggtgagggacaaggctgtctgagggagggcaggaggtgaggccatggcttggtctcttttgcgcttggatggccgtcagctcagcatgaggcatctgaaagaactacccagattgcagaagagagaggtcccagcctccttggaaggacatgatgggggaggagtggagacaacagctgagtgttacctgtaaaactcgagaacaaaatgcttctttgatttgtaaacttgcactcataaatacaatctctcaaaatagaattcagtggatttctcaacaagtcttttcaacagtgatacacaatattcttccctttggaatcggtgctgttaaatagacatgtactatatagccattttccaatgcaacattagagtacagaacaggtattctgtggctagtgagtaatactgctgctgtagggtgcatacacgttaggatyggacgaggatcttactcaggattgcatcgtagtagggacagaagaccatcttgttatagttgaccaggcgagcaaatttaatagcaacttcctccagctctctctgaactggactgagtcccccagggactgtgggcaatggcttctgatgacccgaggcaaggtaggtttctaagaaggtcaggattcgagattctgtgacaaaaaagaaagtggtcagttgtttcttgtccttcaccttacaaaccttactgtgcttcagttcttagcttaaccatcacctcttaggggaagttgtccccgatcaatactcccagaccagatacccacagcaccttgcacttctgcatattcatcccatttataatgttttctctcccctctagatggttagtttcatgaaggtaggagccatgctcatcttgttcatcatgtctcctcagcactcagcacagtgactggcatgagacccagctcccaggagaagctcaaacacacttggaatgcaagaatgaatgcatgagtggccaggcgcggtggctcacgcctgtaatcccagcactttgggaggctaaggtgggcgggtcacctgaggtcaagagttcgaccagcctggccattgtggtgaagccccgtctctactaaaaatayaaaaaktagccaggtgtggtggcgcacacctgttgtcccagctactcgggagcctgaggcayaagaatcacttgaacccaggaggtggaggttacagtgagctgagatcatgccattgcactccagcctgggcgacagagccagactctgtccccaaacaaaacaaaacaaaaaaaatgaatgaatgcatgagtgagtaaaggaagactggagacatgctctgctctccgaggagcaacacatcctgagaccattgttagccatcgctgacgatcacataaaaaggtggaagattaaagcaggaattacaggttcaaaaaagacttttttcctactaagcctccatgaaagcagctcgtgcttccttctctgatgcctgcatggaagtcatgggcatttgtaaacttgtcctacttggaggaataatttaggttgatgcttttctagtccattccccttcacaatgcttttgtactcttgtgtatcctcatgaaaaaagatttgatcaagccacacttcttgcagattttatcacaaaaacaacagagacatttatatggaatagactttttcaaactacatgccttgcctcctgcctggggaatcctctcaggtgcaaataacttataccctcctgagcctcacaacacagacagaaactgctgacaggacagggcctaacacccttactctttttttttctcgagacacagtttcactctgtcgcccaggctgcagtgcagtggcacaatctcagctcactacacctccgcctcccgagttcaagcgattctccccactctgcctcccgagtagctgggattacaggcacatgccaccatgcccagctaatttttgtattattagtagaggcggggtttcaccatgttgcccgggctggtcttgaactcctgacctcaagtgatccgtctgcccccgcctcccaaagtgctggaactacaggagtgagccactgcacccagccctatcacccttcttcttttttttttcttttttgagatggagtttccctcgtctcccaggctggagtgcagtggcgcgatctcggctcactgcaacccccgcctcctgggttcaagtgactctcctgcctcagccttccgagtacctgggattacaggcacacgccaccatgcccaggaaatttttgtattttttgtagagacggggtttcaccatgttggccaggctggtctcaaactcctgacctcaggtaatctgcccaccttggcctcccaaatgctgggattacaggcatgagtcatcacacctggccctatcacccttattcttttttttttttttttttttgagacagactttmgctcttattgcccaggctggagtgcaatggcacaatctcggctcaccacaatctccacctttcaggttcaagcgattctcctgcctcagcctcycaagtagctagcatcacaggcatgcaccaccatgcctggctaatttcgcatttttagtaaaggcggagtttctacatgttggtcagcctggtctcgaacttccaatctcaggtgaactgcctggctcggcctcccaaaatgttgggattataggcatgagccactgtgctcagcacccttattcttaagttagtttggttctctaaggttcccagggctggcagcctcactgaagtagaaatctttgtattgttcctacccaaagactggtttttcttttctttctttctttcttttagaaacagggtcttgctctgtcacccaggctggagtgcagtggtgaaattgtagctcactgcagcctcaaactcctgggctcaagtgatcctcctgcctcagcctcccgagtagcaaggactacagatgcatgtcactaacctggctaattttttttttttaattttttgtagagatggggtctcactatgctgcccagatagtctcgaactcctggttttaagtgatcctccccttaagggctggttttcaatctgtcgrtaactggctattacaaaacaacccaggcagcaggatgagtagcaacttgctggccacaggtctacttacaggcactttcctgcctccctatgaaggttgtgagtataaatcttggctggatgcagtggttcgtgcctgttaaccccagcactttgggaggctgaggcaggcggatcacttgagtccaggaatttgagaccagcctggccaacaaggcaaaaccccatctttagaagatatacaaaaaattagctgggtgtggtggtgcatgcctgtagtcccagctacttgggagtctgaagtgggaggactgcttgagcctgggaggtggagcacagaggtggagtgcagtgagccgagatcgcatcactgcactccagtctggaagacagagtgagaccctgtctcaaaaacaaacaaacaaaactatgtattcacagcatacagcatgatgttttaaatgtatgtatatactacaaaatgattaagtcgagctaattaacagaatttttcataaagccattgctgtgataactaatagctaatattatagaatattttaaatattttatagaatatgcattaaaatattttaatacttcaagtttattataaattttaaatagcaatatcttaatattaccattttaagttattatatttgatatgttaatagtattacatactaatatttaataatattttaatagtatttttaaataacatcttcattttactattcagctcttttcgtaacagctcctatttactgagcacttactatgtgctgccaggcactacggaaagcgcttcaccttctcatcccagggagttcctgcagcgaccttgtaaggttgctgcccttattcctgctttagagatgaggaaactcgagtgtcaagttacacgcccaagctgccctgggacactgcttgtgaacccaggagagtgattccaaggttgcagcccttagaacaatgatggctgcctggtcctgtgcccatctgttgggtggccctggtctctctgtggtgcttcattacaccatctcctcacccatcagcaccttaactccagctgagccctcaggtttcttcagatggactcgtgctccagcccctcagagggcacatccctgctgcctgccttccccaaacgtacccatgatcctgcgaatggggtcatcgggactggccacggcctgratctggcccttgagcacggtctccttgtccgtggtgaagggagaggacccacacagggagaggcagctgctcacctccaggcacaccttctccccgatggtagtgaggacgtccttcagatggaaggagctggggcagaggaggggagaaagggcctataagtaaaatacacctctaaccagctccaaccgcccacacccgggtgagaatgacggcaccaataactggatttgtgtgttcaagggacaatttgagactcttttccctgccaccttacctctcaggctgtgcatacctgaccagggggactttctttctctccctctgctagaaaggacagtgggaagggcaggggctcagagtataccaggaccaacgacccaaagcacaacttcctgctagcctctgtgtgataaaatcagcctggaatgacctcagaatatcttgatatacctctggaggaatacacaagaaagcaggcatttggtagctgtgggacaagagggagagagaaactcttcattggatgcccttttgtaccttttgatttttgaaacatacacatgtattaactaattttaaaagaataaagaggccgggctcagtggctcacgcctataatcccagaactttgggaggccaaggcagatggatcaggagttctaggtcaggagttcaagaccagcctggccaacatggtgaaaccccatctctactaaaaatacaaaaagattagctgggcatggtgatargtgcctgtaatcccagctactcaggagactgtggtaggagaatcacttgaatccaggaagtggacgccgagatcacgtcattgcactccagcctgggcaacaagagtgaaactccatcacaaaaaaataaaaaaatatataaaaattaaaaaatttttaaaaaataaaagaataacgaaaagtgaaatcctaaagttaaaaaaaaagagtacctggataccctgggtcccccaggctctcccagggtgcctgtggggagcccccatgctggcaggcatgctgtgagaaggtaactgcctctgttgtgggtctagatcctttgtatgtagaattactggggggcatgggagcaagccctggcactcaccattggcaccagctctgtgcccacccctggaggaccagggaggatatgggagtgcaaggctgggctcccaagaaagcactgacctggaycccaccctcagcgggagctttgacagagtagttctccaggcaggggacctaggtgacagcccagagctgtacctgtgcaaaggcctcaggctaggccctcagctgagcaaacaagtttcctggcctctcagcaaactagtttgactgtcaaaactgttgaggccctagtcacaacttacggacacgccccacactgcactgaacacagccatgctttgtgaaaattcagcagtaaaattcctccattttgtaaggatgagaatgtttagggggtacttcccttgaagaagtctctgaattggaccttgttagatagagcatttacttagaaccactcaaagatattctataggctggaaaccatagaagtcacccaacatgactccatggtaggagcggtcactgaagcctgcacgcgtgcagatgyggactcgtgctgggtaagaaaatgatgcattacactgagcacagaacgcctacagggaacaagcaagggcagaacacttcaaccacatacatgcagctctgcaggaatatagctggtttctctcatgaccttcctctagrgctctgcttttcactgttagtyggttatgaaagcaattcagtgggtagcaaccaattttttttttaatggaataagaatagagtagaaacaatcaggctgcattaaacacagttagggtcagttccagtttgagaagttttcgtttctgttacacgtgtgttaagtgtgtactaggtcacaatggaaaatgaatttcttactgcaggtcctagtcacaaacatttttgtcccaattaatgtctctgggttccagtttcttcataagctccagtaagagtttaatacatttgaatggctttgggagaggaataaagcactcaacaaacaaacacaagaaccttggaggtcaggagacaaagacaaccccattaaagaaggaaggggtcagacagcatcctgctccctgcgtagggagaacaaatgagttgatggcactcaacaccgagccaggccccgggaggagcatgctaacagggaatggagggccgcgggacctctaagcccgggatctccaattcctcaaggcaagcaaccattggtaccagcgctccccaccctgcycatggcttaccccccagcccgagccacttcttctctcgcctcctaaatgctscctcacatctactatgtgccccatgccaaaatttaaacttaagggcataaatctaattacgttccccctcttgcttcaaatccttcaatggctccctactgctcttaggacaataacccaactccttggtgtggcctctaaggcccgacaggctactcggctagtcacacacattttgaagccactatcctagagctctgctaaccctgcagcagattctaactttgaccctatgaccctaaataaactctgctggggtcttcgccaagtgaaccaactgagacagcaaggtttcttctcagttcctagagagtggccctgggctctgccttacagtgggagacccctctgggagactccagtcggctctctgacatccactgcgtcccatccacgcatcaaagttccacttacggcaggtgcatatctgttagcaaaatcttcacaatcatcttgagtttctcagcaaagtcggcctggctggaaattcctggcgctgccatgctgaaggtgaccagcaacacagcccccaggatggtcagttgttccagctgcaactggagctcgtggaagcgagactggtccattaaaactgtctgtaatgaatagaagaggccatcgctgagctgcaggtccaggttggccagcagagggcgggagcgccacagcccccacacctgcctctgcagcttccctcagggtttgcgctagtgtgtcagagctttgarggagtctggtgtgaaataacccctctatctcagagccgttcctcctgagcaaggatgcagtatagcgccctcactaagaacacagacaggcctgggtgtaaagccaggctccgtgcttaataccatgacctccccggctggccgtggtggctcacgcctgtaatcccagcgctttgggaggccgaggtgggcagatcacctgaggtcaggagttcaagaccagcctgaccaacatggtaaaaccccatctctactaaaaatacaaaactagccgggtgtggtggtgcatgcctataataccagctactcgggaggatgaggcaggagaatctcttgaacccaggaagcagaggttgcagtgagctgagattgcaccttkgtacttcagcctgggcaacaagagtgaaactccttctcaaaaaaaaaaatagcatgacctcatgcatgcatccccaactttgtcgggcctctgcagaatggggactcccacatcacagggctgttttaaagctgaagaaagatgctacatataaagtggctggcagagccagcactcgataaataaaagttatacttattgttaggaagaaaagtataatgaggcacagacctagggtcaccaactcctcccagtttgtctgggactgtcccagttttcaaatggaaattcccaagtcctgtgaaccctcactcagtccctagcaaactaggacagccagtcaccctgtacagagcaatggaaggccaggtgcgatggtgggtgcctgcagtcccagctactgggaggctcaggcaggaagatcactgaggccggaatttcgaggctgcagtgcactacgattatgcctgtgaatagccactacactgcagcttggacaacatagtgagactccatcttaaaacaacaacaaaaaaaatcccagagcaatggaagggaggactgccttgcaggcagagcctacgtttattcatcttggtatccgctcagcacccagcacaaaggaagcttgtaagaactggcgagtaaataaagaggaagagaaagaaacaggaagcacagagagtagaagtgacagagaacaatctaaagcctcccggaaagcaagcacattcccatgactgcctcccccatgttaaagacagtcctgggtcctaccatgccagcrcccccacccgtgtggctgagggaaggagaagggaaaggctgcacagatgggaatctgatctgagagtttacaggctcatcgaatggactctaaggacctttcttgctgtcagaaactgagatttgccaagtcaagacatgaacaatgtgggtcacagccaagaagtaaaaaccctgaggattgagaatcctctgctgatacaaatacaatcccaaggactcatcgtcggcctgttttctgacttcacatggctttgtggcttcccaacagcaggacgtgagtttaggatgcagattgccaaggatcaattcctggagtagacagctgtccccagggaccatcaccatcttccccacagcgtttcttttcttttcttttytatttattttttttacgagagggtttattcataagactgccaagtgaggaggctggagaacaggtctcacatccccctctccatagagagggcttagggatatttatgggatgaagaagcaggggtatctaaggcctggggaagatgatcagcggtggggaaaagggaggtattggatggtctcccacagctatttttaaatagacatgtcaggctgagaacttccctccagaagagaacatgccacagttcaaagggaacattttcccatctccaatttgacattctctttagagcttcctccagcacaaaacggggaactcagaggcaagaggtgaaaccttaagctcacaacttcttgaaaggaaaaataaggaacttataagaaagatatttagagaagtatctggatctgaggctagtgataagaagctcacgtaccccccaaaaagagagggggagtctacataacaaaacagctatttagagaaacactgggggaatcccttcttagtcatcttcttaaagaggtcttgcagttagaagtatgtattgtgaaaaacataaaaagaaaaaaatattgttcagcatggaaggggaagaagtttctttagataaagctgtgaacaaccacacctctgttgtggtttccatcaagatgagtaaaaacaggagaaaaattcagcagcacagactggagcctcatacattgctggtgggatggtaaaatgatgcagctgctttggaaatcagtttggcagttcctcaaaatgttaaacttwagagtcaccatgtaacccagcaattctaatcctaggtacgtwaccaagagaggtaaaaacatatgtccatgcaaaaacttgtactggaatattcacagaagcataatttataataacaacccaaatgtttgtcaactgatgaatgaataaacaaaatgtggtacatccatacagtaaaatatattattcagcctaaaaaagaaaggagggctgggcatggtagctcatgcctgtaatcccaacactgggaggccaaggagggaggaccacttgaggccaggagtttaagatcagcctgagtaacatagcgagacccctgtctccacaaaaaacacacttaaaaattagctgggtgtggtggtacactcttgtagtcctagctacccaggaggctgaggcaggaggatcacttgggccctgaagttcaaagttacagtgagctgtcgtaccacctagcctgagcaattcaatgagaccctgtctctaaaatttaaaaaaattttaaaaaacccagaaagggaacactgacacatactacaacataaatgaaccttgaagacattatgctaagtaaaataagccagacccaaaaggacaaagattgtataattccactcatattaagtacccggattagtccaattcacagagactcaaagtagaatggtggcygccaggggccagagggcgggggcaatgggaattactgtttggtgtgtttggtgggaagacagtttcacagaaggaaaaatgaaaatgttttggaggtggctggtggcaatggttgcacaacaatgtggatgcacttaatgccactgaactggacaactagaaatggttaaaatggtaaaytttatgttatgtgtattttaccacaacaacaaaaaaaacacagtggaaaagaggactaaactactgctatatgtgctacaacgtgaaaaaacattggtgaaagaagccaggcacaaaaggctggtagtgtatgatttcatttaaataaaatgtccaggataggcaaatccatagagacagaaagcagatctgtggcttcaggcgttggagggagggggggagggcagtgaccgctgatggatgcagcgtttctattggaggtgatgaaaatgttctcaattaaacagtggcaatggatgcgtaactctgtgactatactagaaaacactgagttgtacactttaaaagggagaatcttctggtacatgaattatatcagaataaagctattctttttattttttattttatttatttacttatttatttttattttttgagacagagtctcgctctgtcscccaggctggagtgcagtggtgcaatcttggctcactgcaagctccgcctcccaggttcaagcaattctctgcctcagcctcccaagtagctggggctacaggcccctgctaccacgcccagctaattttttgtatttttagtacagagggtgttttgccatgttgcccaggcaagtcttgaactcctgacctcaagcaatctgcctgcctctgcctcccaaagtgctgggattacaggagtgagccaccgtgcctggccaaagctattctttttaaaaagttcagcagcacaaaaacaaatatgagtagtgagatggctcaggagacctacttcggggaacggcctctggaggtggtcccacttcagaagcttcaggtaagcgtaattctggacagcaacagggctcagcctgggcatgtccccagagccagcagccattccccccactggcagggcgtgtttatacttctgagtcataaggtcctctgaggcttcttccagccactgggtgacaaagtccagggaatctgtgaaaaacaaagctgcacacattaccttgacaccaagaagggatgcttctcggaattacttaagggacaatcgatgtcctggtggagtgataaagtataaagtatgaactttggaatcaaataaaacttggatcaaatcatagtagtgccaatgactaactgagggatctcaggcaagtcataatgtgtctgagtttcagatgcctgatataggcaaatttacaacacccacctcacaggctgttgtgaggattaaacaagataatgaataagccaggcatggtggctcatgcctgtaatcccagcactttaggaggctgaggtgggaagactgcttgagcccaggagttcgagaccagcctgggcaatgcggcaaggctctgtctctacaaaagatacaaaaattagctgggcatggtggcacatgcctgtagccccagctagctgggaggctgaggcaggagaatcacttgagtcctggaggttaaagttgcagtgagtggtgatcacaccactgtactccagcctgggggacagagctagaccctgtctaaaataataataataatagtaacaaatacatgacacctagccaggccttgccacccacctggtatttaacaaaccttccttcccttctctcccatcctgaccactgcatgagatggaccccaaagccctggcaactccagctctagagacagataggatgagacaccagctagagtttccctgtgtaaagtatcctctacactgatgatgaggcttttccttgtttagatcttaaccttgtatcaatctggcttcctttcaacctgggggaaagtgaactctgtcagggaagccccatctggctttcagcagccctcctgcacccctrcttttctaagcttggtaatgcagggggcactctgagggatacagagagagagctggaggatctcacacatcatctgataaaaactgcacctgtcaggtcccagcaggtgttgcagctctgttagtggaggcttcctgcttccttaaaaccaagtgggcggccaaggtcacagctgtggtttgctcttcactrgggcagggggatgcagctccagttcaccctgagctctcggtcatgactcctgggccatctggcttcaccctctcttctgctgataatattctccgtaaccccccagctttgggaaacccaggctttcatgttgtgagttaagtgctagatgcaggcactgtagctgcttccaccctaccagtgagtcctccactatgccccagcttccaggtccaggccttaatattacggctcttcaggctacaaaactctgcctagcgraggttgcagtgagcagagatcgtgccactgcactccagcctgggtgacagagtgaggagactctatctcaaagaaaacaacaacaacaacaagaaaaaactcttcccagtactctcacaacactggtgagagtgtgagcttgtggtcaatccattctggtcaaaaatctcccaaaacctgtttccaacatctgtaaaatgggattaaaaaaaaggtgcctggctcatcagcttactgtgtgaggattacatatgatcatgtacatccagcccttggcacaagcctggcacttagtaaacattaccaaacttcttctacttctacctctaccctgtcctttctcaacctgccccggccccagcacyacctcagactcctctgcctggggctggatgaatcaactgcatggggcattcacttaactaatctggtcaggcaacccaaccaacccagagactgctgttttcatctcctcgtcagcaaagttagaggccaaatggaattcatcatacattgaatctgaagactgaaatttacccagaatgtcagttagcaatgcagagaccataaaaagcaccctagaaatacaacgtagttttagattctgagagtcgtctgttttctgcagtcatcggagaggttcataaaaatgagactcttcctgggtatgaaacaagaagatttatgcatccagaacaaaagcaaagttaaatttcctgctgtgccacacagggagaagaaaagtgaattaacattcacaggatgtctgtcatgttttcaaaaatcaagaccaagaatgtattttacttcaaactggtgttttcatcaaaaaaccatttataatttaggaattcattgtttttaatttctattctcatagcctactcacattcyttttgcttgtsaattaagttttcttttcaatgcttaacaactctagatgtagtcccaacattttgtgcttttccttcttcaaattagactattctcctactaaattttagttttgttctgaaaataatattatgcaacaagctatggcagctaaaatgaaaaaccacagacaacaaaaaaagtaccacaaaatattcaacatacttggttgcctctccaaaatctcttgaaacttcttcctttcgtattcaactgactgctgcatgagatgaggcctgatgctactgatagcaaagttggccatgtccactttcattaggtccaacacagaaaaaatttctctgaaagagaaaaggatttagaagcaagcatttgtaaagtaaacatagcattaaaggaaaagaggaccagacgcgtggctcacacctgtaatcccaacactttgggaggccaaggcgggaggactgcttgagcccaggagttccagaccagcctgggcagcatagcaaatgtgacaacatgataaaaactgatggatccacatgaagggcttgtgagtgttgattgtactgtttttgtaacttttctgtaggtttggaatttttcaaaagaaaatgttgaaggaaattaatgtataaaaaatatatctatgtatcaaaatgataagagtgattatgcctctgagaggtaaaattatgagtaaatgtcttccttttacttttctgcattttacaaattttttttttttttttttaaatccatgagtaccaagacttcaggaagtttaaatcgaaaatagttctggtctgggcacagtggctcacgcctgtaatcccagcactttgggargccaaggcagccaatcacstgaggtcaggagttcgagaccagcctggscaacgtagtgaaacaccatctttactaaaaatacaaaaattagctgggcacggtggtgcgtgcctataatcccagctactcaggaggctgaggcacgasaattgcttgaatcmaggaggtggaggttgcagtgaaccaagatcacgccattgcactccagcctttgcaacagagtgagactctgtctcaaaaaaaaaaaaaaagaaaaaaaagaaaatgcctctgaattgtagttgcacggagtatgattaacatatttccatacctgaaaaggggcactatttccttaatgtcctttagtttcttaacttcctcatctcgagcaggtgcacacagtgtccccatcatgccaataatgaattctgccagcytggaaatgtctagcgccccattctctgcttcctgctttatcagatccagatccaagacttctgttatctggtttctcagtctagtatgaccaggcagcaagaaagataagagagtctacaagagaacacagctamgtttaatcaaaattctttagacatcatttctaattatatgtaatttataactatccaaataagggcttctcaattgctacgtaatattgcacatattttacttcttattcaacaaacctacagaaaaacaygtttacaaatcatttacaatagctacttaagcttccatttaagccctaggtagcaattaaatggatagaagaaaaaactgttaatggtgaaaaaagaaaagcatgtttattaatgtgagcctgtgagccaaccatagctgatgacaatttccatgcatacatttcttctttgatgctactgctaaaggcgctgcaaaaacagtccctccacctaaagctttctctgtcccaaaggctgagtcactttttggccattataaatggaatgtgtccacacctattaaaatttataaataaactagattttgtgaaataactttgttgtcttaaatgccttcaggttatcatggtttgcttaaaacttttttttaaaaaagggcattaagccaaaaacactcttgatccaccttctggcaagtactttaacttcttgatccttcaatttctttaaagtcttctggtggtgacacaagaagttgaataaacactcctaacacaccagaaaagcatcacaattcactctttgcctcacctctttgatttctcctacaagtttgatagcatggtcatatgctgggggatcttcacttagctgcacactcaagcaatcccaaaacgctttatgtacaatctcctttactctcttcttcaagctggggcagtgaaaaaaraaaggagggggrcaaaaaccaaaatatttgagtttcaaatcactttcaaaagcacaaatactatgggtttagggtaagatcaatcccagtgatttggaccaaggaaagatttcccaggcatacttcaactgagggcatactttattttaaaagttagtgattttttgcaataagcatctcattggaaagaatcgctctcaactaactggatagccaacattaatccaagaaacagcatatgacagtgccatataataagaatattggaaagttcaaagctgttaattttagttccctgttactagtaagtttcctaagatgtttataattaggtagtctaagataacaatttaggctgggcgttgtgacttacgcctgtaatcccagcactwttggaggccgaggcaggcagttcacctgaggtgaggagttcgagatcagcctggccagaggttgcagtgagccgagatagtgccactacactccagcctggacaacagagcgagactctgtctcaaaaaaataaaataataataataagataacaattcagtatgtagtaggttgaaggactttatttcctaaaaatatcatatttccatgtgatacatgggacaactgcttaactaggtaccaaactgtaacaacttatatatacaacataacatttcattaaaaccagtattggtcaggtgtggtggctcatgcctgtaatcccagcattttgggaggccaaggcgggaagatcacctgaggtcaggagttcaagaccagcctggccaacatggtgaaatactatctctactaaaaatacaaaaattagctgggtgtggtggcccatgctttatagtcccagctacttaggaggctgaggcaggagaattgcttgaacctaggagatggaggccgcagtgagctgagattgcaccactgcactccagcctaggcaactgagcaagattccgtctcaaaaaacaacaatggctggcgcagtggctcacacctgtagtcccagcactttgggaggctgaggcagatagataacaaggtcaggagtttgagaccagcctgaccaacaaggtgaaaccctgtctctactacaaatacaaaaattagctgggcatggtggcgcacgcctataatcccagctactcaggaggctaagtcaagagaatcgcttgaacctgggaagcagaggttgcagtgagccaagatcatgccactgtactccagcttgggcgacagagcgacactccatctcaaaaaacaacaacaacaacaataaaaatgtctttctgtcttgagcacaaaacaagcaattcttcactattaaatgcaaaaaagtaccatctttgcagatataagaaatctctgtgaagtcatatttagaagcttcctgtgggagacacttgccagcacagcagccattcctcctccttttgttaacagaatcccagtgtttttcagggcaacaatatactctgcctgtgacaataaatcatgactaatctaataagcccatcacagcagttcattcccttttagccaacttaagctctccaggttcasttatagcaagggtagcatgtgactaaattctgattaacaaaatattagcagatgtctgtttcatgactccaggggaagatgttcctctccaacaaaaggagagccctagtcctcccaaactttttgctcttgccaggaaggctgatgtattatgggatgcttggagctgcagcattcatcctgcaaccatgaggacaggctaagagactctcaggcaccatccagaatcctgactttggtgagctgctgacagaaaggcacttgcacgcatatttccttgattctaaaacaaactcccccctccccaatattttaatctctcagaaacttggatctttcttaaaatcaatggcatttttataattataatgggcagtgtttcctctttcttatgacagyacatttttaaaaggtgcaccttacaaccaatagagtttttgattcaataaaaaaatggttaagtgccaggcactagggacacagagaataacccacagtcttcgcctttgcgatgaaaccaacractatagtgcagtgtgatagtttcaaagaagtgaatgaaacaaggcaatgaaaacacaagatgaggcagctagatcctactgagtaggcagactttcacaaaagatttttagagcttttatttgatttttaggttgttcctygttcaggaatattttttagcaataatgtacaaaaggaaaaatacrtttgaatatattggtatcaactgaaggaaacattttcaaaactgggaaatgacagtgttctactaagcaagataatttagcaaccaccttacctgttttctggtaattcaactggtttaatctgaaagtctccatttactacaatttcatgggctagagccatgttggtgacrcctctcgctgtctctagaagttcttctactgtcacaaagcgaggaggactagctgtaacagaaactcactgtaagagatttgcttccctggatctgaatttctactaaaataagaaaacagtggttctggtaccagacaataatttcagttattgcgtctattaaaatgtttgttytggcattttcaaacagcaacagaatgttacttcatattcattttgtacccttgaatcctaaaagcagagatcatttattaacactcaaaacatctggcttttactaagactggtcaaaggaaaataattacagtaaactgaaacctaggaaaacttaagttacagatgatcatctgtcccataagctgagggtttattttctagtctttctgcctcctgtctaccctaaaagaaaaaaaaaaaaaagaagacaccagatttaagatcttctcttttgctcccattagcagtttacttttgcactaccactaacactgccacaaatgaatctccccaaattaaaatagcatcaaggctaggcacagtggttcacacctgtaatgctagcactttgggaggccgaggcgagagatcatttgaggccaggggttggagaccagcctgggcaccatagtgagatcttgtctctacagaaaaatgtaaaaactaaccgggcatggtggtgcatgcctgtagtcccagctactcaggaggttgaggctggaggatcgcttgaacctgcagtgagctatgatcatgtcactgcactcaagcctgggtaacagagcaagactctgtctcaaaaaaataaaaataaaaagttgtaaaaaattaaaataccatcaagtcctttagggtgccgatggtgctgtttaaacaatgctaaaaccactatcttgtacaggatactgtgacagaatatgatagctctgcagtggtcaatggacagatcaaaagatgtgtgacacaagaattttctagaatgctgatccagtgaatcaaaaactttgaaaaagagtcatctctgatttctctctttcccctgctctgttatccaagtcctgtagattttacttctgtatcgactgctgcaacggcctcaaaatttgtgtccatacttctcttttgataaagcttgagactgatcattcagaaagaaggttctaaaccaaggaacaaagggggaattcttactcttaaaagcctatgataaggccaggctcacacctgtaatcccagcactttgggagatcgaggcaggtggaccacctgaggtcaggagttggagacccacctggccaacatggtgaaaccttgtctctactaaatatacaaaaattagcagggcgtggtggtgcatgcctgtaatcccagctccttgggaggctgaggcgaaaggattgcttgaacctgggaggtggaggttgcagtgagcgaagatcacaccattgcactccagcctgggcgacagaggaagattgtctcaaaaaaaaaaaaaaaaaaagtctctgatagcaattctcaaactttagcctatcatggagtcagagggaggacttgtgaaaacagattgctgagcccacctctcagggtttctgatttagcagctctggagcagggccaaagaatctgcattttttatttttctattttttttttgagatagggtcttactctgtcaccaacaggagtacagttgcacaatcatggctcaccccagcctcaacctctcaggctcaaatcatcttcccaccttagcctcccaagtagccrggactacaggcacatgccaccatgtctggttattttttctatttttttaaagacaagtttcgccatgttgcccaggctggtctcgaactcctgagcttaagtaagtgatccgcctgcctcagcctcccaaaatgctgggattacaggygtgagccacagcagccggcccagaatctgtatttctaacaagtctccagttgatgctgatggctccaaacaccacagtttgagaagtactggcctagaagatgaatatattaattttatgtgatagtgataagatctggccttaaaattagataagtaatgtcactggtttgcccaggtttaaaagatcttcttacattggtgaaaagttattttccttcttttttcttttgcgcaccaaaataaagaaaaaaaaaaaggaaccaaatcgaagagctggtcatatcctgcctggtaaaaaactttatttggtcacaaggggaagttgggaaaactcagaattcttcctcacaacattctcagcatttccaaagaatatgaataagaatacagaataaataaatctggctttgttgatattgctaaaatatartaaatatccaaaatcaaagcccaatatatcttttcaattaaaaaaattttttttaacttttaagttcaggtgtacatgtgcaggtttgttatacaggtaatctcgtgtcacgggggcttgttgtagagattattttgtcacccrgttattaagtctagtactcattatttttcttgatcctctccctcctcccactctccagtagaccccagtgtctcttattcccctctatgggtatattattaagatgtcaattttccccaaatcaatctattggttaaatgaaatcccaatcagaaggcttttttgttgaaactgacaaactaattctaaaatgtatagggaaacacaaaagacctcgaaaagccaaaactattttgaaaaagaaaaataaagctagaggactgacactgatttcaagacttattataaaactataacaagacagtgtatttttmscataaggatatatagaaattcagggcagaaaatccagaaatagactaatatacacacacatatgtatataggtggtcaacagacaaggataggccgggcacggtggctcatgtactttgggaggctgaagcaggtggactgcttgaggccaggagttcgagaccagcctggacaacacagcgaaatcctgtctctactaaaaatcatttaagcccaggagacagaggttgcagtgagccgagattgtgccactgccctccagtctgggtgacagagcaatactctgtctcaaaaaaagaaaagcaaggatagttttgtttgcttgtttgtttttaatcaaatggtgctacaacaattaagtatctatatgtaaaagaattactctatcatgcctgtaatcccagcactttgggaggctgaggcgagcggaccacaaggtcgggggatcaagaccatcctggctaacacggtgaaaccccatctctactaaaaatacaaaaaattagccgggcgtgatggcaggtgtctgtagtcccagctacttgggaggctgaggcaagagaatggcgtgaacccgggaggccaagcttgcagtgagctgagattgcaccactgcactccagcctgggcgacagagcgagactccgtctcaaaaaaaattaataataattactctagatccttctctcaaatgataaacaaaaatgaactcaaaatggattgcagagcggggcatggtggctcatgcctgtaatcccagccctttgggaggccaaggtgcaaaaattgcttgaggccaggagtttgagaacagcctgggcaacatggcgaaaccccatctctacaaaaaatacaattagccaggtgtggtggcatgctcctgtagtctcagctactcaggaggctgagacgggaagatggcttaagcccaggaggcagaagttgcagtgagccatgaccccgccacagcactccagcataggtgacagatagagaccttgtctaaaaaaaaaaaaagaatcacagatagaaatctttgcgatcttggattaggcaaagatttcttagataggatacaaaaaactcaaactacaaaataaaaaatggataatttggattttatcaaaatttaaaatgtacattccatgatagactctattaagaaaataaaaaggtttttttgttgttttttgaaatagggtcttattctgttgcccaaactggagagtggtgatcacagttcactgtggcctcaacctcccaaatagctgggactataggtgcacacccagttcagtagggatctcctgtatatatacatatgtataaatatatgcttatttttaaattatttctgttatcagttatcagaaaatgaaacttccactgtgggtacatcaatatcaagcatcaggtgttattatcaagcatcaggtgttattaaactccaccaaggtcttaccccttaagaagaaactcagagattattagggctcccaagttttttaaccttgcttttgcaaaaaattgtggggaaaagagagatcagactgctactgtgtctatgtagaaagaagtagacataagagactccattttgttctgtactaagaaaaattcttctgccttgagatgttgttaatctgtaacccttgtcccaaccctgtgctcacagcagagacctgtgctgtgttgactcaaggtttaatggatttagggctatgcaggatgtgctttgttaaaaaagtgcttgaaggcagtatgcttgttaaaagtcatcaccattctctaacctcaagtacccagggacacaatacactgcggaaggccctcyagcaggggcctctgcctaggaaagccaggtattgtccaaggtttctccccatgcaatagcctgagatatggcctcctgggaagggaaagacctgatcatcccccagcccaacaccygtaaagggtctgtgctgaggaggattagtaaaagaggaaggcctctttgcagttgagataagaggaaggcatctgtctcctgctcatccctgggcaatagaatgtcttggtgtaaaaccyaattgtatgttctatttactaagataggagaaaactgccttagggctggaggtgaggtgctagcggcaatactgctctttaatgcacccagaagtttgtatmcgtgcacatcaaggcacagtacctttccttaaacttatttatgacacagagacctttgttcacaggtttcctgctgaccctctccccactattacactattgtcctgccacaaccccctctccaagatggtagagataatgatcaataaatactgagggaactcagagacagggtgcaggtcccctgggcccacttttctttctctatactttgtctctgtgtcttatttcttttctcagtctctcgtcccacatgacgagaaacacccacaggttgtggaggggcaggccaccccttcaaaaataatcaatgtcttaccatctgaaatttatgaaaacaacagaaatacatcacatcaagtcctctgggtgaatttttttttttttttttttttgagacggagtcttgctctgtcacgaggctggagtgcagtggcgcgatctcggctcactgcaacctccgcctccygggttcaagtgattctcctgcctcagcctcccaagtagctgggactacaggcgtgtgccaccacacccagctaatttatgtatttttagtagagacagggtttcaccatgttggccaggatggtcttgatctcttgacctcatgatccacctgccttggcctcccaaagtgctgggattataggcatgagccaccgcgcctggccggatttgttatttcccaataattttagtcatctgggtaataataggcaccgttactatgctgcctagtcatgaaacacagtggctggagcaaatcaggaaggaatttcacttcctctggactctgttgagtacggccttgaacaagtcacttaaatcttgcagggtcagtgtttctccatatgcaaaaagaagagacttaagggtgtgctatgaaatataagaatcctcygaattttaaacaagtgcattctcagtgttttgggcatacttggaaaaaaacagcttgcaccaagtactaagaacctcaccattaggaagaagaaaattttcaggaactgtccaagttaagagactacttaaaatcaaacttatcaatgacaggtatctgatcatgatagataaaagctacagttctaagatatgatcaggacatgttaccgatgtacatayagaggaattattcactgcatacaaattatagggttgtggggattttgttttgtgagagttctcaaatttaccaatttcataaatgaaaacttggtaaggaytgcataaaattgcataaagatgcaatttggtggacaacacgtcttcacctcaatttgttaagagaacctgggttgtaataagagccatgaaaaatggtaaggtcaactcagacatggtggtgcacacttgtagtctcagctactagggaggttgaggtgggtgaatcacttgagcccaggagttcaaggccagcctgggcaacatagagtgatccggtcttaaaaaaaaaaaaaaatgtaaagatacatgtaacttaccctggagtttatcttacgtgatacaaagctaaagttgttgctaaattttgttattttgttacagcatttgcgcactgatgccctgttagagaaactgaaaaccatattaggttaaacatgactttagagaggctggcagacagattccaaaataaaatgaagttctaatttagaatggttgtactctctatctttactaaggtgtcctgagatgcctatacactctgaaaagatgctgttagttacataagtggacggacatttatggagggcaagattgcaactgtcasccaaacagctactatagaatgagcacagtaaarccagggtacagattacccatagtacttattatgttgttggaaactgcttgttaatttgtcttcctggtcgctagcctgcaagctccatgaggacagagacaatatgtgcctggttcactgctggatccctgacatacagtatgcactcaataattatttgactgactgaatacagagacaccataattcaaagtctagtcacgagctttagaaatgtaagttctcgtgtcatctattcatctaaagatgactgggatctactaattaaattcacaaggamctgatccaataaacaaaggtcctaagtgggagatattaactggaataacaattgatgtttgtcatctgaatatagcatcttttagtggtcaactaggtgattaaacgttagaacagagggtattttgtgagaagagcattaaagtataagtagtagaagattttagagaaaacattgttaagttacagttgactgatccttactctgtttaaagaacagataatcttttacaatcaaatcaccacctcaaatcagtaccaatcaattttttacaagccagccatttttcctttttcaatattctgcatcggttacatcagaattctactcttttttttttttttcttgagatgaagtttcrctcttgtcccctaggctggagtgcaatggcacaatctcggttcactgcaacctctgcttcccaggttcaagtgattctcttgcctcagcctcccarttacaggcacacaccaccactcccggctaatttttgtatttttagtaraaacagggtttcaccatgttggccaggctggtctcgaactcctgacctcacctcaggtgattcacctgcctcagcctcccaaagtgcttataggcatgagccaatgcgcctggcctagcaactccactcttaaagtattactctgtgttataatttaaaacartaaatgttctctttttgctacttacgttttaatttgtagaattccaaatrtgattttagagttactttaaactcagtagctacaaatttacagagtttgggggaaatgtctgtaaactgttaattccatattttgtaaatccttatttatgctctatgtgttyaataatgcttccttacctgatgcccagataatgaggtcttagctttatcttttgggtttatagccctgtacctacctagcactacaggagaaataggaaggcagccaaaaggaataccttagggcattgattttaaaccttattttggtacagactactaagagaacttaatgaaagcttccacgaccttattcctaaaaacatgcatatmcaaatgttgatatacttttttggttattactagatcccctaaatcttgatcataggtcccaggataagtattcttgccttaagggcataactacacacaatttcagataatgtagcttagtactggtttgacattaatttggaatcatgccatcagrctgacaagatgccaaaggcgaagccatcaaccaaagaatggctgaacctataaaagttaaaattgtttaaaaaaattaaaaccaatcaaccaactgttgggagaagctaaagcagggcttgcatgtctcacwtaatgtaaaagagtcttggaacatgtccagggtccagggtctaaaacccctcatggccttgggaacaccaagctctgtgctaaagggcagaaggctgccctgcagcaccataatctaagcccagggcataaaacccttcgtggcttgaatggaatccagggctcagggcgtggcctctggaatgtgtctagacttgctggctccttgcttctagcactcctaggctcatagatctattktatcttaaactagaacatgtttcccattatctcaagtagcagaacatgttccatatgctgcaaagaaaatgctaaaccgtcacagctgtagatcatgtgcttgatacactgctttctttcaacycccacatcctcaccacctgcttctttgtttcatcaccaatraatagtgcaggcttccagagctcggggccttcgcagcctccataytagcattggcccccggacccactttatgcactcttaaacttgtctttttcattcttttgactccactggacttcgtcacctccacgttgggtctggccatcccaacaaccaaccaaccaataaagggtgactgaagacctaaaccaaaagttcttctttagcagaaactataggytgtaaagctatcatgttagccatatacatctacattacagcaatcaatcctggcctctttattttttttatttttatttttttgagagaggcttgtctcactctgtcatccaggctggagtgcggtgacacaatcacggctcactgcagccttgacttccccagctcaagtgatcctcctgtccccgcctcccaagtagctgggactacaaccacgtgcatgctcagctaattttttttttttttttttgagacagggtcttactttgtcacccagacgggagtgcagtggcgtgatctcggctcactgcagcctccacctcccaggctcaagcgatcctcctgccttagccccacaagtagctgggactataggcatgcaccaccatgcctggctaatttttattttttgtagagatggggtctcattatgttgcctaggctggtcttgaactcctggactcaagtgatcttcctgcctcagccgcccaaagtgctggtattacaggtatgagccaccatgcctggccaatcctggcatctttaaatgcaatagatgacataatgttagtagcaayagtagtaacaacaactaatgttyattaagcatttattacctgtgamgcactgttctaagtgccttataggaattcatttaatctttactgctacccyaagaaatattgtattttcctcattttaaagacaggaaaacagaagctttctaactacacatattggagtcaggcctgacaaatgcatgatagactgtgctagcaacaacatgtttccttggacacaatttgacctaatagttgatttattaaaatctatgtgataataaatcagaataaaatagggtccattaatgtttgctagaagaatagtatgttgactaataaattgcccgggaagggctttgatcattttagaagaaacacaccccaaaacccaaaaatgtctgtactttttccaaatacgtacaactactgatcatctacaatttaaagggataacatcaataccgacattcttagactatgacattccctcttaaaaacttgcatttttggactcacttcaaaatgcttaaggtactcttcataaaagacgtgagttgaggcaaccactgggaatgcctgaaratattgccaccctttcatttaagaggcttgctccttgccagggatctgaaatgacttcaccacacacatttagcaaactgaatcccctcaagcttgtgggaactaagcccccaggcagagaattagggtgtggtgaacttactcacatttttttttaacctgcacaagcacagtcctggctggaattagcctcagacttttcaaacactctttcaatacaagctgcaatttatactccaccctcctatttctcagagcacttcagagactggagtgtcactgaggctggagaaagacaggaacgttctggacattattctaaawtgttaatttcccatgcaattgaaaatccacaagtagctaggctgccagctgaggaactgctattattcctaaatgcyacattggcaatgttatattattagaacctagctcacggccacatgcacaaggaggyctcataaaaccgtcacctgaaaacaatgacaatattgcatctaaccaaagtcaaatttgcttacagtgaggtctctgcactctttgggggctggaggagtctgactttattgctttttgtaaggcttcatcagcaccttccacagcatcttcraggccttcctcagaatcattggattttgattttcctgcttcatttacattggacttgtcaaggttttcagacattctcaattaagtttattcactttcctaggaaagaaaaaaacaaaaaaaaagaactaaaagtattctagctctgtcaccaactagcaatgtgactcagggcaaatcatttaacctctttgggtttcagttttctcgtttgtagaataaatgagcttgctaagatcttatccagctatrttctacttcaatgactaaacagatacttgtaaaatgacatttgtaatttatcagatttctggatctcacgtagtagttagttggaatatttttgtcctactcctaagtagcatgtttcaagaatacagggccttaaactattagaagacacactctaaactacctgctgctacaattttaatcagtgattcaatcttaaattctttactttcattcctaagagcagataggtaaactccttggaaataatgcttttaattgggcttacaagtgaatacactgggctaaagggttgattccttgatattatcatgtgaataagatacccagagatgacagaaactagaattttttttttttccagatggagttttgctcttgttgcccaggctggagtgcaatggggcaatctcagctaactgcatcctccgcctgctaggtttcagcaattctcctgcctcagcctcccaagtagctgaaattacaggtaggtgccaccacgcccagctaatttttgttttgttttgttttgagacagagtttcgctctttcatccaggctggaatgcagtggtgcgatctcagtttactgcaacttccaccttccggtttcaagtgattctcctgcctcagccttctgagtagctgggattataggcgcccaccaccatgcctggctgatttttgtatttttaggagagatggggcttcaccatgttggccaggctggtttcgaactcctgacctcatgatccacctgccctggcctcccaaagtgctgggattacaggcgtgagccactgcgcccggcctaattttgtatttttagtagagacggggtttcaccatgttggtcaggctggtctcgaactcctgacctcaggtgatccacctgcctcggtctcccaaagtactgggattacagccatgagccactgcgccctacagaaaacagaatcttatgaaatgtttaagaggaatgtgtggggcaaatatttttattaccttcttgccagtaattaggaaaaagattgtgagtaagaagctgcaaacaaccataatgtatgcagttgggtgggctttttattagttgctgatcagaatagcaataacacttgacactgtgctttggagcagttaataaaaggtctgcctggrcctcccaaagtgctgggatyacaggcatgagccaccgtgcccagcctaaaacaggcctaaaacaggcggatcatgaggtcaagagatcgagaccatcctggctaacacgctgaaaccccgtctccactaaaaatattaaaaaattggcctggcatggtggcggtgcctgtagtcccaaatactcaggaggctgaagcaggagaatggcatgaacccgggaggcagagcttgcagtgagccgagatcgcaccactgcactccagcctgggtgacagactgagactctgtctaaaaaaacaaacaaacaaacaaaaaaaccctgttttaattacagtaaaagttttagtcaattcctccactctcccttttcctacggtgtttctgggagagaagacacaatgtttctgcatttgctgaaaataattaacatttgtaacatcagcacttgaagatcacaaaacattttcataaacactaattagactttcttacacacatggaaggtaatcaggtgatcaaaagaaatgtcaactgatttagggagtttggcagactgtgttctgcatattagagagaggtgaagaatcacctgatagaattatgtgaaatttcagagaactccattaaatagaatgaagttactggaattgaaatattcaggcctgtttttttgttttttttttttggacagactcttgcactgttccccagattgaagtgcagtggcaccatctcggctcagctcactgcaacctctgcctcccaggttcaagggattcttctgcctcagcctccccagtagctgggactacaggcgcccaccaccacgcctcgctaatttttgtatttttagtagagatggggtttcactatgttggccaggcttgtctcgaactcctgacctctagtgatccgcccgcctcagcctcccaaagtgctgggattataggcgtgagccactgcacctggcccaggcctgtattaatatgaaagttgttttcatgtattttccctttcgagacccatcttagcttccaacaccccactggagacacccatctcctctgtgtcctaaatcctattagggtcaggaaatgctccaagatccaaaggataacattaccagcatattctgtgagaaacgacaaacaaaacgctgctaattttattatcttcacatgctgagaaggagcccaggagggatgaagtaattcattctgtgcagtgaggaggaaagggaggatttctaggtctctaatgctcagcttagtaaactaaccccatccttaagattgagttcaagtcctgtctcttcccaggacacttcccggacctcaccagtgattgcacctttctcaactcctgcagggctggctagttgacatttggcatttgtcactgccttaaattcaattcaaagggtgcttatttaaatagaaacatgcaaatacatagtctagagggggaggcagacaggcttacaaggagccataatgaaacttaagtggcattatgaaattgcccagggaatatagcagaggaagaaactaactctgcctgggaggagattgagaaaaccttcccagaaaagatgacatttgaactgatctttaaaaggagtaggatttcacctagttaaaacatgtctggagggggagaggaggtgaaaaggagggcatttcactcagagggcagaagccaaggcacaagaaaatgagaaaaggaagtggctagagatgatggaaagatgcgttggggccagatggtaaaagtgctagtttttattttaaaattccccacctagatttcgaacttcttaagagccaggaccagtcatattccccacttatgctccatctgtatatcccccaaatagacacccacaagtatctgttgatagagatgaatccctacgtcatctctgtgatgtcactgtatctgggaggctgggcgttggtttcagacatacctgggccccagttctggctctttactagctgtgtaacttcagtgtcctcctctgtaaaayacagctacctacctgctcggtttggggggagatgaaacgagggattgtgcacggcaggccttctacaaatggtaactctaattaaagggctctaggatgcggccacgaaccatttaatttgcttatatcgcrcgcatccattcaacccccactgtgtctaaaaagagagccgaggggaggaggatcctcgcacttgccaagaagacgrtcatccgtcggcgctgcacgcgggcctaggctggacacaagaggctccccagcagaaagggtctttcggcaaaaraaraaaaaaggggctctgtcccccggcgccgggaatcccctcctctggcactgagctccactcgcgcccggcgtccggattccgttgtaaacagctgttcaggccagcgagggagtggcagggccgggagtaggggaggacgcgggcgcgccgagaggacagcctcgaggggtgagctccacccgcccgcggaccccgcctcttcctcgcctgcccccgacatcccgggatgggatccgacgggaagaggcgaagagatgcstgcgacttggaccgcgcgcctcccggacgggccccgccagcctccgccccagctcccgctctcacctgccacggagtcggcgttctccctcctgccgctcccgccgcgaatcaggcgcgggctggcgccgcggcggaagccggagggatgcgcggcaggcaggggcggttcagcctctgcccctccgaggccgcatccctcgccacgcggcgggcggtcctcccagcccgactcgggtgggcagcggtcagagcggccgcttctcagcatcaggaaggaggagactgctcttggccgggaggcgccagcccaatatagggcagcgccatgtcttcgtacggaaaggcgggagggtctttcccctgcttgccgaaggggttcagtaagcggtgactcgcagctgggcggcgccgtgtttcctcagggagaggtggaaaacatggccgatgaccgctcagggggctccgtggccagtggctcccagccaagagtcgcccgccgcacgcagtgaggcgccatgttttcgtacggaaacgcgagaggcatggccgagtgcccgccgatgagtctcagctggcggtggctcgaagctggggatggcccgcccctaaggcgccatgtttccatacggaaaggcggaacgcgccgccgcatcccagccgctggtgcgggtgacgcgaggagaaagggaggcggagaaggcgcgggtcagtcaaaagaaggaataagaagccattgcatctgaaaccttccccgcccgttctttgaaatttaattttgccatcctgtttgtagctacacaaagtttattccccttctctcatttcctcagctttaaaaaaaagttagtccgggcgcagcggctcacgcctgtaatcccagcactttgagaggccgaggcgggcggatcacgaggtcaagagatcgagaccatcctggccaacatggtgaaacctcgtctttactaaaaatacgaaaattagctgggtgtggtggcgcgcgcctgtagtcccagctactcgggaggctgaggcaggagaatcgcttgaatctgggaggcggaggttgcagtgaggcgagatcgcgccactgcactgcggcctggagacagaccgagactctgtctcaaaaacaaacaaacaaaaaaaactacaaaaaagcagatggggtgacattggtgctttcaaacactgcttctaaatagatcacatgtgggtagttattgctaacgtattgaaggccgagtgcaataccagaccctcaaaccatttactaacttgcacattaaagtctttgctttaaaaaaaaaaaaaaaagacaaaaacagaagttctctggtgaagattcactttttggaggaaaaaacaccaaaaacccttacgatactcaactaaatggaactgttaagatctacaaagaatggctgggcgcggtggctcacacctgtaatcctagctctttgggaggtcggaggtgggtggatcacaaggtcaggagttcgagaccagcctggccaatatggtgaaacctcgtttctactaaaaatacaaaaaaattagctgggcgtggtggcatatgcctgtaatcccagctacttgggaggctgaggcaggagaattgcttgaatccgggaagcagaggttgcagtgagccgggatcgcaccactgcactgcagcctgggtgacagagtgagattccgtctgaaaaaaaaaaaaaaaaaaaagatctgcaaagaaaacatgcagttcttctgagtctaaactcgtaccattaagtctctagtgtttttcagccctgactacaaatacaacttggaatctcaggggcaggggttggaaaagtatcatccaaaactccggggagggtgatgccagacaagttttaaaagctctctgggggaagcaggctagaaccacctcccttaccttccttaaaagattaatatggctgggtgcaatggctcacgcctgtaatcctagctctttgggaggtcgaggcgggcggatcacctgaggtcaggggttcaagaccagcctggccaacatggcaaaaccccgtctctactaaaaatacaaaaattagctgggcatggtggcaggcgcttgtaatcccagctactggagaggctgaggcaggagaatcccttgaacccaggaggcagaggtggcagtgagcggagatcgcacccctgcactccagcctgggagacagagcgagactacatctcaaaaaaaaaaaaaaaaaaaaaaaggttaatataaccaattttcacttggttaggagcaagtgaatgaatatactcaagtttcacctggagaggatactgcaacaataccaaaatcactgatttaatttgggatatttcacttgtaattttttaatgttttgtactgtttcaatattcaaaaaatacatatagacacattccattttgatctttggctgcagggactggaaattcaaattacgttaaggtaaagggagttcactgcaaggacataggacttggagggagaaaggtggcagccactctagaggtcggctactgctcctgtacacacaggatccctcttgtcacatctctgcttgctgtagtccattccactctttatgctacaggctggtttctgtactttcttaattgacgctcctcataatttaaatttacctatatagaatttgattggccaaactgatttttgaacaaagttagtctcattagcctccagggaagctgcccttggatcaggtgctcaaccttggtctactctgctaggatgatggcaagacttacggtcaactaggcattaggtgtctatgtgggaatgggtccccaagaaggcatcatgggtgaatgaatgagagcacacagcaaaagataatcaacagttctagtgactgaggagggttgcccaaggctttcaaggtagcactggacctgtagtttaaaaccttgacaatggttgcagtaaacatgatcgatttttctttttatcctccttataaggcctaaggtaaattgattttactagtatattttccctgaaattatcattctattagaatgttgcttctcctagaagcatgaatgtaactaagcagttctgccttcccctgaaggttgtcaaataaatatgctattcaattatgtgcaaaataaaggttacaaatcagatagcacacggttgctctgcccaccatgctgatctcaccacagttccagtagcttgtttctgaaaacttcctctcacatttaaatcataaacttatcttctttttcccctcactgtaaagagagctgccttcccttttttttttttttttttttttttaagagggagtcttgttttgtcgcccaggctggagtgcaatggcacgatctcggctcactgcaacctccgcctcctaggttcaagagattctcctgcctcagcctcccgagtagctgggattacaggcacccgctaccacgcccagctaatttttgtatttttggcagagacgggttttcaccatgttgggcaggctggtctcaaattcctgacctcagatgatccacctgcctcggcctctgaaagtgctgggattacaggcgtgagccaccacgcccagcccttccattcttacctatccaaaaaaacagagttattccctgagttattagaactggtatcatagtattttatagatattagtcctcaacctttatctacttagactaggcactatcagttatacctaagggggggaaaaaacattactgacatactaacatattggtgcatcatttcagttttccttacctctcattaaagtcagttaaaagacaaaattcagtatttaatcttttggctttattactattaggatgaacaacttcaaactgtattatattgcttgtctatttatcaaatacagttgacccttgaacaatgtgggggttatgggcatcaatccccctgcacaatcaaaattctacatataagttttgactcctctaaaacttattagcctactgttggccagaagtcttaccaataacagtcaattaacacacatttcgtatgttacattatatatagagtgttttttgttgtttttttttttttgagacatgatctcgctctttcacccaggctgaagtgcagtggcataatcatggttcaatgctgtttcaacttcccaggctcaaatggatcctcccacctcaacctcccaaggagctgtaccacaggtgcatgctaccatgcctagctaatttctttttttggggtggggtgttagagacagggtctctctacattgcccaggctggtctcaagcaatcatctcggcttcccaaagtactgggattaccgttatgagccaccgtgtctgctctaaatactgtattcctaccttaaagtaagctagagaaaagaaaatgttattaagaaagtcacaaggaagagaatatatactattcaaagtgaaagtggatcatcctaaaggtcttcatccttgtcatcttcacattgaataggtagaggaggaggaaggctggtcttgctgtctcaggggtcacagaggtggaggaggtggaaggagaggcaggagaggcaagcacactttgtataacttctgtttttaaaaatccaagtggacctgcgcagttcaaacttgtggtgtttaaaggtcacctgtgtatcttcacagtgcactcattccaaataatgattaacttggttaaaaaggtattaaaaactttagctctaatgcccaatttacaagaactataggatacaaaggaacatgataaaggacagcccagacttgtcatcagaaaaattcagactgaggaaaactcaagaacaactgaccaagtttatttaacaatagagacatacacacagacaaaaagacagagaggggaaaggtggaaggagaaaggagtacttacatttttatttatttatttatttatttttttgagacagagtcttgctctgtcaccaggctggagtacagtggtgcgatcttggctcactgcaacctctgtctcctgggttcaagggattctcctgcctcagcctcctgagtagctgggactacaggcgcgtgcccccacgcccaactaatttttgtatttttagtagagacggggtttcaccatgttggccaggatggtctcgatctcttgacctcgtgatccgcccatctcagcctcccaaagtgcagggattacaggcatgagccaccgtgcctggccaaacttacattttgttttgttttgttttgttttgttttttgtgagacagagtctcactctgtcgcccaggctggagtgcagtggtgcatctcagctcactgcaagctccgcctcccgggttcacaccattctcctgcctcagcctcccgagtagctgggactacaagtgcctgccaccacgcccagctaatttctttgtattttttttttgtaaagagggggtttcaccgtgttagccaggatggtctcgatctcctgacctcgtgatccgcctgcctcagcctcccaaagtgctgggattacagaacttacagatttttaaagagagacttaaacacactaaccaattgcaatttatggacattatttgaatctccatttgaataaactgtcaaaatcatttgagatcatcataagatttcaacactaactgcaaacctgatattaaggagttgtaggtttatgtgaatgacaatggtttcatgttttttttttaacgttcctttttgtcatacacaccgacattttatagaggaaatgatatgatatctgaaatttgctgggatgagtgaggagtgagggaggatacagattaaacaagattggctatgagttggcagttggcagtattagttaatgggtacaagcaagagttcattactctattgtctccactttcatgtatgtttgaaattttccacaataagcttaaaaaattttgttttcggaagcattaggacagtctgatttctgatttgtctacaacttaaggtaatcagcaaattctttttatcataacctaagtttctatcttgcatctttaaggagtacctttcaaaacacaaaccccactcctattaacatgtaattatcgttttctttactgtttaatgctttcttatataaatactgcaatgtcatctaaatctctattatgttctataaagcattgagcacagtaattataaatcaactcaagtacttaacagcaatacaccatatgactaatagcttctgacacacg

SEQ ID NO: 97866 - DNA, 27246 bp, Homo sapiens
  misc_feature (1)...(27246): n = A,T,C or G
tggcgcacgcctgtaatcacagcactttgaggggctgaggcgggtggatcccttgagcccaacagttcaagaccagcctaggcaacatggtgaaaccccgtctctactaaaaatacaaaacttggccaggtgcggtggctcacatctgtaatcccagcactttgggaggccgaggtgggcagatcacgaggtcaagagatcgaaaccatcctggccaacatggtaaaacctcatctctactaaaaatacaaaaattagctgggtgtggtggcatgtgcctgtagtcccagctactagggaggctgaggcaggagaatcgcttgaacctgggaggcggaggttgcagtgagccaagatcgtgccactgcactctagcctggcaacagagtgagattccatctgaaaaaaaaaaaaaaaaaaaaagaacaaaacttagccagatgtggtggcacgcacctgtggtcccagctactcaggaaactgaggcgggaggatcgcttcagcttgggaggtcaaggcgcagtgagttaagattgcaccactgcactgcagcctgaggtgacagggcaaggccctgtctcaaaaaacaaaacaaacacacacaacattgtgcaaatattttttatcttggctagtcagaaaacttggcaatgccaggcttatatttctttttctttttctttttttgttttccttttgagacagagtctccctttgttgcccaggctggagtgcagtggtgcgatctcagctcactgcaacctccacctcctgtgttcaagagattctcccacttcagccttccgagtagctgggactacaggcatacgccaccacacccggctaatttttgcattttttggtagagataggttttgccatgttggccaggctggtctcaaactcctgacctcaagtgatctgcccgccttggcctcccaaagtgctgggaatacaggcgtgagccactgcacccagccaaggcttatatttcttctggaaagaatcagctagaggcctgaccctcgccagcattttccaggtgctctccagccacctggggctctcaggccctggagtgtagcctctggaggtggtgagaacacagactctggagtctgaccaacctcacttcacatatctgccctgctccttactacctatgtgattggtgttcagtaaattacctaaccctgctcagtttcctcatcaataacatgggggtaacagtagaaccaaccaactaatagagatgctctgagaataaaatgcattaagggtatggaaggtgctcagcatacagcctggaaagtgcttaccactccctaaacatttgctgctgccgctgctgctgctactattgtaaagataaggacagatgaagggaacatttgcacatcagacaaagaagtgtggacttaacacctctccttctccctctcccttccagagggcacgagacatccacttgacagtggagcagaggggttacccagatttcaacctcatcgtgaacccttatgagcccataaggaaggttaaagagaaaatccggaggaccaggggctactctggcctgcagcgtctgtccttccaggttcctggcagtgagaggcagcttctcagcagcaggtgctccttagccaaatatgggatcttctcccacactcacatctatctgctggagaccatcccctccgagatccaggtcttcgtgaagaatcctgatggtgggagctacgcctatgccatcaaccccaacagcttcatcctgggtctgaagcagcagattgaagaccagcaggggcttcctaaaaagcagcagcagctggaattccaaggccaagtcctgcaggactggttgggtctggggatctatggcatccaagacagtgacactctcatcctctcgaagaagaaaggagaggctctgtttccagccagttagttttctctgggagacttctctgtacatttctgccatgtactccagaactcatcctgtcaatcactctgtcccattgtctactgggaaggtcccaggtcttcaccagttttacaatgagttatcccaggccagacgtggtagctcacacctgtaatcccagaactttgggaggccgaggtgggaggagcgcttgagccgaggagttcaagaccagcctgggtatcatagggagaccccgtctctacaaaataaaaaaataattcactgggtgtggttgtgcacatttgtagtctcaggcactcaagaagctgaggcagaagaatcacttgagcccaggaggctgaagctgcagtgagctgtgatcacactgctacactcctgcccaggccacagagcaagaccctgtgtctaaaaactaaaacataaaaataagtaaatccgtttaaaaaaaggattatcccagccctgccagggggaggatgaggaggggtgtgaggactaaatatacaaataaatagtgtggtcacatgacgcacagcaacagaattcggacccacagccttctgcagcaatcaaccccaaaccatcaggacttgggcgataactggcagcatctctaactccccaccctactcccatcctgcttcctatttatgaccaacccaagaaacccaaataagctccccagaccaatcacatggttagccccacttctggtgagtgcacttccagcttccccataccaacagcctcaatcacggcatccctgaagccttcccattttcctgcctgtctttaaatctctgtcaaaagcgagagatgggtggctggttcctttgctatagcaagttgggaataaatcgcctttgttagttctcatttgggggctgtttatttccacagggcctaatgctgtcctaatggttattgcttgatcatttgagcttctcaactctaagaaatgaggactggggaaactgaggcaaaaagagacaaagaatgggagattgaggatgatgcagtgtaaaaaaaaatcacctcaactcctaaaacccatacacaaacagtacataatagtcaggaaactgtaggaaagtaatagcatctttattatcaaaggacgtcatgtgatcaggtttactccaagcaataaaaagtttccttttgcccccctgttttgcctagttttctggtgggctactctcctaccatagcatagaaaatgcacactgcaattggttatcaacagcctctggtcaatttagcaatcataatctgtgtatctcccacctctgtttgccttcagggacagaaaaagtgcctcctttccaggaggtagacaggctgttccagtccccatctttgtgtccttcataatgcccagcacagcccacattgtaggtggtgggaaaattcttgtttaaaataaaaaaaagaatgaaaaatgcaatgtcttagtccatctgggctgctaaaacaaaataccatacactggatggctcatgaacaataaccatttatttcttacagctctggaggctgggaagtccaagtcaagacactggcagatttggtgtctggtgaggacctcttcctgattcacagatggcagcttctcactaagtcttcacatggtagaagaggcaaaggtgtctctaggatcgcttctttttttttttttttttttttttgagatggagtctcgctctgtcacccaggctagagtgcattggcatgatctcagctccctgcaacctctgcctccgaggttcaagcgattctcctgcctcagcctcccgagtagctgggactacaggcacctaccactgtgcccagctaattttttttttatttttagtagagacggggtttcaccatcttggccaggctagtctcgaactcctgaccttgtgatccacctgtcttggcctcccacagtgctgggattacagttgtgagccaccatgcctggcctctggggtctcttttatgaaggcattgatccagttcatgagggctcaggacccattatgtaattgaaagattctccgtggggcctgaaagcttaagagaatgaatgacccctccctcccctccctccttgggcccggtcccaaggcgcaaggccactcgcgccagcagcatgtgtcagcaagatagcagaagcgggaagagagcgggccagaagacacctaccccctgaagaccgagagagacgtcatccgggtacaatgtagcggttacaacagactgagaaacttcctgtttacaggagactacaaaacccctgccccgtcctcatttggtgctgacgccattttaagcctcagcccacctgcacacacactgcctcatgttgtctgttggccacgctcttggggttcgaaccaacacaagaccctttcactaattacttcccagaggtcccacctcctaataccatcaccttgggagtaaggactttttggaaattatcagtatcaaaatggagtcacttatgtcaaaccctaacaaatgcctgtcacaaaaattatctcaagaagttcctaaaatccgcagtattatagataaaccacttgcataagaatatttgcctaacagtgggtgtctccacaataagctaaagccaactcctgcaacaggctcctgtgatcaacggtacttgttttaaagaagcttatgtggactttgtcttttctcgttgccacaacctcttttaatgtgcctatagtccactatagcatgcatatctcaaattgcaattccttgcaattctggaataaacgctttattttggagagtcagtctctctgttatttattttacggtgtcaattttaacatatgaattttggaggaacacattcagaccatatcagtcaccttcctcttctttgaaatagaaaaagctcaaggccagagagtttattttagtaaagttttgacatacctgtcttcaaagataaaacatgaaacagcattccacacacaaaagtaaagtgattttgttcatccttcactgtgaggtattttaaccacagagattctaattttttggtcttggatgggtcctgggagtcagtattgcctggctaatttttgtatttttagtagagatggggtttcaccatgttggtcaggctagtctcgaactcctgacctcatgatctgcccgcctcggcctcacaaagtgttgggattacagatgtgagccaccgtgcccggacaggattctgcatttctcttttttttttttcgagacagagtctcagtctgttgcccaggctggagtgcagtggcacgatcttggctcacctcaacctccacctcccaggttcaagtgattttcctgcctcagcctcctgagtagctgggactacaggtgcgtgccaccatgcccagctaatttttgtatttttagtagagatggggtttcactatgttggccaggctggtctcgaactcctgaccttgtgatctgcctgcctcagccccccaaagtgttgggattacaggcgtgagccaccgtgcccagcctggattctgcatttctaacgagctcccaggtgttaccaatgctgctggctcatggactacactcttaagtagtaaggccctaggctattaaaggaaatacagattcctggattccacctatcagagattctgattctgttagtattttctgtgagacccaaaagtctgcagtttaaccagctctctaaggtgtttcttaggcccaactggactgggaaattactagaataaatgacatggaatcaaaacctgggaactaatcctgggtctgtcattaactccttaggagattcccatcccctctggagatctgtcatcaagaaatgattggagaagttaatctcttaggcccttctagctcttgcctttgagaaccgcccacctccccattcccacctggtatccccaacccagtacagttcatggccaatggcggtccaagtcttggaactacaatccccacaatgcctcgcgcctctcctctcacgtgacgtcatgaaggaggcttgataacggcggtgttctccacaatcctttgcggtggttcaagatggcggcgcccagtggcacwgtgagcgattcggaaagtagtaacagcagtagcgatgcggaggagctggagcggtgccgcgaggcggcaatgccggcttggggcttggagcaacgcccgcacgtggcarggaagccaagagccggtagggtactatgtttggggagactggctgaggggcgtgggatcttcccctggagcctgagaggatggatggtgaggagagagtcactgggactcggcttccttccccgagagacctccagggactgggtgtagtgcagattgaaagcatgggcaggtgcagtagggaggktatttcattattccagtcggggaagctgaggtacccaaatgtcttttgattctgcctccttgggtctatcctcactgccccacactgggaaggctgccgtctcttcgagataactgcaacagccccctcccggtattctcgcacccagcctttccccacctccaacacattctcccaccctggaggttgttgccaagagcagtgcccagcacatcactctgaccgtgactccctagtgccctgggaataaatacagagccccgcaacatcaaggggcctaatcatggatagaacccaagggttcttgaatttggaatgaaaacatgttgcatctttgctttctattcatctctgactgaattttagcatctctttccgtcttgcaagcactaagccacagtagttctggcaatgccgttactttatcccaacagaagtcacagattttcatatctcattacaatctttgcagatacagatatcaatatatcattttattgataaaaagatattggggaaaaaagtcatttacactcatccctgatttaaaatgtgccactctaatttttagacccatctctatatctaagatgtaagaagcacatacatcacaagtttggttgtttactatcatgataattaaatttcggtatcattggttttctttgtaatcctgtatgttgcatttcatgcatttaaaacattgctctgagaagagaaccgggcttcaccaggctgttagagaaggctatggcaaagcaaggttaagaaccgctggatttgtttaaaaggacttacaagccctttggtgatccattgccttcctctcccttccttccctcctgccatactgcacttcctgtaggtagcttccagaccatagtctgcccctctcaccccctagtaccataaccacagttttctctgcaagttctatttacagatctgcctttccatctcattagcggtgggaacttgagcaaagtacttaaatctcactgtacctaaatttcctcatctgtacagtgcgggtagtgatagtacccaccccataaggttgagaagtaactgagataatgcaatctacagtgcttggcacatcttaaaggcccaatacatggtggcaaatatgtggttggtctttccacatggactgctttcctcctcctgcctaattctcgctcttttttttttcaaaactaggactcagtctgttaccgaggctgacacaatcatggctcactgcaacctcgacctccccctactcagatgatcctcccacctcagcctcccaagtagctgagactacagatgtatagtcccagctactttttgtattttttgtagagatggggttttgccatgttgcccaggctggtctcgaactcctgggctcaagtgatcctcccttctcaaccttcaaagtgctgagattacaggtgtgagccactgtgctcrgcttctagttttttttgtttgtttgtttgttttttggggttttttttttttttgcatttttttttttttgagatggagtttcactcttgttgcccaggctgcagtgcaatggcacgatctcagctcactgcaacctctgcctcctgggttcaagtgattctcctgcctcagcctccctagtagctgggattacaggcgcctgccaccacgcccagctaattttttgtatttttagtacagacagggtttcaccrtgttggccaggctggtctcaaactccagacctcaggcaatccacctgcctcggccttccaaagtgctgggattacaggtgtgagccaccgcgcctggtctctttttttctttttgagacgcagtctcgctctgttaccaaggctggagtgcaatggcgcgatcttggctccctgcaacctccgcctcccaagctcaagcaattctcctgcctcagcctcctaagtagctgggattacaggtgcccaccaccaggcccagctaatttttttttatatttttattagagacagggtttcaccgtgttggccaggctggtctcgaacttatgacctcaggtratccgcccaccttggcctcccaaagtgctgagattacaggcatragccaccacacccagcctagattacattcttgagtgcgtctagtaatagccaccaggagttgagaattttctttttgcccctgttctaaacactttgtatttgttgtctgttttcatcttcccagcaatgccacaagagggtgtattagccccattttacagaaaactgattctcataatggtaaaataacttggccaaggttgtccaatttgtgagtggcagaaccaggcgtaaacccaggcctacctgactcccaagtccatgctcttcattgctgctgtgccactctgccatggacaagtgtctattgtggtcaaaactcccaccctttggtccatgactgtggaaatataggtcactattttatttatgtaacctctagagacagctcttaaatccagtgatgaactcgtcactcaaaccactttaattttagggtrgcatctactttgacttatttttctgacaattaattcaaaccaagacactatggcaggatctggggatacagaggtaaaaagaggcagaccacgtattcaagtagcttacaaatccaggaaggggatgggtatggaaacagcgtccacaacactgactccagaaggttggtaatcgtattcccattttatagatgagaaaaacaaaggctcagggagagaaagtgacttgcccggcatcacacagcttggtggcagagccaggactcaactgaacygtctccctctgtaatactgtttctgttccctgacggtacctcaccttcatcacactgtagtcatgatggaagagatgctcttcttccaagtgattatgtgctgaagacgaaagaccaggtctttaaagactgtccatccaggcccccacattacccacctccaggagcatggggcgtgtttagcattctgtgttgtgctctggagtacagtgacacagaccacaaggtactaggacacagatgcaatgtgtatgggtgatgacataaacacagcagtgcccccatggagctgtttcttacaccatggccctccactgggcccggagctaccaagtgtccactttgttcagttggccccttaaatatacaagcacgttttgtcttgttagttaagtcagaaacctcagagctaactttcactcatttctcacgccctgtagtcagtccatcagtgaatcctattgactccatctttttttttttttttttttttttttagacggagtcttgctctgtcaccaggctggagtgcagtggcgtgatcttggctcactgcaacctccgcctcctgggttcgagcgattctcctgcctcagcttctcaagtagctgggactacaggygtgcaccaccacacccagctaatttttgtattttttagtagagatggggtttcaccatgttgaccaggatggtctcgatctcttgacctcgtgatccgcctgcctcagcctcccaaagtgctgggattacaggcgtgagccacsgcgcccggccttgactccatcttaaaagtkcatctatctggagttcacccacttctcaccacatcaattactgcagcagactccgtgttcctgcctttgccccaacagtctcacgctgcacagcagccaaagatgttctgtcaaaacccaggtcagtttatgtcccttctctgctcatttccagagctcctcctcctcaaagtccaggtcctcccattrgcccacgtcagggcccttcatgatctggcccctctgagttctccatctctgctgctcccggtttactgggcaggctctggtcacactgacctccttgctggttctaaacacacaaagcaggctccagtctcagggcctttgcagatgctttccctctgcctggaaggctgtgtcccacatgtccacttggttcactccctctcctctctcaaatctctgttcaaatgttgccttatcagtgaagccctctctgcccacctttatgttaacaatccccagcccaacactccccacctctctcgcctactttgtttccgtttttttccatacacttagcattatccaacttgacattttgtttacgtatgtgtgtttatcatctctctccaccaactagaatgtaagctcctgcagacagtgatagtcgagtaagttgctcagcaatgacaacacctggttaataaaaggcattcagtatctggtttgagggaatgaccaaaaggccgggcatccccaccgttttggcttgaaaaatgtgatccacaaaagagccatcttctctctcttccacggcacttagcacacagccaggcaggcattaaactgtgcagtcaaatcacacttagacctgcctgttcagcacagcgtggtggttaagagggggctcaggagtcagatggcctgggcccccagcccaaccctgtcacttattaggtatttgactctggccaagttattttacatatctttgacgtttcttctgcaaaatgggataattgtaatccctccaatcgggttgttgggaagattcactgagttatatgtgttatatatattttaagttacatatataactattttaagttttatgtatatataactaagttatatatataactattttaagttttatatatataactaagttatatatatattttaagttatataactaagatatatatatatataatgtacttacataaaatatgtaactatattatatacatatataactaaattatatgtaactatttgaagttatgggtatataactattttaagttatatataaatataatatatatgagttacatgtgtatgtatatatatgagttatatgtattttaagctgctgaaaatagtgcctggcacgcatttgttgttgctgtcattgtttcctctataaatgccctaattttcatttttccacaggtgctgcaaatagccagttgtcaacctcccaaccgagcctcaggtactatgcactttgggttcaagtttcacttattcaacaaatactgatcccctgcgtgtgccagatgctaggcttcacgcctggcatttccaggtgaacaagacacacatggtccctgtgctcatggggacagcttctgagcgggcaggaagtgaggtctctttgtgtgtgtcgtaggcataaggtgaatgagcatgaacaagatggcaacgagcttcagaccacccctgaattccgagcccacgtagccaagaagctgggagccctgctggacaggtaaacaaaggtggagtttctcctctcttgcccttgttaatatgaacagcaatggctcacattggctgggagctcacggtgtccaggctggcacggtggcaggcacctggcatatgtcatctccctgcatttataaagaacattatcatgtgggtcctgttgttacctttatcctccaggtgaggaaacaggctgtcagcaaggagacaggtgtgcctgaagtcacatcatcatcrcagctaccatttactgagcaactgtttgtggccaggctctgtgctaagtgcttgatgtccattttctcatttaatccttctgatgaccctgagaggtagggactgttatcattcccactgtacagatgggtaactgaggctcagagaggcaaagtcatttgcccaggggacaccgctattaagtgacaaagccaggattcagaacccaggagggaacagaattgggcctcaaacccaagtgcgtctgactccaagcccacatttttttgttttgttttgttttttgagacagagtctcactctgtcgcccatgctggcgtgcagtggcacgcacaatcttggctcactgcagcctccacctcctggattcaagcgattctcatgcctcagcctcccaagtagctggacttaacgggcacctgccaccataccaggctaatttttgtatttttagtagagacggggtttcaccgtgttgaccaggctgatctcgaactcctgacctcgagtgatccacctgccttggcctcccaaagtgctgggattacaagcgtgagccactgtgccgggccaagcccatgttcttaacccctgcattatcctgcaaccatgagagtaagagaggaacatcgagaagctcattcccgccacaagagggcaaggaaggaccgtgttcctatttcttgggtgccttctgtatgctagacactgtgccaggtctctatcttacattctcagcacaggttgataacccagtcggtaaggattcaggttggcattcctaaagtaggtgtcaaggatacaacctgtttgagtccatatgggctgctataacaaaataacataaactgggtagcttataaacaaaataaatgkatttctcacattttggaggctgagaagtccaagatcaaggcaccagcagattcagtgtctggggagagccctcttcccagtacagatggcgccttcctactgtgtcctcacatagtggcatgggcgaggggtctctctcagaccttttttataggagcagcaatttcattcatcaaggctccaccctcccgacctaatcacctctcaaaggcccccatctcctaatcctaataccttgggttgaggatttctctttttcttttctctttttggagacagagtctccctctggagcacagtggcgtgatctcggctcacaacaacctccagttcctgggttcaagcgattttcatgcctcagcctcctgagtagctggggttacaggtgcgcacccaccacgcttggctaattttttgtattttttgtattttcagtagaaatgggttttcattatgttggccaggctggtctcgaactcctgacttcaagtgatccaccggctcggcctcccagagtgctgggattgcaggtgtaaggcaccatgcccagctggggtgaggatttcaccataagaatttggggaggacacaaacatttggattctagcactagcccaaagcgtggctttagaaaaaaggaggtccaacagcaaagaagcgtgagaaacactgcaatctacatacctccacgtgtccttgcagactgcaagccagagtagtatattcaaggctctgagaattcctgtagtgaagagacctgtgtaactgtttarcccagcattttccaaacttgtttggccacagtgcctttgtttcatggaaaaccagtcaacaacctgcggaacaggtctggggatacactggtctagatctgttcctgactggcagagccctggcagggttttgaaagggagatgaggcaggatttggggccattgtcattccattcaaagtagatatcaaaaaggacaaatgagccttcccaaagtgtgaaccagctattcttctgagacagaatgatgggccagagccccgcagcctgaatcccacagggttcccctcaattggagaawgtagaggaggtgtttaggaaggcagctgcakwtcagcctgtgggagcagttttcctttgtgactctctggcttcaggctgaacagggcctgcttggcattgcactgagtcacagagatgtttctgcagtagaaatgccagtcagccatggttagaatattccctgcagcattttcatgtttctccaaagaaatctaaatgataccttaggccaggcgtggcagctcatgcctctgatcccagcactttgggaggctgaagcgggtggatcatttgaggacaggagttcgagaccagcctggccaacatggtgagaccccatctctactaaaaatgcaaaaattagctgggcatggtggcgtgcacctgttatcccagctacttgggaggctgaggtaggagaatcgtttgaacccaggatgcagaggttgcagtgagctgagatcgtgccactgcactccagcctgggtgacagagtgagatcccatctcaaaaaaaaaaaaggaaatgtaaatgatactgcatttggtccctagtgttaggtcagtgtctctcaaccttggcgctactgacatctttgactagcatttgtcgtgggggtctatccttcttcccattataggatgtttaccaacrtccctggcctctacctactagatgatagtagcactcaccccaccagttgtgacatccaaaaatgtctccagacattgccaaatgcccctgatggccaccattgaaccactgtgtggggtcaagaacaggtgcctgggtggcatcatctctactccctctccccgggttgcttttcctgaacagggcttggggggcacctttggcatacaggaagggaggttagggaaagcacccagggcattgctgcrtctgcctcgagggcattgctgagagccttgttctctgctgtgcacagtggcatctccatctgcactcaccagacacatgcttcctggccttgtgcctctagagaaatgtggtttatttttatgttagagagcytgtgaaggctgaagcttytcttgatgacagtcatcatctgcatcgtcatcatagctaccatttgctgagcagctacttgtggctaggccgtgtgccacaagtgcttgatatccattttccccttcaatccttgtgacaaccttaagaggtagggaccttcatcgttcccactgcacaggtggataacagagactcagagagataaagtcatttgcttaagggacatagctaataagtgacaaaaccgggattcaaaacccaggtctctgaagtctgaatgaggtccatgaattggatcaatttgcatttcctagttgtgatgttgtactatagcgaggcacaatgttaccattgcgagaaaatggatggagggtctatggaacatctgcattatttgttgctactgcatgtctacaattatctccaatttcttttaattaaaaaaaaaaatttaaaaacaggtctgccctgctccagaagctgtcctctgaaccagttttctagattggtcatatttcccttttcatgcttgctgctaggaagctcagagcaaaatgtatgccctctctctaacaagtgtataggacttcctgactacacttctaggtctttctgttcctcttgcccttatatctctttgtcctatttgaaattgcattcattttgttaaattcttttctttttttggagatggagtcttgctctgtcacccaggctggagtgcagtggcgcagtctcagttcactgcaagctccgcctcccaggttcacgccattctcctgcctcagcctcccgagtagctgggactacaggcgcccgccaccatgcccggctaattttttgtatttttagtagagatggggtttcaccgtgttagccagaatggtctcgatctcctggcctcatgatctgcctgccttggcctcccaaagtgctaggattacaggcgtgagccaccatgcctggcctcatcttgttttactatgtctttaaaacttcttcaacacttactggaataaagtgggctttaaagaaatgaagcactgcagttcgcgtggcagaggctggtcagcatgttataaccagaccatcagccctcttactaggccagcacgctttcgcttttgcatttacaatcacataccccatcccctccacttgaaaaagaattttgtttttgtcgttatccaaaaatctcatcttaaatcaaccgtctcgtctccctgtagcttcattaccatctcagaagcagcaaaggagccagcaaaagctaaggtacagaaagtcgctttggaggatgatggtgagtggttatacttaatagaagctatcatttattaagcacctaatgtgtgtctggaggtgggcgaaacagttttggtatattcttttttttttttytttttttgagataggaactctctctgccacctaggctggagtgcagtggagcaattatagctcaatgcagcctcaacctcccggacccaagcagtcctcccacctcagcttcctgagtagctgggaccacagacacacaccaccacccctggctaattatttatgttttttagagacaggatctcgctatgttgcccaggctggtcttgaactcctggcctcaagccatctgcccaccttagccttccaaagttctgggactacaggcgtgcmccaccacacctggctaatttttgtatttttttttagagacagggttctgtcatgttgcccaggctggtcttaaactcctggcctcaagctatcctcccgcctcagactaccaaagtactggggttacaggcatgggccacctcaccattctttcatctgctcagcccctgtggtgaggcaggtattatgattgaaccccatgtacagacaaggagactgaggccctgagaaacgaagtcatttgcctgaggcggcctcgtctgtgtcaccctgagcaggagcactttactgctgccctccacagcctcgcccatctgcgtctgtcctgtaccaacacatttgccactttgaaggctgccttaggtcaggagctcaagtgctgacttccagaagcctctgagggcttgctgagctgatgtggctgctggctcctgctccagcgcgccctccactggctccatcaggcatcagcatgacccttggcagatgcagaatcactttgtagttagacgactgattcctgggtctttgcctctggaccaggagctcctgagggcagaggcggggcagcttcagcacctggcacctgggaggaggggctggcatctgggggtgctgactctgctcctttgttttytttgtttgtttgcttggttgggtttttttgttattgtttcttttttaaatttttttattttgtgtcttcttaaaattttttttttgtttctctttatcttttctttctttcgttttcctttttaaaatttttttcttttttgtttctttattttttatttttttatgtttctttttgttttgttttgtttttgtttgactctgccccattgaatcttaggtttccgccttttcttcacatctgtccctggaggccgtgagaaggaagagtctccccaaccccsccgaaagcgacagccctccagctccaggtgagaactcacacctctcctcacgtcccctccttttttctcctcttctgtcttggtgggttccctggaatagccaagcagactccagtcaggaccaggccaaggcagtggccctgtcaggcagctggagaaatcrtgagctcagcgggagggaaagccctcttggcggcagctttggatgtttactgcttttgagcacctgtcttgggccagacacctcacttgatcatagttgcctcctgggacatccctgggaggcctggactctgttaagatccccgttttagagatgatacagtcagagaggttaagtcacttaaggaggtcacaaggctgctacgcccagaagccagtattggaagccaggttggcctcactcccaagcctgaactcactacctgcctctctctgcggccacctyctggtgacctggaccaagggaggacagcgagaggcagctctggggctgtgtcctgactccagctaacccagggtaccctctcgttgcagcagtgaggacagtgacgaggagtggcggcggtgccgggaggcagctgtgtcggcgtccgacatcctacaggagtcagccatycacagccctggaacwgtggagaaggaggcaaagaagaaaaggaagttgaaaaagaaagccaagaaggtggccagtgtcgactcggctgtcgctgccaccacccccaccagcatggccacagtccagaagcagaagtcaggtgagctcaayggggaccaggtgtcgcttgggaccaaaaagaagaaaaaggcaaagaaggccagcgagacctctccattcccaccagcaaagagtgctacagctatacctgcaaactgaacccagccatgggcacagggctcagccagctccaaggacaaggtgtcccccccaccctggggacaaggcatttccaagccccmcctccctctccaagttcaaggactgggctggcaaacccagactgcccatgagaccctgatggtgatgaaggcttgctcgagagttgggccaaaaaannnnnnnnnnnnnnnnnnnnnnnnnnnnnnnnnnnnnnnnnnnnnnnnnnnnnnnnnnnnnnnnnnnnnnnnnnnnnnnnnnnnnnnnnnnnnnnnnnnnnnnnnnnnnnnnnnnnnnnnnnnnnnnnnnnnnnnnnnnnnnnnnnnnnnnnnnnnnnnnnnnnnnnnnnnnnnnnnnnnnnnnnnnnnnnnnnnnnnnnnnnnnnnnnnnnnnnnnnnnnnnnnnnnnnnnnnnnnnnnnnnnnnnnnnnnnnnnnnnnnnnnnnnnnnnnnnnnnnnnnnnnnnnnnnnnnnnnnnnnnnnnnnnnnnnnnnnnnnnnnnnnnnnnnnnnnnnnnnnnnnnnnnnnnnnnnnnnnnnnnnnnnnnnnnnnnnnnnnnnnnnnnnnnnnnnnnnnnnnnnnnnnnnnnnnnnnnnnnnnnnnnnnnnnnnnnnnnnnnnnnnnnnnnnnnnnnnnnnnnnnnnnnnnnnnnnnnnnnnnnnnnnnnnnnnnnnnnnnnnnnnnnnnnnnnnnnnngcccctctgtgctcccacggagggctggcgggggcgctgtggttccagaacatttcatgacctcaggaaaaaaggaaccttccagttatttgagactagtggccaagtggtgaaacctccatctccctagaactgtctgaggtgggcaggggaagggagaccttccccaccacctccttagcctggtgtgagaaacagtttttagaaaatgagagaagggatccccaagaggccaaggcccagagaaacttttgttcttctctccttagcccacawagacttmacagaatcgtctgagaaaggrgagctttttcacccctggctttctagaattttctttgtctgcatttgtgaatataccacacatgatggtgtctctgagccgaccagattatggaaactcaattgtcagaggacccaaaacaaaacttagagtgatttggatattgcctctctgtcaatgctgaaccttaagacattttaagtaaacatcctcctcctctctacacccccaggatttgtgcgttcaccccacccaagacttcaggaagtgtcatagcactcgtggactaggtttcatgggacaaaggcattctgcaagaagtagaagcttgtggccgggtgcagtggctcatgcctgtaatccaagcattttgagaggccaaggaggtggatcaattgaggccaggagtttgagaccagcctggccaacatggcgagaccccatctctactaaaaatacaaaaattagctgagcatgttgacacacgcccgtaatcccagctactcaggaggctgaggtgggagaatcgcttgaacccaggaggtgcaggttgcagtgagccgagattgcgccactgcactctagcctaagcaatggagcaagaccctatctcaaaaaaaaaaaaaaaaaagaaaaagaaaagaagtagaagctcatggccagggatggtggctcacacctgtaatcccagcactttgggaggccgaggcaggtggatcacttgagccragttccagaccagcctaggcaacatggtgaaacctcgtctctataaaaaaaagaatacaaaaattagttgggcatggtagtgagcgcctgtgaggctgcttgtgaggctgaggtgggaggatccctttagtccaggagttcaaggctgcagtgagctgtataatgccactgcagtccagcctgggtgacagtgagaccctgtctccaaaacaaaatttttttaaaaagtagaagcttgaggttaagatgaaatctggctttgtcattagagtctcagcagagcaagaaaagcagagatgtggggtgtgagagcgtgggtgctggagcctgtctcctcttcgcaggcctctggcctgccccagcctcccgctacctgcccaaaccccatctgaatgatttgtggacaagcaagaagtttccaccgcatttctccttgactttactaaaagttaaataaacgtgccactcgccccggctggctacaagctgcagggggtgccgggtcaccccaggccttttcctgaatcccagggtagacgcggtacactgaaggccaggttctcagcagcaggcccagggatgtgggaccatgcttgtcctgggttcacaggctcctttgtccctcctggcagtgctcaggacctcagactcctcagggtggctgcgaactgccctcagccagccaggcccccaggcttctgagtgttagtcctgtccacacaggtagctcctgtgccctggggtcacctctttcttctcctgggcacctcagcttggccagttccccggccctgctcagctgctcgggccttgctgccttgtgagctcagctactcctgccccaaacaagggcagggtctgcagggcgctcgagacagaggagctgccccaccaggacctggacttggcacgggttgcgaggctcccacaggagtaaggacgacttcccagccccgaagtagccttcccagtagaggcaggaggccaggctggcctcagaggcatgatgctcttgggaacaaatacaggaaagctggaggtcatggggcctgggagagggaatcgctggggatgggaagccaggagagccctgcctgccttccctgttagcttcggcctccctgggctcaggcgttagagccccaggctctggcacagagtagccacccaggaaatkcctgtgtgagtaggtgatggggtcagtacaaatggcatgtgggtcactagctggaaggagttggggcaggaaggagtggcccggtgggtacattggtgacagaacaaggccacgctgatccagggcctctcagagctcagcaggtcacagctacacaggcctgtgtcctgagaagtgtggctgccagagtggtgtagcggtcccagggctctccataggcccaggctgggggtgcccaagtcataggccgcccccttcagttccaagtaagaagactgtatcccacgaagcagcgacagtccctcctacatctgccatgaacaggctttgctcctagctctccacgaccccctcctgtgcaccccgagcagcctccacgggttggggcgcctcagagccctccctttctgatgcatcagagcagagtggggagcgaggcacagctgtccaggaagggccacggttgctcggcaggctcaggtcctccaggcagggctggctgctgccctcatcaccccccaagcaggcagtacaggccccagggcccaggtgccgtggttactgggaggaagaggccatctgggtggagatgaaggtctcgatgacgctgtggttggatggcagcaggtggctctggccattgctggagtctgagctctggtacagcaccaggctgctggaggacactgcagaggcaaacaaggctgctagccacccaccaggcacccacacccaccccacctgcctgtccctaggggtactcaggatggggaggcagggccacacctcctggatcacagcagataacaggaaccccaaagtcacacctctaccctcggttcttaacaaagggagcctcccagccagggtccacggccgcccatggagtggcctgagtacatcttagtgtgaacactggagaagccccggtgagatgccgaggtaggtagttgtacgtgttggcttggctaggctgagtcaaacactaatctaggcgctgctgtgaatgcaggtgctttgtagatgtggttaatgccacaatcagttggctttgagtgaaggagattaccctgaaaatatgggtgggcctcctacatcagtggaaggccgtaagagcaaaaaccggtttcccagagaaggaattctgcctcaaggctgcagaattcactccccggagctgccagcaacagatttcaggcctgccagccccccgcagacacgggccaagtccttcaaataaatctgttggttctgtgttcctggagaaccctgactgatggcaatggttaagagaatgggctttgaggtgggacctgggttcgagtcctggccctgccatctggtagctgtgggagatgaggcaagtccctcccctccttgagtgtccactttctcatctgtaaaatgggggtggtcatggacacgcctcatggggtgaatgccaggacacagaatggcctcagtggctgtcatgacagctgccagggccgggtccaggaaccttatagaaagggggcagcttgcaaaaaggcaggctgcaaagcccacccacctgactccaaagtgcccactcctgacaatggcatcatagattacaaactcaggtgaccgccccaccgccaggggtcattggagccgatgtgagtggatgcagtgaggcctggtgcactgttatatgggaatatgaatttttccaattttccaaaagatgccagaaatctggatttctatgtgaaaattcctgattttgaaatgttggcaacaaattcaaagaatgttcaaccctgagccaagccaaaccaaacacatgcaagagtcgcttctggctcacagacctggtccttatcgttactctccactgcctctaacaattacttcatcattttcctcagtccagtccctgagatgttcttgtaaggtgggccccatcttcctggggtcgcctgtgcctcttgggcttcatggaagcccaccccacccctccacgcctgccagtgcttcctcacagcagccctaggcctgctgcatgcacagccccacagtgacggacagcaacagaaggggtgggaccaacatggaagggggcagggacagtaagggagggggtggagccagggcctctcacctgtggggctggcgctgagccggtgggccggctgcaggtgctggatgccggcagggtcctggctggggacgtggagggtggtggcctgagatgccggcgtgtgaagcccggactcactggaggcctcagtgtctgaggtgaagacctgggggagcagagcagcctcctgagcccgggggatgtgggggtgaggggctctgtcacaggccgagggagggccagcaggcctggaccttacctgcttggtgggcgtgaggctggccagggcgctcaggttggtggtgtcggtgatgagcatagtctgcgggagcaggcccgtgtgggtgtactgggccacctcgggcttgtggctgtagagggctggccgcaggggagagaggggcagacgtggcagacgtgcctgacagccctagtcccaggcctcaagactggggaaaggggggcatggggcctgctgaacagccagactgggcagcagttggagatccagggctgattttcaaaactggaggctccagataaagggacagaccctctccccattacagggaactgctcagctgcgcttgatgcaggggagcctggaggaggccagaaaccaactccagctcctcttgtcacctggagacagcaggtatgaaagggaacgggaggtgcaggtgcagggctactgtactaagcacgggtgctacgtactaagcgcaggtgctactgtactaaatgcaggcgctatgtactaagcacaggtgctactatactaaacacaggtgctatgtactaagcacaggtgctactgtactaaactcaggtgctgtgtagtaagttcaggtggcccctgtcaaagagcaaggcagaggacagcagtacttccatctccaggccacctttccaaatataaccccatgttttgcctacagcacctccacccacccctcaggagacacatagaccctacaagagacacacagacactaggaaaacgcacataaaccacatattctcacagtgactcagataaaaatgtaacacacacacacgcatacactctcaaccaggtacacacagacatacacaggccccaaatctcttaacccagtcccaaattccaaaaaggtctgaaaccaaaagatttccttaagattggcactagagctcatttggtggcgaaacccagcctgaacctggtatgaggttatgagtgtttaaactgccttgtggaaatcctatctttggctgcagaaatagcagtgctttgatcacagggggctgtctcaaaccctgctgggagtgttatgtgatagctggcatatccaccaaattacttttctttttcttttttttttttttggcagagtactcactctgttgcccaggctggagtgcagtgcagtggcacaatctcagctcactgcaacctccgcctcccaggttcaagcgattctgcctcagcctcccaagtagctgggactacaggcacgtgcctccacgcctggctaatttttgtacttttagtagagacggggtttcaccgtgttggccaggctggtcttgaactcctgacctcaagtgatctgcccacctcggccttccaaagtgctgggattacaggcatgagccaccacgcctggccccagattacctttctaaaatctgaatagattttagaaattcatatggccctaagagtttcagagaaacacaggcatgcacacaaatgcatgcacaaccgatacacacccagacacgcactagggatctgctcacacaagcagtcgtgcacacacacagatacgtgcattcacatgggaacacactggcctgcagacaccctcaatcacggaaaaacacttgtcccagagacacatgcagactgcaatgcctgccaggcacccctttcccctgcatccattgacagccaacctctatcatcatctcctgctgtgtggggcacagggcgctcaccgtgggggctctgcagctgagccatggtggccatgaaggggctctgggtcacatggctctgcacaggtggcatgagcggctgctggtaggaggggtgcagcggctgggagaactggacgggctgcagggtggtcaggctgctgcccatgctgttgatgaccggcacactctgtgcctgcgtggaggccaggcctggagtggaaggggagggaatcagctgggccccccagttatatcccacccctgcccaagacctcccaagggcaccacctctccttcccagagcccgtggtttggaggagggggcagggtggtcaggaaacagccctccactgggacctgccactaatttaagtggctctggcaagtcattccccctctctgagcctttagctctttgtctaggctagtgggagaggcaggcggtgacttgttcaaaagttgtcaaactgcggttccctggagccctggggttccacagcagtgcaaaggccatggggtcagttctctgctcccctctcctagcagctccttatctatcttatgtactgggcttctgcataattgtacctgcaaataagggctttctgggcttaatttttcttcataaaacaaaaacttagaaaacatcagtcccccttaccctgctgtaatttgcccatagacccttcaccttctgaggtaccacagaattgatgtattatgcttagtgcctgcctccctgcttgagttgctgagattttggtctgtttggttcacccaggtatcactgatgtagcacagtgactggtccagagtaggcactggataaatacatgttgtatgaatgaatgaatgaatgaatgagtcccagtggctcttccagctcctggattctgcggttgccccatgagcctcccacccaggtgcccacccatccccaccagcttaccgatgaccagggtggaggcacctgtgttggtgaacgtaggacccagggaggcaggctcaccaggcccgatggtcatgaccccaggaagtgaggccatgatgaggttctggggctgctggttgaggcctggggatgtctgctccaagctgtgcagtgctgtcagggtgctgacaggggggagggggcccccagctgctgagacctacgaggggaagccaagctgtgtccggggggccggggtccccacagggcctccctagggactgctccagaatctccctgccaaggaaagatgaggttgggttttccttacaagcaaggacactcaccagcttggcttctgtactcagcaggctgtggctgggctccaggcccgtgggggacacttggtggaggggtgtagacactgtcactaagggaccgccgctgcttgagggtacttctgcagtctcactggtcgcaggctgtccatagcgcacacctggagagggaagcagtgtcctgcctcagcaccccacttccctgccctcccctgcctccacagccctcagcacttcaaactccattggtttgcttaggccagctgcctgtctgcctttatgcagccagcaaatctgcctttgtttctaccttttgccaagccctgggtcagctgctcccagttccttgaaggctgggactgcatttattagctccattccccccactgcctagtgctatacctgacatgcagtaggtgctcagtagaagacaactgaactgaatttaactgaatttagttgaattgaaatgaattgaattgatacaatctgaaatgaatgaattgaattgaattaacccaaatcaacttaggttgagttgagtggaatgatatgaagtggagtggatggtgtggagtagagtagatggaattgagtggaatgagtgggatcaagtggaatgggtacagtcgagtggagtggtaaagggtggagaggacgggtggggaggaa

SEQ ID NO: 97867 - DNA, 25163 bp, Homo sapiens
gcagccaccacacccagctaatttttatactttttgtaaagacaggattttgccatgttgcccaggctggtctcaaactcttggactcaagtgatccgcccacctcggcctcccaaagtgctgggatcagaggtgtgagccaccatacctggcctgaaaaatcattttcttccctatccctctaatccctaaaggataatacagaggacattctggtgtgtatctttcattttaaatgtatttacatatatatatgtgtatatatgtatttatatatatgtaatatatatgtaaatgtatttacatatatgtgtgtaaatgtatttacatatatatgtatttacatatatatatatatacacacacacacacacacagagtctttttaaacaagtgggaatataccatacatatcattctgtgccatttttacttaatatgtcttagagaggtagttcatatagatgggtcagtacatagagattttcctcactcaagggctgtacagtatcttatggttagattgtaattgattttaccaatcccctgtagatgaacattaagatactgctcattttttgccagtacaaactgctgcagtgaacatgcttatgcatatatctttgtgcgtatgtgcaggtgtttctttagggaattcctttaaggaattactggatcaaacaatatatgcatttaaaaatttgaaagtactgtcctccatgaggctatatgaatttttactcaccaatcttgtgctgtgactttggaatatgccagaaatctcttttggaaacaggtaggatataaataataaataatgctttttaaaaacagccctctggctaagcgcagtagctcacacctgtaatcccagcactttggaaggctgaggcaagtggatcacctgaggtcaggagttcgagatcagcctggccaacaaagtgaaacctcgtctctactaagaatataaaattagccaggcgtggtggtgggcacctgtaatcccagctacttgggaggctgaggctggagaatcacttgaacatgggaggcagaggttgcagtgagccaagatcatgccgttgcactccaccctggcaacagagcaagactccttcttaaaaacaaacaaacaaacaaacaaacaaacagccctcagccagatagtagagtgacttggtactaaggaaattactagctcttagtcccagaccacaagccatgcctgcaatcccagccatgatttgctaattcagtgcatgccatctggggaggcagcagaaagcaggactgaactttcagtcttggcagaaaaatgccagctgatgatgtcttgcttaccttggttacaccagctctgggccccacctgcctggcctgatttgaaggcagactgcctggctactctgggactgccctggaaaacagccactctcacacctcttacagggaggaaaacagccagcgggagagagtcagccctgagctggggggaaaggaaggctggccctctgcttttggtgtcaggattactatttaatgcagtagtcctctattttccttcttcccccaaataaagtgttagtatatgtaattttcaaaagacattttaaaagagcctttccccacacctcaaaaaatttgatgtggaaaggcagattggcggttacacccctaatttttcctacccctttaaaaaatgaaattatatatatttccttccctttccctttccttcatttccttctttcttttctcgtttccttcctttccccccgtcctttcttacagtctcactctcacccctcgaacttctggcctcaagcaatcctctggctttggcctcccaaagtgttggtattacacgcatgagccactgtgcccagccagtctattccttttaaccaaaattcataggtagtgcccagagagagtacaagctctgactcatatggcagtatttacttaaaaaaaaaaaaaaatgccaggcatggtggctcacgcctgtaatcccagcactttgggaggctgaggcaggcggatcgcctgaggtcagttcaaggccagcctgaccaacatggtgaaaccccatctctactaaaaatacaaaaattagctaggtatggtggtgggcacctgtaatcccagctacttgggaggctgaggcaggagaatcgcttgaacctgggaggcggaggttgcagtgagccaagattgtgccactgtactccagcctgggcgacagaatgagactctgtctcaaaaaaaagaataataaaaataaaaaataaagtaaaataaaaaaacaggccaggcacagtggctcacgcatgtaatcccaacactttgggaggctgaggcaggtggatcacaagttcagaagatcgagaccagcctgtccaacgtggtgaaaccccgtctctactaaaaatacaaaaattagctgggcatggtggcgcgtgcctgtgttctcagctacttgggaggcggaggcaggagaatcgcttgaacccaggaggcagaggttgcagtgagccgagattgtgccactgcactccagcctgggtgacagagcgagacccgtcagaaaaaaaaaaaaaaaaattaagtttgaggttgcttttaaattttaaaagatttgtaaggcaactttggcatagagtttgccttccagacacagatccaaaagtattttcttttcttttttttttttttgagacagagtcttgctctgttgccaggctggagtgcagtggcgcgatctcagctcactgcaacctccacctcccaggttcaagcgattctcctgcctcagcctcccaagtagctgggactaaaggagtgtgccaccatgcccggctaatttttgtagttttagtagagacggggtttcaccatattggtcaggctggtctcgaactcctgacgttgtgatctgcctgcctcggcttcccaaagtgctggaattatagccgtgagccactgcacctggccggtattttctttttaaaaaagtatacaagcagcccatgattatatgcttgagataaaatagtacagaagtagtagttctaaataatgtcaaaagtgaatatatttcctttagtctcttctgatactctcctccccagacgtaatcaaagttaatgttttaatgtatatccagacctcttcctttacagttacaaatgcatatttatatttatgtctatgtctatctgtgttttttttttttttttttttgagacagggtctcacgcccatggcccaggctaaagtgcagtggtgcgatctcagctcacacagcctcggcttcctgggctccggtgattctcccacctcagcctcctgagtagctgggactactggcatgcaccaccacgcccagctaattttcgtatttttagtagagacggggttttgccatgtttcccaggctggtctcgaactcctgggctcaagcaatttgctcaccttggcctcccaaagtgctgggattacaggcatgaaccaccacactcggcccacatctaaatatttatatactttttattttaaataaatgggattcgcggctggatgcagtgagctgtgattgtgccactgcactgcagcctgggtgacaagagtgagaccctgtcttaaataaataaatacacaaatatgactctgtgccttgctttttgccctacttaatatatgtttgagatctttccatactaatatatatgtctcattttttaaaacagctctatgtaacgtgaatggatacaaatgtaatttattgtaatttgtcaatattacaaatctctgtgcatgcaggtagggtaaattcctagatgtggaattgcaggtgaagaggttacatttgccatcatccctagaaagagaaaagccatggtccaggtaactagtcttggtgctatgagaacaaaccttccgtaaataagtatatgggaaatgaccacatgctaaaccaccctcttggccattcacaatcaagtagcatattaaaagttctggaaattcttcagtaaccactctgttgagtggtttaaaaagagttgtttgtaaaaggaaagactttaattctttgtacacatttattaaaatctccctgaacagttagttaaatgccaccatatactaatctctcaaagacagtacagcatttgggtaggaatttggccacacactatgccacccaattgggcagctggggtggggtcaggtttggactttgtccaggaaccaagagatgcctgtcttggtggctttggtgagagggactcagcaagcaaggcctggcaagaacgtcaagaggctctgggggacggttgcaattttactctagcctggctgagaggtgatgtcagacctagcagacacactgcatcaatcaggcccaggcctccaacacagaacagtgcagatctagaatccctagagaaggagcccctcagggtggaagacggtagaccacatccccctgttgacccacttctggctaattggtgaggtcatggctaacttccaaagctcagtgcagatattgcctctgaaaacttccgaagccctcaagcttttacagccaggtcagaataaaccactcctgtgtgttctcctagcacctttgctgcatctcttagtgcagtcagtgaatctagtttgtcttccagttcatactaacctaccttgtgaaaaggaagggtcacataatgaattgtgtactttacagtcttctctaacaaaagtgggagctcttccatagtgggatactgttcaggctctcattcaatcattactgagcacctaccacgtgtcaggcattagctgaactgctgggaattcaggggtgaggcagacccaatccctgccctcactcttacatctcctgtagcctagcccaatgtctagcccagggcctggcacagtagggcttacggatggcaatctcattggaaagtttgtcttgaaactgcctttgcaaaacaaacactgctttaacttaccttctatgctaaatatattaataaacattttctcaagatgcattgtccactaatagcttagtgttgaagaacaggccttgggtcagatggacctggattaaaatccctgttccctcctcttactgcttgagggactttggacatgttacctgacttctctgaacttgagcttcctgatctgtaaaatggagacagtaatacctcacagggttgttgtgaggtgaggagcctgccctatagcaagtgtcctgccatatagcaagtgcgcagtaaacactggccattcttcttcttggtgtgattactgggaattagttgccattgtgctgttgggactggtgacagaactcttggattgagaatgccgagatggtgcacggaagattctgtgtgctctttcagaccaggaggaggatgaggaggaggaaagtttatatgacgtaaattcatttgaccgtaagatatgtatttaaacatcgtggaggatcttgggggtctgatggggagtggggttgctgaagctccagccacccctaggccctccacctggcaggaccaaagttggggcagtagccgaagcaccgccccccgggccccgcaggagtgtgcagtcacccagttaggcctatcttggcctgcccatcactcctggcctgcggtctcctaaccctgtggcagcagcagcattccctgaatggatcgaaggctgccatggtgtcgtccgctgaattgctataggagtcagcccagggctgctcatgtgcacctcaggttgctgatggcagctctagttatttggggatggaagtttggggagagtgggccttggtccaccctgtgcgaaagggaattccacagccccccgggcgcccgcccccgcccccgccccgccccctccccgccccttccccgccgggccccgggccccgcccccgctctccatagttaccgcgctgtggaggcggcggccatcttggcggcggagcgatgagcgggtctaacccgaaggctgcggccgcggcgtcggcggctgggcccggggggctggtggctggcaaggaggagaagaagaaggcgggcggcggcgtcctgaaccgcctgaaggcgcggcggcaggcgccccaccacgcggccgacgacggcgtcggggcagcggtcacggagcaggagctgctggcgmtggacaccatccggcccgagcacgtcctgcgcctcagccgggtcaccgagagtgagtgccgcgcgggccgcgccctcccctcgcgccgtgccccggctcccggagccttcagcggacccggccacttgaccagcgcgggggtccccgccagaccccctcggccggccgggccgcgcttcccgmtgccccgccggccgggctttgctcccgccacgctcacgtagctctggtggggaaggactctcctgggctggaccgcattcctgtgagtccggccacgctaggatgcccttcggccggtcggytccccagctctgccggacctgtttgggtagagggccccgttcagctgaactggatcctcctgagccggccgggggccgaggtcccctaataaatgggcccctgggccctcagcctggaacccccggccatcagtgaagttcccgctcagccaggctcccccagcyctctggcaggccagaagccttacctgcttcctccgccctggccccatggcagccctcccccattgcagcctgcccggcctccctccctctttgggtcgggagcgttgccccttagtgtgcagakgggttcttcctcaaaamacatmgccgtggcatttcctgctcatttaaaactgtgccacattaaaacaaaaataaagtttcagtttgtgtacagactccgacatgtgaatcmtgcttttgacattctcgtgaattaagaatgatttcagagtttcagaaatgcgtttcctgcacaaaaggcaaccatcctaagctttttcgttgataggaggatgggtgggaagaaaaatgttgcccagtccctgccctgggtgatctccctttttctgttctctgccaagccagtccctgacttgacgtcttttctcttgctgctgttttccctgcaggagtgtgcactcacctagttaggcctatcttggcctgcccatcactcctggcgtgcagtctcctaaccctgtggcagcagcarcattccctggatggatcgaaggctgccatggtgtctgctgagctgctatagcaggcagcccagggctgttcaggtgcacctcaggttgccgattgcagctctagtaatttggggatggaartttggggggagtaggccttggtccaccctgtgcgaaagggaattcccatttcctaaaagagttttaatttgattctagatatttggatgcccccgtttcccaatactgtttgggttgagactgtccttaccagacctgarcgtatctttagacattcttgttagttttattgaaacagtgtgaaaaagcttcttttcttctgaaccagttttcatttggggctctgaaagtacagatgctcagcacctggtcttggtaacctcatgccctctcctgccatccaagtgagttagggtattctgtgcctggccctaagcaggattctcagtgggcactcagatcctatctgggggcttgggattgttgctcattgtccaaacccacctctgcagcttcttagagtctggcaacctctttgttactcttcttaacgtctcgttcattctatccagcagattatttgagtaccctctaagagtccaaagccaatgttagcctttttagcagttacagaataatcagtagttgtcaagtttgtcgtcttaataaagagacaacttgtaaaacacgaaaacaactaactcaggcaataaaagatcaagtatcaaaatgagctgtggagaagatgctatccggaatcatcctagaaagaaatcagtgaaatttgctgtgattagaattatttcaatttgcggctcatgttctagtcacttgggcctaatgtcttcaccggcagatttatcctcttgcctggatatgtatgatatgtattgtctactgtatgattttgtgtagcccacaaactaagattaggtttgtacatttttaaatggttgaaaaaaactttaaaatcttgagacacgtggttatgtaaaattcatatttcagtgtccataaatacagttttactggaatatagccacattcattcatttgcgtattgtctgtggatgcttttgtggctacaatgatagagttgagtagttgtgacagagaccatgtggcggcaaagcctaaattatttagaatctggctctacagaaaagtttgctgatctcggctttcttacactgacagttggcaaactaacgttggcaaactagcactgtattatctgctaagtcagtttaaatgtcttagattggaattctataaaaagttcgccctgttctgacatccaacttgatagatgatgaaagatttttatgtgtttccaaagaaatccaccttttctatcctagtttctaaaagttttgcaatttttcatccaaagcaagtccttgttattttttttctttgttggatcccctaattctgtccatacaacttctgctggtgataacacatgagaaagtttttgggagtattttaagtgtgttgtgtaagaaaaaatctgagtttgcttcaaaacttgagaattaaataaatggtagttttggaggattatttaacagtgttggtttctctctcttgttttcagattatttatgtaaacccgaagacaacatctacagtattgatttcacccgcttcaaaattcgagatttggagacagggacagtactttttgagattgccaaaccttgcgtttcaggtaggcctctacgttgtggtgaccactagacagttttgagccaaaggtctttgaaactcaaatctttgtgtgccactgcatcctgtttcttggactccagtgtgtcccacttctgtgacctcttcccgtggcctggtctgccaggcatggtggtttgaagctgcgttcagaggctgatgtttgttggatgtctattctgtgctggtcactgtgttccacgtctttgtgcacatcagtgtatgtaatcctcacacctctttgaggaattactgttatctctgttttacagcgaaggatctgaggcctacaattcccaggcggctctttcctaaggccctgtgctggttcatcttaccatgttgcctccagttgggaaaggaatccttgaaattaaactataatgaggaaaactcacctgagcctggtgccctcttggagggtgatagggaggatcctggtccagacatgaggcagtttgagccatcttcttgctctcttttacatattgccttggagttcccagacctagtttggattttaatctcaaccattttctggaagaacagacccaggaactcaactacttggggttccttaaattagcctcccatagccgcttcctgtgcttgtgataaagtgccaggctgatctggaccacagaagcctttggagcacctcactggaggtttagcgccccctggagttagtcatttgttagaacactggtacagatacccatagtatcagtgtggtttgtaaacttactttgcagtgtttctcatctgatttgctacttagagcctgcaaatttgataaggccccgattkcacccctacctggtggtatttatgctatcataatctcatactgaccaaggcacctaaaggctcaagttcatgggtaattttgttgttgttgttttgtgggktttttttttgtgttgtttgttttgagacacagtcttggtctgtcacccaggctggcgtgcagtggcacaatcttggctcactgcaacctctgcctcctgggttcaagagcttctcctgcctcagcctcccaagtagctgagattacaggtgcccaccaccatgcctagctaatttytgtatttttaatagagacgggatttcaccatgttggtcaggctggtgtcagacgcctgacctttgattcgcctgccttggtctcccaaagtgctgggattacaagcgtgagccaccgcgcctggttgcttatgggtagttttttattgggatggtcagatcaagaccagctagcttcctgggtctgtggtgttctcatctctaagccacatatcacagtacctgggacattgcaaggactccaggcctactacaggtatgtggatttggattagactcaagagttgtcatttcaatataagacggaactgtttcaagaaggtcagctgaagatactgtaaagtatcttggttttcagtctctctagtttttayatttaaggatcttgattcacttgtaatattccccacattgaggctgggtgcggtggatcacacctgtaattctagcacttcgggaggctgaggcaggcagatcacttgagccccaggagtttgagaccagcctgggcaacatggcaaaaccccatctgtacaaaaaatacaaaaaaattagccaggcgtggtggcacatgcctgtggtcccagctactcaggaggctgaggtggaaggatggcttgagcctgggagatcaaggctgcagtgagccgtgatcactgcattgcactccagcraaggtgacagagtgagaccctatctcaaaataaatcaataaatataaacaacagattatcctcacactgaatcactacctttctgcagcacttgttctgatgaatttgaatccccaagatttgctgtctctctgagtcacattgttggagccagggttttagagtctctgggggtgaacccctactcagcctggttgcccagtcgctcttgggcttgtcaaaagcagagatgtttgatgctgaaaaagtcttctcttatgttgtactcatgtacagcttagacctggagaaaatatcctcactggacactggagggtactaactcctattcacattagaatgcttgttctctgattctttttttttttttttttttttttttttgagacggagtttcactcttgttgcccaggctggagtgcaatggcacaatctcggctcactacaacctccgcctcccgggttcaagcaattctcctgcctcagccttccgagtagctgggattacaggcatgcgccaccacgctgggctaattttgtatttttagtagagacagggtttctccatgttggtcaggctggtcttgaactcctgacctcaggggatccgcctacctcggcctccaaaagtgctgggattacaggcatgagccaccgtgcccagccctctgattcattttacaaatctttcatctcctgggttcaggaatggactagaccggagaccagcattaaccttgtagaggccaccacatctgcttcaccctttcccaggtggtcaaagggttaggcctggtatggcctagaagtaaacatcagtcaaggaactatagtatcccaaggctgtaggtcaatgtcttctatttaaataacaaaattatttttagtggtttatctttgcagcctgtcagaaatttttatattcattgaaataactttctgataagtgtcaacttttgtagcctcattcttttaggttggtgctagcgcttcaacttggttaactgcagacctagtctgaatagaatagrccatgtcagaggcccagttcccagcttgtgtttcaggtttcacccttaggatatggcataagctctcaaactattaaaaaaggctaatagcttagtgttgaagaacaggccttgagtcagatggacctggattcaaatccctgttccctcctcttactgtttgagggactttggacatgttacctgacttctctgaacttgagcttcctgatctgtaaaayagagacagtaacacctcgaagggttgttgtaaggagtctggactatggcaagtgtcctgctatatagcaagtgcgcagtaaacactggccattcttcttgttggtgtggttactgggattggttgccattgtgctgttgggactggtgatagaactcttggattgagaatgtcgagatggtgcactgaagattctgtgtgctctttcagaccaggaggaggatgaggaggagggaggtggagacgtggacatcagcgcaggacgttttgtccgctatcagttcacaccggcatttctccgcctccggacagtcggggctacgtgagtaccattactacctgaggggagaacattctgtttgttcacagagaagagtgttttcggttgggttttgggttggctktagaggagggaggaggcaaagtcgggcttacagagatttattttccagggtggagttcacagtgggagacaaacctgtttcaaacttccggatgatcgaacggcactatttccgggaacacttgctgaaaaactttgactttgattttggcttctgcatccccagcagtaggaacacttgtgaacatatctatgagtttccccagctttcggaggatgtcagtatgtatcccctgacccttacagcactctagattctgagggctacaaggaacaaaccttgaaacccatctggtccagcgccctggcattgtctcgtggcagtgctgacatgatgcgtatctagtcatttgacctcaggcttctcatttcctattgctcctggctcctgttctaaactctgactcggcccgtatgggagcaatgaagggtttgtttgtttttgtttttgtttttttcccctgagacagagtcttgctctgtctgttgcccaggctggagtgcagcagcgcgatctcggctcactgtaacctctgcctcccaggttcaagcgattctcctgcctcagcctcctgagtagctgggattacaccacacttggctagtttttgtattttcagtagagacgggatttcaccatgttggtcaggctggtctcgaacacttgacctcatgatccactctcctcggcctcccacaatgctgggattacaggtgtgagccactgcccccggcccttttgtttttttcttttttttttgagacggagtcttgccctattgcccaggctggagtgcagtggcgcagtcttggctcagtgcatcctccgtctcctgggttcaagtgattctcctgcctcagcctctcgagtagctgggattataggcrcctgccaccatgcccggctaattttttgtattttttgtagagacagagtttcaccatgttggtcaggctggtctcgaactcctgaccctgtgatccacctgcctcatcctcccaaagtactggggattacaggcgtgagccactgtgctcagtctgaaggttttttttttttttctttttgagacggagtcttgatcttgtcacccaggctggagtgcagtggcgcaatctcggctcactgcaagctctgcctcctgggttcatgccattctgcctcagcctcctgagtagctgagactacaggtgcccaccaccatgcccggctaattttttgtatttttagtagagacggggtttcaccgtgttagccaggatagtcccaatctcctgacctcgtgatccgcctgcttcggcctcccaaagtgctggaattacaggcttgagccactgcgcccggccggtctgaaggttttaataatacaggccatccttttagatgcctcctgtgggaagacagtgcctaagggagwtaaaaggaggcctgtgaccatccctgggacgctgatcagataaagcacctctcctgtgcactgttagtcatggttttccattgtgttttagtcattggcccttcacttttttcttaatcagagctagatgtgaaactgcaggctaaatagaatcaaggccagaggacttcttttccattccctgcaggatagagagttgattggataaagtgttgagatagatccagcaggaaggaatggggctgttgyagattttggggcaggagtgagaaggtggaaatactgtttgaggaagagtggcctagacctggggagggcaccagagggagaaggctgctgccgtgtagcctcggcaagggaagatggggaccaaacgagagagaaagaacagcccttgtcagtttctgcaactttggcctagccacctcaggttcgcatcctttgtgaatagttarggaaaattcaagtcatttatgagggtgtgaatagaatcctgtgactagtgatgcctgtagttgccttgctggcatcactgattggtcctctcagaatcccaggtccttaagaattgtcatattctgaaaaccagataacctttaatcgtgtggcagtacagttcccaggtaaaatgaggattgctgagatgtggggcagggtgttgacgacagcatctggttctgacttgaacccctcttcccaagctggctagaatatgtagatacttgcaagaaaagatgatrtatagtgttataagttttacccatgaagccaaatcagcctggagggcaatattatgcatataaaccgagtagttttggcattggtgggttcaaagaactttaaaaaatcagtttcactttttgagaactgtggtgagcaacagcatttcctccaggggactccaaatggcatgtaatcattaactcaaaactgatcagaggtagtattatctttattctccagtatggttaaagactcaaaatggcatgtaatcattaactcaraactgatcagaggtagtgactgttaattatctttactctccagtatggttaaagaggtctgggcaattgcctgaacaaacaagactttactttagatcccaagacaggcagacctattgctgaatcrtttgcgagttaatacccagaaggtctccggagaaggctccctgccctgtgttccttgcactcattccaatctaggtttccttgggttgtcagggttgtgtgtggaggtgggcacagtgaggctcagatttctgaatttggagtggaatgtctagaggtgggccactgaccagaggccagggctggctttggtcagctgagagcactgagtaaataggttggtggggtccatgttgggaagaggggtgagcacatttccctggtatcttggctgaagaatccaggctggagatgacagaggaggccatggtggagagttgattgcatccttatgttgaaatggagatcatgttcagctggggggcctctgtggtctccccagctgtcaagggctgcctccctctgttctgacctcatcgttattctggcagagtatactstgaagcgctggcttattttggaggggatgcaaagttttctcccacctaccctgtggggcagactcaaacataattctttgcttttttcttccccctttgcctgacttgcagttcgtctaatgattgaaaatccttacgagacccgctctgacagcttctactttgttgacaacaagctgataatgcacaacaaggctgattatgcctataatggaggccagtaagtgctgcaagagtagrtaggggaggtgctttgccgcggccacaagatcctggcacacggagatgatcgaagctgcagtttgtcaacacacatctggaacctggccccaggaagccaaggctggggtggcagtttcctgcgcgccaaaggagctgccaaacagtgctgtrttttcttccccagtattttttcttccctttttttcctgccccgtaggttgcagaggtactatagtaaagtaaaaggttaggataagggtcctggaatccagataaaaaagtttattttccgtagttctggctgcctgttggttgtcttgacgaccaggcatagctgtgcctggtgagaaggctctggccaggcccaccagcaggtcagcagctcttaaggttcctgggtgctgtgggaagctgaaaggtaggcctcttccaggtagctcctcctctcacctccggcattgccatcagcgcagtctgccctcrgtctgtgtgaagtcttaaaccaactggaagacacttgaaagggtggggagggagggaggtgccaagagtggaggcaccaaggaatgggtgatgctgccaagctgaagggtctgctttgtggagaggctgctgctctgtctgacttccagggtctcagccagccctcctgggaatagaccaagttttcagcctggcagtgccttctgttcccattttggaggacagacaagcttgctccacatctcctggctcctcccttctgagtctcatgaaatagaatgagtcagctctgctcatggaacagtagtatctcttgaggccagagcaggtcttgtattttgtttttttatttccagacttctttcggggaggttttataaaatgacagtggtgttcccagcatatgtgatatgtggttagacttctgatagtatcagcttccaggggctaatctggcttatgttgggaggatatgcttacgaatcagcagcagctttctaaaggagagatttgacttttctctgcactgcacagcctggaggattggcttttgatggggatttgcctccgaagctctttgtacatttcttgtttaggagggttttcctatctacctttctactgaagtagtttctggaactttcctggtggatcagagttacgtaatgcagtctgagccttcagactgctagttagaattgttttaggtgttcagaaagggcaaaataggctgatgtggcctgtcagagtgatgtgttctcaaaaaagttcacttgcacatctgtgggctgcttttgtcctcagacccttagtggacagactccacaaaccctctgatgagacgattgatgtggccagggtccagttagcatcagtagaaggatgtcactaggaaaggcccaggtatctggtaagtgactgtgaggtgtcacagtacctgtgacaggagagtgtcctgatgtgcttgggagaaaggccgtatgggggccagggatggaagagacagtgtgtggccacagaaattcctgtccatccaccaccagtgctgctccctgtgtgggctytagggcgagtggccccgaaccttggcccagtgctttgtcccaggccagagtcttggcaatgccacatgctggcagctttctcactgagaaggtcctagcttacccctgtgtgctggccttggattcagccccgagagaggggagagaccattcctcctgtggagtgggttccttatcaccagaccggccactctcagaactggcgtccactgtaaatccaggtgccttacgtgtggctctgtcccttaygctgcaggggaaagctgcattgccattgttcccacctcctcactggcagaaagatgccagggctgttagcactgtctcctcaccttctgtttctcattgtggctcctcaaatgggatttgcatgttcctgtcaagcgtaacaacaatcccttctctctttgacagaggcccaggtgggacagtttctactatttgatatttgagtattatctgggatgtggttctggagctgcccagagctgtgcttagtagagtgtgtcttggaaacatgcccctgggcacactgtatctgctacattagtgggctatctcttatctgcagtgttcgcttttgctagaaagaggatgtggaggaaggaggaggtgggcaatctggcttgagttgtgctgtatcctcttccttgttagcttgccttagtctcactggagaccatttgcggatagtgcttggtccatgcccagyaggacagggctttgctgcttctgaaagtctggtgttctgtatctggggctgtgggttcctgtgtctagctgctcargaaatcttgagaagcattccactctggggtgtaaaccagtatgagtttgaaattcaagcgtttgtacctgagttggggagagaattgcaaggcatactttctctgaaagtaacagaaccattcaggctgccatgttattaaggaatctgaactgttgatagcagttaccttgtgggtgatacaatgggaggcggcaaaaaaactacctgcataggagaccctgccctttgtcaagagctgggagcacatttcatcagagtagcaggcccacctggtgccagagggcctgcccctcctgcttctgttcctttgccttgcagtctcctggagagagcctctcttttcctgtacagcctttgggccaaaatgcccttctagcttctccaaagaagatccgagtttatttcattctatgttttaagaggtaaaaggacataacaagtgaargaagttttgggctaaagtaggctatgtctccttatgtattactcaatactgttttgcagagaaaacatttttcaagcatgtgcttcctgaagacacctcagtctttgggccatttgatttccaatacatagggtggaagaatgtgattttggggctgaccataaactggaaatttgtgaaatggcagtgrttgggcaatcttcagtttattttttcagttgaagtggaactcatttctggaatggatttaataggctgtgtctaatgtacaaactgggtgagtcctgccttagtgtgtcctgccccaccggtacgcttccaggatactcttttcccctctgtaaagtcactttcttctgatggccagtgtcactatgatgtcagtgaggtctggggatgaggacagtgtgtcctgaaattcacaggactgackcctcaccccagtgcacgaggattcctgtggcatcaggtgctgctgtacctggtgtaggagcctaatcattgaaccattgtgttactcacattccatgtcacagaacatatcagcctcaagaaggatttggtggaggtggatttaccactggttttacaaaggaccgtgtaaagtcattgaagttgtgaaagtctattttttttcctgtaaatctattttttacagaatrtaagaaacatcaatgacctgatctgtccttcctcctccttcccgcttcccccaaaatcacattccagtttttattgtctttgtgtccaaagtaaactaggtgacttatttgtataaaatgttattttgccacatgagacagtaataaaagaaagattttcacagtacgtctccctcgtcctgtctcctgattgttgggcccgttgtgttgctgaggggagcaggggcgaatgggggctccaggtttctcttactttggctattatgtggcccttctgtaagtagttgaactagagtatagctggcttctagggtgattgaggaattgtactggactttaggcttaatatttttgctttatattttcccagggtgagtggctttgtaaattgaaagtttacatgcatgttttaaaggtagggtttttttttttgagatggagtttcgctcttttttcccaggctgggatgtgatggcatgatggtggctcactgcacccttcgcctcccgggttcaagtgattgtcctgcctcagcctcccaagtagctgggattacaagtgcatgccaccacgcccggctaattctgtatttttggtagagacagggtttccccatgttggccaggctggtcttgaactcctgacctcaggtgatcaacccgccttggcctcccaaagttctgggattacaggtgtgagccactgtggctggccataaaggtaggcttattaagaaatactttaactacagtaaaatttacctcaattaagagtattgatgcattttgacaaatgaatacttttattacccatcacaatcatgatataggacatttccatcgtacccactcagaaagttcctgagttccttgtgtttgcagccaggtgacttcccccacttcgcctcttgcaaccactatctgattctgtctctattggaaaacttggatacttttaaaatgaaatttgaacgttcatatttacagtcacaaattctcaagagtctggtttagatgctctgtggcacctgaagcaattattggcctttgctcacaaacacaactcacttatttctcccttttctcctgcttcttcatcgtttcttccacccagggctggttcccaggtgggatgactgaaaggtgaggaagcccttagagcatttgccaatgggagccattcatttgactttaaagtactgagaatttagaggcgttcttttaaatgcattatttaaaaagaaaggtaacacattaaggactttgctgcatcttttgattggctttcttctaggaagtagtgaccgaggtttccactttcctccaagaggaagagacagaagttttggcaaataggtcaatgctgggaacagatgcctgcctggctgagtgctgggaaagaaaggcagttggagggatgtgtgggtgcctgggagggcgtgggtggtgcccaggaggctatgggaatcagaatcacacttgcacaagagaagacccttatgggacaagtaaaatcagcatagtttcttgggcggggcaaaggtgtcctgatgaggatgctaggggtcaaatatgtgtctgggttctgccccaatcgggaatgagacacagtactgaagtggaacgggggtagcatctccacccaccttcacagcctctggggaaaagaaagctttccttgcagcccaactccaggggcctaaatattgagcaccaacacaagacaggtccttgagcttctcggagcgagtcggggaagcagataatttcagatgcaaagtgccttgaataaacagaacgaaagatagagagccagagggggagaaacggcttggtgtggtcagggcaggcatccatgagacctaaacgaagagggggcattccagacaaaaggaacagtgatcacagaggccccgagtcaggaaccagctaagggtcttagagaagagctgcctcgtaaagctaagcaacaataaccagggaacggtgggcatgggccctgatagacaaggcaggtcttggctttttaagccatagaattggattttaggagggatgggcccgccgacaaagccaacaaagttttaacccgaagatcgctatcttatttatgctttaaaaagacctctctggcctttctgcgaagctctatccttagctttctcttgttagcattttgattaacgaatgtgggcacgaacagccagctgaccgaccgcgcgcgcagtcgagcgtcggttcctcgccttgggagggaccactggaggccccgccccctggccgcgagcgcacctcggccccgctcccgaggccctacgggcgtggcctctgtcccgggtcccgccccccagcactccggaacagcgcgctcgcagcgggaggtcgcgaagcctgggactgtgtctgtcgcccatggccgccgcgctgctcgcccgggcctcgggccctgcccgcagaggtgagtgcgctggggatccgtacggcggggcttcagcccgcgtctggcccagcgggcggaggtcctggcggccggctctgtcagagccgctggcaggcggagccccactccgggagcgctcacggcctttgccccagttctgctgctccttgcgccgacccagcccggcccttcaggcgtccctggttcctgcacagacccctaccccccgattgaccccagccaccagcccagttcccagttcccatatctccctcccttcatttcacccccactagaggttcagggtgcgtccttcttccggagccaggcctgggattgaaccagacccgcatctgtgaccttgggcaagacagcccctcctcagcctcggttggcccatgtgtaaaatgtccacagagaaaatcagagttgttgggaggattaaatcatagggtatgtaaagcacttcgtgcctggcgtgtaacaggtgttccacaaatgctcgttcttgctggttaatacagtacctttcccatcttacgtgtctccagttgtagcagccgtgacacatatagccacggcttcctttgcctggcctgaattacaaggggaacgctactgagaactgtgttaagcgctagttagtctttctttcgcactccgaggagcggaatactattcgcctccacttgttatagaaacggaggctcactgacgtttaaaacccttgcctaaggtcacagagctgaggtcttattactgttggtattatactgaggactgaaggatgtagtgtatggaaatgtctagtgagtgtactaagcattcagttagtatggggttttcagtggccgccatggacattttgggctgacagttctttgttgtgggggctgtcctctgccttgttggatgttcagcagggatcccggacccctatccactgggtaccaatagtattcccctgctctagttgtgacaactagaactggctccagacattgccagatgtcccttggagggcaaaatcctccctggtgagttagtgggtcactaggattcttggagacctcctgcctcctccttccactcacttctgcccttgccggcagctctctgtcctagggcctggcggcagttacacaccatctaccagtctgtggaactgcccgagacacaccagatgttgctccagacatgccgggactttgccgagaaggagttgtttcccattgcagcccaggtggataaggaacatctcttcccagcggctcaggtgagagtgcaacctcagcagcccacgatagtggtctgccctctgctactggatgaatggtggcagtgacagtcagcggcactcggactctggtagaggaaccccaaagcagggcctggaacccagaaaatgctctggaagtttcccttgtccagcctgtggccagtagccaggacttaacttctgggacaacagtaatatgtggtggatggtcagttgcttactgtgccagccactgtgctcattctaaatagtgcctttagggtgtttggcatgcactaggcactgttcttgagatgggttatctcatctgttcctcacaacggtcctgtgaggtgaaggtactattcttatttatttttttgagacggagtttcactcttgtggctcaggctggagtgcaatggtgcgacctcgcctcactgcagcctctgcctcctgagttcaagtgattctcctgcctcagcctcccaagtagctgggattataggcgtgcactgctctgccccgctacttttgtatttttagtaaagacggcgtttcaccatgttggccaggctggtctcaaactcctgaattcaggtgatctgcccacctcggcctcccaaagtgctgggattacaggtgtgagacaccacgcccggccaaaggtagtattattatataccccatggactcagacttgtgaacaagttaaataacatacccaaggtcatggagctcatcagcggcagcctgctcgacctattttcttttttatttacttatttttttttgaaatggactctcgctctgttgcccaggctggagggcagtggcgcaatctcaacgcactgcacccctctgcctcctgggttcaagcaattctcctgcctcggcccccagtagctgggattacaggcgggcaccaccacgcccagctagtttttgtactttcagtagagatggggtttctccatgttgggcaggctggtctcaaactcctgaccttaggcgatctgcccgccttggcgtcccaaagtgctgggattacaggcgtgagccaccgtgcccggcctgcttgaactgttttctcccctgagtttcccatcagcgcgctccctcccgtgccactgtgttcttccatttgcattcagtctgtctgcagctacgcgttgaagatgttactgccgtacacgctgacctaaagatgtccagcacctggtgtaaacactcagtagtagatagttgtttaattaatgatttgtgaaaagtcaaacctctccggcctcttctccttgcctgtttttttttttaattttaattttaatttattttttatttttaaaaattttttgagacagtcttgctctgtcaccaggttggagtgcagtggcgcgatctcggctcactgcaacctccgccttctgagttcaaacaattgtttcctgcctcagcctcccgagtagctgggattacaggcgcacaccaccatacccggctaattttatgtattttagtagagacggggtttcaccgtgttgcccaggctggtctcaaactcctgagctcaggcaatccacccgcctcggcctcgcaaagtgctgggattacaggcgtgagccaccacacccggccttaaaaatgagttttaaaagggacgtaaaacattgtttttatatgagggacccactaaccgtttcccagatatgaaggcagcaggtgctgcaggcttgccttgtctgtcactgctgggaaaggggtcttacagtttcttacggtttctcttgggagtctggagaccaccaggctcagcctcatcagtgctgttgcctcttctcagggtgcaggtcagggttgctgggtcacagacactaggaaccaagagtgaccattgcagggggctctaggaggccaccccttgagatagctctgaaggtcaggcctctctgtagaaaatactaaaatattggggctgggacgggcgcctggctgctgttagttaattaccatcaatttacataggtcagaaacgatggacaaacccgaacccatttttttcccttgactgcttctctttttcttttttcttttttttttttttttgagatggagtctcactctgtcccccaggctggagtgcagtggtgcgatcttggctcactgcagcctctgtctcccaggttcaagtgattatcctgcctcagcctcccaggtagctggtactacaggtgcccgccaccatgcctggctaatttttgtatttttagtagagatggggtttcaccatgttggccaggctggtcttgaactcctgacctcaggtgacctggctgcctcagcctcccaaactgctgggattacaggtgtgagccactgcttaattatattttgggtttctcctttttgactgtctcgtctcttccctctcctgccacccctttttccttccctcggtgctggtctccctgt

SEQ ID NO: 97868 - DNA, 63040 bp, Homo sapiens
gctagagaaggagtcagcaaaccaccttccctaggccaaattcagcccaccacttgtatttgtaaataaagttttattaggacacacccatgcctactcatttatgtgctatttatggctgctttcaggctacaatagcagaccagagaccttctagccagcaagccctaaaatatctgatcctttccagaaaaaaactgccaatctctgacttagagaatactttgatctctgggttttgttccattttccaagtattagatattgctgttcaaattatttcagttgacagggagatttttattttaaaaaactgaaaatctttggttcaagtatatatcatagttcagagaaaaagttcaatggtttggtttaggattgattcaagcgtatatcatagttcagagagaaagttcaatggtttggtttaggactcagattaatatcgttcctctgctttgggggcttggttgttgtccttgaggagatttttacaaacatagaacaaagtgggcagataacatggaatgctttttgctctggaaaatgtcttttattccaggttgaacatatattgctccttctagcattaagattccaagattttctctatattccattggcttagctaatcccgttttcaccaaaggtccagatatcatttgttagaacctggcttttcccataaatagaagtatatcgtcttccaagctctttcacagatagctcttgcaagctaaatatttgaaaagaaatacactgccccccaaacactaacgtattttatgagtcagtcttttgaagctaaatggatcttacaagaactccgcagtgacttcagaattggaatccagccttccaactcttcctatagatgtttgatcatgtgacactttcatctcactcctttaaaccttttactatggaaattttcaaacatatacaaaaatagagactagtccccagtaaccaacttcaacaagtatcaacattctgccatttatctttccatctatccctctcctgaccttttatttactgtttgttgcagtatttgacagcggacttcacacatcaaatgatttcacccacgaatgcttgtttctgttagatgaggcccttttcctttgaacaaaaccatgacactattatcacacccaacaaaataattattaatattatctaatacccagtccaactcaattttccctgtctcaataatgtatttttatagttgatttgttcaactaaagatccaaatatgaccacatattgtcttatgttgataggtctcttaggtctctttacatttgcaataggctcccctcattttttattcaccagctctctttacatttgcaataggcgcccctcattttttactcacccatccctgacacacatttaaattctaattggccaagcaaaccttatcaacaataacacctcttcagcctccatatgctataagcaaaactagacattcataggcctgcagctgcttaggcatagacatacagctccaccttccatgtgtaattcaacatggaaaccaatatgtcaggccatcccacacactttccgctttcaagagaagaaatttagattgcttcagcaagccaattctctgaaatgaaatctcttctgtgctgcaatggcctgaagactctgaatgatttaaaaaacaagacatccattcattatggctcccttttgaaattagccaaacataatcaagaatcacaaagtaaatcagacaaaagcctcataattcgttatcattaacattaacaacattaattgagcacctagatcatgcgagacattggattatagaaaggatggcctgtgtccctaccccaagggacctacagtctaaataggcatcgcatcatttagacacaaatgccccaggaggacaacagtcacagtaccacccaaactgacatccatctcctatcccctaggttaagaatatttatgagattgatccatgtggtggaataaaaagaaaagagcagaccaggcgcggtggctcacacctgtaatcccagcactttgggaggccgaggcgggcagatcacgaggtcaggagatcgagaccatcctggccaacatggtgaaacgccgtctctactaaaaatacaaaaaattagtcaggcgtgttggcgggcgcctgtagtcccagctactcgggaggctgaggcaggagtatggcgtgaacccaggtggcggagcttgcagtgagccaagatcacgccactgcactccagcctgggcgacagagtgagattctgtctcaaaaaaagaagaaaagagcagaaggaaccgcatttgactgtgaattccaccattcatgagctgtgccacaatggataagttactcaacctgattctcagttttctcatctgttaagaggaataatcccacctacctcacagagtagcagctgttaacattgaatcataagctcttacataaaaatccagcaaagatgatgatgatgataaaatcactgaatactttacaaagcactagactagaatgttttctggctatccatctaaccctcacaccagtcctatgaagcagctcccattctcatgccattttccaaagaattgaacagaatggatgagtggtccacccaacgtaacacagctacaggtgtgagagagccaggatgtagaggataaaacttcagggttctttctgccaataatggtatgataatacctcccaatactaccatggggaggtgtaggggtagaagcagggcgacacgaaagagcatgccctcccgtacagatcaattatgttataaactcctaaggtacagcactccacagctcctacccttgcccaaacaggaagcccccaagaggctgccagggttgtcctacccaaggtgtggttaagttcagagccataacggtggtttccttcctcattggggcaagtcttcagctgtctgctgaagagtacttaagtctttataatcacaagtctcaaacacctaacatttgttcaaatatttgtccaaagtaagatcataattttttcctatataattccttacttccttttttgtacatacataggtgaaaaaggactgaaggaggggagccgtcagaaaagaggtgcaactaccctgtggccactatactgtgagaaggctgacctagccaagtggaaagggcacctcgcggagaactgaagtcctggccaacagccaggacctatgccacccacataagtgacatcatttcggacttccccaactgaaaccacattaagcagaagcaccacccagtctactcacagatttgtgggaaatcaaatgctgttggtttaagccattgagttttggggtggttagataactgaagcagctagaaaatagctttccagtcagaccaaataccacatctatgaatgacaagcaccatcatggcaactaaacattgtttatccgttgtatcaacggaaatgacacaactccttcaatctgagcatgcccatcggctgaaacattcagctgggtaaacctggatctatactgtaccaggctcaacagtgttaaataactactaataatgatcacatgaataacggtaacagcagccattatttaccaactgtttattacatactaggcattgtgctaaatcctttattcatttaatcccttataaaagccttttgaggtgggccactataatgcccattttactgatgaggtcgctgaggcacagagtggtacagcgacttgcctgggatcacactgacagtaaacagtgatacgggatttcactcttggccatctgattccacagacaccgggctcttaactatcagcttgctttaccccttcaaaagtgttatgctactttaacaaaactgccccttgttggtttgttttgttttgttttgtttttttgagacggagtcactctgtcgcccaggctggagtgcagtggcgttcactgcaacctctgcctcccaggttcaagcaattctcctgcctcagcctcccgggcagctaagattagagacgcgcgccaccaagcccggctaatttttgtatttttagtagagacagggtttcaccatgttggccaggctggactcaagtgatctgcccgtctctgcctcccaaagtgcggggattacaggcctgagccaccgcacccagccgaaactgcgccttctgagttaatgtgtgtaaagagtttaagactgggccgggcgtggtggctcacgccagtaatcccaacactttgggaggccgaggtgggcggatcacgaggtcaggagatcgagaccatcctggctaacagagtgaaaccccttctctactaaaaatacaaaaaattagccgggagtggtggcgggcgcctatagtcccagctacttgggaggctgaggcaggaaaatggcgtgaacccaggaggtggagcttgcagtgagccgagatcgtgccactgtactccagcctgggctacagagcaagactacgtctcaaaaaaaaaaaaaaaaaaaaaaaaagagtttaacgctgtctggtccatggtaagttttcagtaaacaccaactcttactattaggaaacctgaagatgtggaatgaaagatgagaggaagtactgtatatgactggcgtacagtacgcccccaattaatgttagctatttggatgatttatatagggcttcttcaccagcaagcactccggtgctcggtaattttctgtttacaagtaggctctccccacaccctgtgagctccctgcgtgtagagctgttttcaacacatccttgcaggttcggagcccaacacgtggcccccagagcaaatagctgctcagtaagtttcttgacaggagagaaaacgcttccttccttcaccagaaatgcgaacttggatttctaagatgacacctcccccagctaccagcccttaacatgattccaaaaaagagggcaagaagggacaagggtcccacccaagaaatgcgggggccaatgggctccatgggataagagatggagccgggcttgtggccaggacacttgagaagtccgtgcaactccgtggccggccacaccgagagggggacctcccaaaccccccagcagtcctaaaaagtccctaggaaaagggcaaggccctgagagggaagtcacccacctcccaggtggcggaccccccgcccgcccagggtcgactaggacttgggactaccccttccgcccatcccacggcagctgcaggcgcaggaagaaaagaagtgacagggagtccaaagtttccccaacaacaaaaatccttcccccgagggaagggaagggctcccaccctcagcccgccccgcccagggaggagggaccgccaccagtggatctaggcagttgggggtcccgctgttctggtcccgacaaggagtgcctggcttgaggttcccccgccccgcgcttcgtgcactctgaattctttgagagggtcccagggagggacaggggtgccccaactcttacttacagtcgtctaagtcatcctgcaagtccacaaagtacagggggatctctgaaaaccaagaaacacacaagaagttaccagggggctgcggcgagaggggacggggtcgggcaggggcccctcggcctcgcggggtggtcacggggcgagagagagaggggcacccctggcatcccccgagcccagccccactcacccgccatcttgggatgggcatggaggcgggaccggcaggggcggggccctgcagacaggggcggggccctgcagacaggggcggggccctgcagacaggggcggggccctgcagacaggggcggggccctgcagacaggggcggggccctgcagacaggggcggggccctgcagacaggggcggggccctgcagacaggggcggggccgtcggcttcgggccccgcccccgatccgcgccggccggccggccccgccctctcagcgaaggtggctgccgaggtgggcggggaggtcaggtgacgcggccggcgtcccaagatggcggcggcggcggctcccggaaggccgcggcggcgtcccggctgctaaggcgggccccacgcggctggcagcggacaggccggacctacggccggaggacgggcggcagccgcctctgcgcggaccggggctgggccgtgcggcggcagcggcgccaggggatgctcttgctgggcctggcctctcccttctcaacttagggcggcggcgggcccgcgcccctggctcccgggccatggcgctgagggagctcaaagtgtgtctgctcggggtgagtggcggcgggtccggccgggagggccacgggaggctgggctggcggggaccccggatcccccctgtcccctcatcccttcccccctcccacgtccaagacgctgtctgccagccccgtggaccctccctccagctcgggagccgtcccgcccacctcttgcactctcgaaaaggtcctggaggccgaagggacccttccccttcccctccctggagcccgtggactcttcccgccccacaaagagcaaacagcccccccttgcctctctattgcatctgggttaagagaggttcttaaatagttttctcccaacttaccaaggtattagttgggagttggccaagtcttccaaagtaaaaccaataacaggtctttaggttttacaagcagcattagcctactttgtctcttgggtgtttttgaacttgtgggatacccctgccacttgtccaaagagttactttgccaagtaactcttcctgtggagaaaaggggtgttcaaatcaggaagccccaaagactagtttgaagcttcagcttcctgtcttgtcaggaaagacaaggtgttggccatttcaaagccttctttctgaaattgatgctgtcattccagagtttctgccttaaagatcggcaggaactccaataactaatctttattcccccaaatagggtggggctaggattcatcagggattactcagaggtaactcaggagttcaaagtttactaacatatgttaaaaagcaagtggacttgttactttttacacgaagcagaaactttgggtctctcaraaggtcctaatctgtcttaacggcaaaaacctctcccttttagtacagttggaatttcctaattactctactgaatttttatgacaaccgcttttgtgttcctccgtttataaaatttacacrtctagggtgatttttctaaaatcctgaacttatgccacaaagtagtttttggtgtctgccaaaaggtraactttttctcagtccctcatctcgttctctttcaggatacaggtgtaggtaaatcgagtattgtgtggcggtttgtggaagacagttttgatccaaacatcaacccaacaatagggtaagagacttttatttgatacacatctaaaggtgcattgaaaatccttccaaatacatagtgtgttacaggtgtaggccctgcgctttgtagtcattgaattctgagtcgctggttcgcatcatctctggaaggacttgaaagagtccagtgaggatctgtgtattttaggaaaattatcttcggacttgttgggggtgagaacttcaaaatgcaaatatgaattggagttctactaattattagaacagacacagaagcttcggtctataaatatcaacagcaattacaccttgaaataaggcagatgaaaatagatcctggtgctattctttcaggcatatcaagtaaaagacatttaaatggtttttgtccttcctgaaagtagtaggttgagatctgaasccttacacattcctgtactggtagtaataataaattaataaattcatattgaaatggaaggttttttcagttctctggttctatggataagtaaagttgattgttcatatgtttttgacgctataagaaaacttttcattttgcaatactaatcctttgactacataagaagttgtgttttataggctttaatattatgttaaccttataaaactaaataggtgctgtgctctagttttaatcatcaaaccctcaaatggtttccagcatttaaagaaaaaatctatgttatccatcattaggataaaattggcctttgtgctccatgcagatcattctttgactaatagagaaatattttacagcccaggagagaaactgccataagattgtcccctgagaaattatgagctcctgctgtcagaggttatttatggatttttttgagacagagtttcgctctttttgcccaggctgcggtgcaatggcgcaatcttggctcactgcaacctctgcctcccgggttcaagcgattctcctgcctcagcctcctgagtagctggaattatgggcgcccaccaccatgcccagctaattttgtatttttagtagagacaaggtctcaccgtgtttgccatgctggtctcgaactcctgacctcaggtgatctgcccacctcaacctctcaaagtgctggggttacaggcatgagctgccacacctcgcctatgtgttcaatattttttgtctgctttttttttttttttttcacccaggctggagtgcagtggcacaatcatggctcactgcagcctcaatctcctgggctcaagtcatccttccacctcaggtagctgagatcacagatgcacactatcacacctggctaaattttgtattttttagtagagatagagttgcaccatgttactccrgctggttttcttttttttttttttttttttttttttttttttttgaggtggagtctcgctctgttgcccaggctggagtgcagtggcgcgatcttggctcactgcaagctccgcctcctggrttcacgccattctcctgcctcagcctccsgagtagctgggactacaggcacccaccaccatgcctggctaatttttttttgtatttttagtagagacggggtttcatgtattagccaggatggtctctctctcctgacctcgtgatccgcctgccttggcctcccaaagtgctgagattacaggcgtgagccaccacgcctggccgcctatctgcttttttaaaccctgtgggtctcctacacatttgaaggcatggggatgaaattcaccaataagtttctgcaattaaaatgcttttccgtgtcctttaagaaagagctgggtatgacacatgtaaaacatgaccccatccttctcagggcctgcctgtccctacctgcatgggaaagtgaagtgttgggaagtgacagcaagtactgctggtgattcagtgagtgatacacttcacactgagtcagagctgaaaacctaaaatccacaagacacccagacaccaccttggctagaagtgctctctcaaataagaagagagaaaagtgaagggtgtagcttcatgcatcttggtgaggcamgccccatcctgagtgtccactgttccctttttgccagtagctcccaatctgccagatgcctgtggctcctgagctgcctctagtccactctctgcaccaggagatttggctcacattttcacagggaaaatagcatacaaggctttctcctcattttctttcttctgcctttttttgtttctttttcctcagttttagaaggtggcttcctcctttgtgaccaaccccaaacatgcccctgagctctggagccccacctcttcatgagttaccctgtttcttcctcagccctatcatcttgtcatagcctgcacacaggttccgaatccaccccactccaccacaagagcacccattccccaacctactgctcagatggtggaactcctgaaagagaagttaccacttccgcaactgctgctcactcytcagccctccgtcatctcagctcctccctgccatgccactaaaaccaccttcccctggtaccagtttccatctaatagccaaagtcaaatggccttttcttggtagttttctttattcatagagtgcctgctatatgccaggtgctagactgggtgctggtgcctagaccaggggtgggcaaactgtggcctttttgcccgcctcctgcttttgtaaataaagagttactgaaacagtcacacccaattatttacttactgtcttgctgctttggggctacaatgaccaacttgaatagttgcaactaagccttgatgggccacaaacccaaaaatatttgctatctggtactttycagagcaagtttgctgaccccgatctagacaaaatggacttctgtcctcgtagaccttacctacaagaagctacattatgactagtgtacaggaaatgatttattctttttctttttttttttttgagactgagtctctctctattacccaggctggattgtaatgacacgatctcggctcactgcaacctctgcctcccatgttgaagcgattctcctgcctcagcctcccatatagttgggactataggcgcacatttgggaatctgcccgccacaatgccaagctaatttttgtattttgagtagagacagggtttcaccatgttggccaggctgttctcaaacacctgacctcaggtaatctgcctgccttggcctcccaaaatgctgggattacaggcatgagccactgcgaccagccagaaatgatttattcaacccttttctgtgctatgaaggagaaatatgcagtactatgaaaacatgtgacagggacctgacctgggcctgtggggataactgactcctacagtgatcagtaaaggtgtgaagcacctagcagcactgacatttaaatattgaaagatgaatggattaagtttaagaatcaaagttggctgtgcacggtggctcacacctgtaatcccagcactttcggaggccaagacgggtggatcacctgaggtcaggagtttgagaccagcctgggcaacatggtgaaaccccgtctctactaaaaatacaaaaattagccagatgtgatggcacacacctgtaatcgcagctacttgggaggctgagacaggagaattgcttaaacscgggaggcggagtttgcagtgagccgagatcgcaccactgcactccagcctgggtgacagagcaagactccatctcaaaaaaaaaagaaaagaaaaaaaagtttttgaagaatggaagtgamgtagttggtggtggtgagggacggtgggtagaaaagaaccagaatgggcatgagggacagcaaggaccgtgaggcgggagggcaagggaggttggaagaggggtcaggaggccggggtggctggaggacccacagcaagaaccaggagagacggcagggtggttggtgagccagcagggaccagtccacagggccctggagtccggaggrggagccgacatcacttactgcagaacacatccctgcttctcagttgaagctcctctgtcttctctagttcccttcctgcttcataaccgtgctttctcactgcagtctcctggcctctcatactgatttgataaaagctggtcttccccaagctgtgtcctgacttcccatgtttctcacctccctcsgacacctcaccttcacctgtataatgtgacctccaagcccatgcctccaacccatgatttgcacctagtctcctacagaactccgtctttgttcctcctccagtcctgcatacctcacacggtatctgtgttcttccctaagggctcgcctgtgtcgtatcatggggaagagcatgggccttgaagaaccatgctccctagacttagggccttgactgtgtgctagcagggagaatatctgcgcaagtgacagggtcactcttgtggaggttggggcggggggtcatagccctgcctaccttatagggagttttaggagaattccgtgactccatacacagagtgggcataggaagtgtgcagtaaatggtggtggtgtgtagtggtactgtcatcatatccctcttcaccccacccccagcccaatccccaaaccccattcatatccatttaagaaagggccctctgggactccttcccatcctcacatctgagccctcatcctatcttgcsggggctattgagctgatttcagaaccagttrttctgtggcctggctctgccacttggagtcagttctcctcattgttgctgtgtgagcttcattaaagacaagtttgatcccctcagtgaaaaccacggcagaggaacccttccctagcccgggcccagcctcatctctcctgtgcttcctccatgtttttgttgctcacttcctccccagcacacaccaagcagcacccgttccacacctgggtttttggcacatgctatwctctctcagggccctttcttttccttgtctccttggcaaattcctgattgtctgtgcaaactcaggtacatgttagtggctctaaaagttgcagactccagggtcagcaaaggccaggcaaagaatgtaaatgggagatggaccaggtagaaacactggagggaggctctcaggcatgaactgcccagaattcctgccctccctgcaccaggtcccctcgttcatcttctyacctccagggacactttgcttcggtctccttcggccttgtcatccctttgtmtgtccagatcccagggttctgaggtagactcctgcccatttgcattttgtctcctcttgcttgatgtcatgtractccagttgcaaccacagcagggattttcaaagctgaggctttttttcagacatgcatgtctctggtccctcttccaggattccaggaacccccttcctctacactacacatacgctgtaagaagaggaggcccccattaaaatcaccaccgtagtgagccattgtgtagtgagcctattgtgttcctcaagtgtgctagagtagaagattggctccctgcacgtgggtgagtcctactgcagcagcaccaaattccctcttaagctctagacctgcagattctgctcaccatagagcctgtgcccacaggtggcccatagacacctagggactgtccatgtatgtcactgagctcgtgaactctctctcagaggcttggatctctcctcctctttccatggaccttggggtagaggaaaggaccaactgtcctcagrtactcaagccagcaacctcagcatccttctcaaatccctcctaactcaccatctcctcccctcagccagtggtaagtcactcgctcctgtccaagccacctcccaaatatccctccttctctattgctgttatatgacttctagggcttcatcttccttcatggagrtgagacatggactctagactttgattagatcacagctctgccacttgctagctagttaaccctgggcagtttattttatgtatttattttttgagatggagttttgctcttgtcgcccaggctggagtgcagtggcgcaatctcggctcactgcaacctccgcctcccaggttcaagtgattctcctgtttcgacctcccgagtagctgggattacaggcacccaccaccacgtccagctaatttttgtattattagttgagatggggtttcaccatgttagccaggctggtctcaaactccttaccttaggtgatccacccaccttggcctcccaaagtgctgggattgcaggcatgagccgccgtgcctggccaaccctgggcagtttagtctctgatctgtttcttcataagcaagtaaggataatgataggaccagctccatattgttaggagaattccaagagaggtgtatttaaaatgcttaggaaagtaccatggatactagaactcaataaatggtagttattattcttttttttttttttttttttgagacagagtctcgctctgtcgcccaggctggagtgcagtggcgcgatctcggctcactgcaagctccgcctcccgggttcatgccattctcctgcctcagcctcccgagtagctgggactacaggcacccgccaccacgcccagctaattttttgtatttttagtagagacggggtttcaccatggtcttgatctcctgacctcgtgatccgcctgccttggcctcccaaagtgctgggattacaggcgtgaaccaccacgcctggcctattattcttttttaattttttatttctattttttagagacagggtcttgttctgtcacccaggctgagggacactttgagctcagtgcagcatcaaactcctaagctcaagcgatcttcttggctcagcctcctgagtagctaggacaacaatagcacgagcagtacgcatcaccatgccttgctaattctttttatttcttgtagagatgaggtctcactgcattgcccaggctggtctcgaactcttcacctcaagtgatcctcctgccttggcctcccaaagtgctaggattaggcatgagccacagcattttgcctattcttttgtaaatgtttaaatctttttaaaattttaaaattatttgtatcaaagcaatgtgtatatggtttttaaaacctgaaatagtgttacgaggctaagtgttgtataacagtgccctactctgagccattccctggaggcttactgttgccttcacatttagctattctttctaattttttctccaaattttttcgtaacatgcatgcacaggttgagtatcccaaatacaaaatgctccaaaatctaaaactttttgagcaacagtatgacactcacaggaaatgcccattggagtattttggatttttggatttgaaatgctgaactgatataatgcaaatattccaaattctgaaaaattcctaaatcagaaacccttctttttttttttccaaaatcggaaacacttctggtcagcatttcagataaggggtactcagcatgtactggtagttgttgatycctctctcctccccgcctcctgtttaaggcagtatctactgattctttttctttggaagatgggaattttgccatcctcctcctcccacctccttgtgcacatttgccctccctccatctttccattaaagttctctcattgggagtcaatgtgccatagtgttcagagccaggctgtctgccttcacctcccagctctagcacttagttgctctgtggcattggacaagttatttaacttttttgtgcctacatttgcacatttgggaatcctccttggcatctaatctgtagggttgttgtgaaattgaattcaaacacataaaaattgcttagaatggtgtatgtcgtatggaaagcatttgttatttcttagcaaatgacaaaattaaattttaaaaggttattttttaatctcccactatggttttgaactttatataaatggaattagtatacacacacacatacatgtcatttgtttctaggatgattagactgacatatggaaaaaaaaaagattcttgacccttacctcacaaagtaaacgagtagaaacagatcacagaccaaaatttaataaggctataaaagttctagaacaacattggacatataggacacaccaaaaaacaaagcataaaaagaagctggagttgatcaaaattaaacatttttgttgaattcagcatttgttgaattaaatcaccttggcacctatgagtttatatatgtgtatgggtgtatttctggatttccttttctgtcccattggtctattcatctgtcctcaagccagtacaatattgtgttcattgctgtagatgtatagaaagtcttggaatcagatagtgtatgtcatctaattctattcttgtttttcatgtctggctcctctgggtcttttgcatttctatataaattttagaatcacagtgcccagttcctcaaaagagccaggtgagatcttgattgggaacacattgaatctcttgaccaatttgggaagaattgtcatcttaacactattccatttttgatccaggaacatgatatattcaccgttaatgtaggtcttttaccattcattcagtcttttaccattcaatttgatggctgtctctaggtcttttataaatgccattatcaggttgaagatgttcccttctattcctgaattaatgagattttttgtcatgaattgtgttgaattttattagatggtattttacatattttgagctgttcatattctttttctttctgttaaaatggtgcattacaaccattgagagtttaatactgaaatattaaaccaatctggcactcctaarataaatttctcttggtcattatgcattattattttttatatattgctggatttgatttactaaaattttttcaaggatttttctctccatgtagttttctgtaatagtctttctctagttctggtgtcaggacctcatcaaatgagttgaggaatgtcttctcttctacttttttggaagagtttgtgtagaattggtattacgtcttccttaaagttttggtagaattcacagatgaaaccatctgagcagggagttttctttgtctgaaaatatgtaactgcagattcaattcctttagtaaatactgtaaaggcttattcaggcaactatttcttcttgagtaagttggtagttgtgtccttcaaggaatttgttcatcgtatctctgttttttttaatttattggcataaagttgtttataatatccacttcttatccttttaatgttttgggatctgtagcaataccccccttccatttttgatagtgctgatttgagccttctcacttctttttctgaactgtccagctataagtttatcaattttattcgtcttctcaaagaaccagtttttgttatctgagcatttagaactgtaaatttccctttaagtgatggtttaggtgaatttcatggattttgatatgttgtgttttcattttcatttagttgcccctgtcatttctcttgtgacttctttgagcattggtgtcttagaaatatattttctaattcccaattctttgggtattttccagaaatttttcaagtatcgatttctagcttaaatctattgcgggtacaggtgcggtggttcgcacctataatcctagcactttgggaggccaaagcgggtggatcacttgaagtcaggagttcaagaccagcctggccaacatggtgaaaccctgtctctgctaaaaaatacaaaaattggctgggctcagtggctcacgcctgtaatcccagcactttgggaggccgaggcgggtagatcatggggtcaacagatcgagaccatcctggccaacatggtraaaccccgtgtctactaaaaatacaaaaattagctgggcgtggtggcacacgcctgtaatcccagctattcaggaggccgaggcaagagaatcgcttgaaccctggaggcggaggttgcagtgagcccgagactgcgccactgccctccagcctggtgacagagcaagactccatctcaaaaaaaaaaaaaaaaatacaaaaattagctgggcatggtggtaggcacctgtaatctcagctactggggaggctgaggcaggagaattgcttgaacccaggaggtagaggttgtagtgagccgagatggcaccactgcactcctgcctgaatgacagagtgagaactccgtgtcaaaaaaaaaaagtctattgtggtcagagaacatactcagtattatttcaaaccttttatatctgacatttgtttcctagcctaagatgtggtctgtctttgtgaatgttccatgtgcactagtaaagaatgtgcattccgctactgatgtgtggagtattctgtaaacgttaattagctcatttaatagcactgctcctatctccagtgtttttactaacttttttctcttattttgcagtaaaagagtatttgaagcagctctaattaaagatttgtctatttctgtttttaatcaggttttgcttcatgtttcgaagctttcgttattgagtgtatatgcatgtagcattgtttttatatatttttatataacatacatgtcatatgtattatatatattatatgtatgaattatatatctcttaaatgtatctgtgttatatatacataaacagaaacaaggtcttgctccatctgtcaggctagagtgcagtggtgcagtcacagctcactgcagcctcaacttcccagactcaagtgatcctcctacctcagcctcctgaataataggaccacaggtgtactcaccacatctggctaatttttttcattttttgtagagctggggtcactttgctgcccaggctggtctcaaacccctgggctcaagccatcctcctgctgtggcttcacaaagggctgggatgacaggcatgagccacctcaccgggcgtcattgttagattttcttgatgacccttttacaaacgtcatgaaatgtctctcttttgtccctggtaagagtgccgttctgaattctacttggtctgatattaatttaagctctttggcattctatttgattatctcttcccatgcatttacatttaacctatttatagctgtatttttcaagtgcctttcttgtagatagaattataggctctgcttttatatctaatctgacagtctctgccttttaattatttagacctccacggtctagtacagttgctactagccacatgttaaaattaaaaattcaaatcttcagtcatattagctacatttcaatcctcataacaaatttctgttgtatagcactgatttacatcatttttatttattatgactgtcaatattatttggtttaaaactaccatcttgctttatttttctcttggccccatgttaatgattccattgtatttccactattatcttgtttacctctttgtttttattattttaatgatttgctagaatttataatatccttctttgatatatcagtctgtgttcaaataataacagtttcacatataagaacctcgcaagagcgtccttctgtttcccttctcccaggctttgtgctgctgtggtcatattttacttctacatgttatgaaatcacaacacacttattttttttgcattaaatgacctttcaaagagaccattagtcttttttttctatccttgtgccattgtcacgatttctaattttttttcatactaagtcttactgtccagtggtgtgaattttctgtgttgttcttcagcaatgtcttggctgttcttgacctgtttcaatataaacattaaaatcatcttgtcctttttcactcacaccaacacgctaatccctactgtgtttttgattggccttgtgttgaatatataaattgatctggagagaaatggtatctttataatactgaatcttctaatatatgaacatagattactctttcatatatattaggattcttgagtttctctcagtgttttttttctacttctctgtgttatggacttggacatctttccaaggggtttgatatgtttagtgcagttttatgctgttaatatggtaaatggcattgttttgaaattttcattttctttttatttgttgattatatacagaaatacgacttttaaaaattgaagttatatccagtaaccttgctgaatttattcactaatttatagagcttatctctatacattatttttttgtgttctctgtatacttttatatcacctgggaattagtttttttaatctttattctaattcttaaacattttacttattctatgagatcaggtaggawctctagttcaatgttcaatagaaatggtaatactaggtattatcctaatcttagggggtagcttctaccatcataccattatgtttgctataggttttttgtacatattcctatcacattacaaacgtgcccttttttttttctttttttttctttttttttttcttttaagagacatggtgtcactatgttgttcgggatagatttgaacacctgggctcaagtgatcctcctgcctcaacctccagagtagctgggagtactgtakattgacaccaccatgcccagcagaagcacctttattttgtttgctgggatctttgattttttttttaacataatgttgactttatcaaaatatttttctacatgtatttggctaatcacataattatactcttttatgttaatgtggtaaattatatcattaaattttcatggaataaatacacttaggtcaggacatgttatttttattaaatacatatcactggctttaattagttattattttttagaatttttatgtatgtttataaatggagactatcatataaatacttttttataatgtgcatgtcagatttggcatcagtgctgtgcttgcctgataaaactggttgagaaacttctgtggaagagactgtataaaattgctcttattccttccttaagtgatgagtaaaattcatcagtgttgccatctgggcttcaagttcttcttgtatgatagtctgattagagagtcagtttctttcacagttgtaaggttgttgatactcagattttctatttctcttgtattggttttaatacattggggtttttttttttaaggattttgactctttcatatacgttttccaatttattgacataaagatgttaagattctatacggagaccccgttttcatttctgatattagttttgcctttgatcaactctatgatatgtctcttccctgtttcactaatttctactcccatctttattatttttgtccttattcaatatgctgttccttttctaacttcttgagatagacagttgtcactgattttcagtcctcctcggttgtattccttgtatcttaaaactttaggccaggcacagtggctcacgcctgtaatcccagcactttgggaggccgaggcgggcagatcatgaggtcaagagatcaagaccatcctggccaacattgtgaaaccccgtgtctactaaaaatacaaaaattagctgggcatgggggcacatgcctgtagtcccagctactcaggaggctgaggcaggagaatcgcttgaaccggggagtcggaggttgcagtgagccgagatcgcaccactgctctccagcctggtgacagagcgagactccgtctcaaaaaaaaaaaaaaaaaaaaaaactgtacgccaggcccggtggctcacacctgtaatcccagcactttgggaggccaaggcgggcagatcacgaggtcaggagatcaagaccatcctggccaacatggtgaaaccccgtctctactaaaaatacaaaaattagctgggtgtggtggtgcgtgcgcctgtagtcccagctactcaggaggctgaggcaggagaatcgcttaaacctgggagtcggaggttgcagtgagccgagattacaccactgcactccagcctggtgacagagcgagactccatctcaaaaaaaaaaaaaaaactttaggctaggcgcagtggctcacacctgtaatcccagcactttggaaggcccaggtgggcggatcacaaggtcaggagatcaaggccatcctggccaacatggtgaaaccccgtctctaccaaaaatacaaaaattagctgggtgtggtggtacatgcctgtaatcccagctactggggaggctgaggcaggagaatcacttgaatctgggaggcggaggttgcagtgagccaagatggcgccactgcactgcagcctgggtgagagagtgagactccgtctcaaaaaaaaaacaaaaaacttgactgtggcttttgctggatccaacaagttttttttatagatcatttcatcatcattcagttcagaatattttccagtttctattttgattttatctttgatctaaatgccttttctatgtatgtctctcggtttccaaacagggatatcttctagttaactttttgttaatgattattgacataattgttttgaggtgagagaacatattttgtatgatataaatccttggaagtctggtactgtttgctatgtggatcagcgtatagtccatcctggtaaatgttccatgtttatttgaaaaggttgtattctctacagctgttagtgctgtgttctctgaatggaattaggtcgagtttactaatcatgttcattttttctgttgtctttgctgggtttttggcctacctgcctttataagttactaagaggaatgagttaaatctgtcactatggttgtaaatttatttctccttttcattctatcacttttgctttattttgcacctacattccatacatacagatttagaatttaatatcttactgataaagcaaaccttgtaacattgtgaaatatattctttagttctaggaatgtgttttgccttgtcagcgtttgcatggtggatctttttcctgttttgtttttttttaactttctgtatgtttatatttaaggtaggtctcttgtaagcagcttatgatttgattttgataacgtagattccatataagtaccatccaccttaatcaaaatgcagaaatttgcatcacctcagaaagttccctctgtgaatcatactctccataagcaccaccattgcttatggggagttgattttaatcaatatagataaatttccctattcttgaattttacataaatgcaataacacagtatataatctttggtgtcttgatttctttttcatgaaataatgttttgcggatttaaccttgttgcatgtcccagagttttttgtttgtttgttttgttttgttttttattaaactgaggagtgatattctcttatatggatagaccataatttgtctattcctccccctagttgaggacatccaagttccagtttttgactattatgaatatacatgctatgaacattcttttaaggtttttttgtggacataggttttcatttcctttgggaactagagtagaattgatagttggtagggtagatgcttctataacttaatatggagtcttgtagactccttagtattatttacatacacaatcatgttgtatgaaaataaaggctgacttcttcctttccttctagttttttccatgccttgttgcacaggctaggacctctgttaccatactgaataagtgrtgagagccaacatccttaccttttcccaatgttagggggaaaacattcagtattgtaccagtaagtttgatgttagttataggttgccaatttttaggatgaggaagttttcttgtgtttctggtttgctgagagtttttatcaagaatgggtcttgtggccgggcacagtcgcttatacctgtaatcctaacactctggaaggccaatgtgggaggaacgcttgagaccagtgtgggcaatatagtgagaccctgtctccaaaaaaacaaaaaaattgaataggtcttgaattttgtcttgatattttttgcatctatttagattattttgtttttctcttatgttaatatggtgggttacagtattaaatattgctaagtaacaaatcgtcccagtatttacctgcctgaaacaacaaacatttgttatctcacattttctgtgtatcaggaatccaagtggcctagctcatatggttctgtcccactctgatgrtgttgcaatcaagatgtcaggcagggctgcagttatctgaaggatcctcttccagcaaggctcactcacatggctgttggctggaggcctcagttccacagttctttgccctttgagcctctccatagggctgcttgagtgtcctcayaacaaagtagctaactttccacagagcaaatgattcaagagaaagagcaaggaagaatttgcagtgcctttcgtgacctacttttgggagtcatctaccatggcttctgttcagaagggagttactaaaccaatcccaaactcaagggagtagggaataacctccatgcttgaaagtaagagtatccaaaaraaagagtgaattacattaattgaatttcaaaagtttaacttattttatagcattatctgtatctaatcatgagtaaacatcagacaaactcacattgataaacgtttgacaaaacaactggcttacaatctccaaaagtctcaaggtctaaaaagtcaaagagagactgagaaactgatccagatagaaggaaactataaagagtcataacaattaaacgcaacatgtgcttttgaactagatgttttgccaaagggatattatcaggacaattggcagaacgcaaatgggttctgaggaatagatggtagtaatatgtcaatgttaagttcacagttttgattatcttactctgctttacataagaaaataatcttgattgtaattaatctacactaacattcaaaggcaataggcaactcactatcaaatgggtaaatcctatacctgcaacttttctcaactatttgcgaaaaaaatgttatatatattttttgagacaaggtctcactttgttgcccaggctggagtgcagtggtgtgatcacagctcactgcagtcacaaccccccaggctcaagcgatcctcccayctcagcctcccaagtagctaagactacaggtgcacaccaacacacatggctaaattttttttattttttgtagagacagggtctggctatgttgcccaggctggtctcaaactcctggactcaagcaatcctcctgtcttggcctctcagattgaattacaggtgtgaaccagtgtccagctacattctttatattgtacttgcaacttttctgaagttggagattatttcaaatttttaaaatgatggctattttactgtatttcccgccgccccccacaatgtcatttaaagacaactggctatttgaggtttaaaaaaagatgataacattgtgttgtggatgccctcttcacaggatctaggatttcccaaaccagccctagctctcttttcctccctacttaggtagtccttactttagtcaggctttgatacactgctctgggcaccatggctcccttccaccttccatactcaagaatacctacctgcttggcctacctactagcaactcttgggctaaataattgttcaaaaaaaagamcaggaagaaaggaggaagagcaaaagtagttttattttacacacatattagcattaccattgctcttcattccttcctgtagaattgagttttcatctgatgacatttaccgatggtctaaagaatttctttgagcatttcatgtattcagggctggtgacaagatcgcctcggtatttgtttacctagggtaatgtctgcattgcatattcccttttttttttttttttgaggcagagcctcattctgtcacccaggctggagtgcagtggcgctatctcggctcactgcaagctccccgtcctgggttcacactgttctcctgcctcagcctcctgagtagctgggattacaggcgcctgccaccatgcccagctaattttttgtattttcagtagagacggggtttcaccatgttagccaggatggtctcgatctcctgacctcgtgatctgcctgcctcagcatcccaaagtgctgggattacaggcatgagccacggcacctggctgcatactcacttttgaggtatgtttttgctagatgtagatttcagwtgttttttctttcagcactttactgtgtcattctgttttatcctggccttcgttgtttttgttgagtggcgtcatcctccttcatattgttaccctatatgtaatgccttttcattctctggctgctcttaagacctattctttatcttttgttttcagtaatttactttaatatgctaaatgtgtaatatactctgggttcactgcgtttcttagatctgaaatttgattagttttacaaaatttgggacatttgcatccaaattgttttaagtatctgttttgcaccattctcttggtcctcttatgggattccaattgtatgtatgttaaactgctagatattataccacaggccatggaggctctgagtttgtgtccttttccctacccccatctttttctctctattcttaacaatcacataatttctcttgatctgtctttatcttagttgattcctctacagtgtctccaaatctgttggccctctttagtcatgggtttcacatccaggggttccaccaaccacagattgaaagtatctgggggggaagagtctgtatatgtactaaacatgtactaaacatatatacagacttttttttcttgtcattattccctaaatgataaagcaactatttacttagcttttacagtgtattaggtattgtaagtaatctagagatgacttaaagtatatgagaggatacatgtaggttatatgcaaatgctatatcattttatacaacagttgtgagtatttgcaaatttttattcgtggggggtcctgaaaccagtcccctgcggatactgaaggatgactattctgttcagtgtgtctaatatttttcccccagtatttagatactgtccttaattctagaattttcatttggttcttttatatattttacatgcatagttcccccatctgctcactcaatatgactttctttaagtctagattatatttatagtagctgtttttaacatctgtatctgctcattccagcgtctggatcatctcaggatctgttacatctacttttttttttctcttgaccttgggtcacattttcttggattatctagtagttttttatattgtactggacactgcagaagatacgctgcaaagattttagattttcgtatcttccactgaagagtgctgttttgttttaacagaatgttaaattatgggctaatcatcttgaacttgtggaagcttcatcttaacactttgttcagacggttgtgttgggatgtcgccttatgacaaatccttattcttgggacactatctttgcttctgagatatggcctacctcattatcattgaaggtgtccagtgagcctctggattggcaggatttaaactcccaacttttctcccctacagttggaaacaactgaaatctctgctcagctctttttttggccttccagctgttgctgtccattggactccttggcatctccccagttgcatgtgcaattataggaatcagctgtggctctgagaggagtctgtgtatggatttgcagctccttcttttctagaacatcccctctctatttccagccacactggcagccctgaacctcatcctctgtcacttctagccaacgctggtggtttgtcctcaccttgattttttatcactttcttcctctcttactgcatttcagccacatggcccttcttttcaaacatttgaaaagaaatacagagacccaactcaaggtctctgtatttactgtttcctctttttgaaatgttctcccccctctaaatattggaatggttggatcttcttcccttttaggattcctccaagtttttgctatcatcctatctcaaattgccactccagtcactatcaccacacagtgttttttttaatcttcgtagtaaatattaaaatctataatcatctatttgtttatttattgtcagttcctgccacttgattataagctgtatgagaagaggaaccgtatctgaaatgaccacagacagctgtatcctcagcccacaatagacgctcagtaaaaaattattattgaagattttcataattatatacatttattgtctatttaaccaatctcttattgaccrttctcttatcagcttttacccccattattccattgaaacaccattgttgtagagtttgactaaatataaaccacaaatataattcgctttttattgtatttgccctctagaagtatttggcattatcttgacttttttttttaatcctttggtttcctgggatacggttctggttctcctttctacctcttggggcttcctccttcttgtgtttcttggcttcaatgtccacccctaaaatgtcacaacagaatttcttgcatagtctgtgtctcttcctaggtgatttcattcacactcagcactttgatggccacctttctctagtgactccaggtgacgggtatttaaacagagacacctgggactccacatatctaccactgaactcctctttctcctcggtcatccccaagtaccttgttctgccttgccataagggagcatttaacaagtccttcgtacaaccactgtaaacaacaacttagcaaaaattatcaaatgtaagtagtaatgataaygatgggcatattatatcctttaaatgtaataactcagtcctttaaacaatccactatgctttccaactcataaaaagtcacaagagaccatcattctcacccaaacagccaaaacaagcaagataagtttttaaaagcccattaggcagctgagcacacaaagaaacctaaataaactaaacttcaataagtgatagaccattcagaagagagccgtagctgctctcatcctctattgaaacagagggacagggaaactttgccatagatgggaacagttgggctcttaactgtggagacttgaagtggggcaggtgagctcagagcaaactcttcacrggaatttctacttttgctgggcatagggtgacagcagccaaggtgcaagaatccatgggtggagctgcaaagcaaaggaatctcttaaaaatcttgatctgattcactgaccctctcctctgctgtgtccagtcatcttataaaatgtccatataaagtcagataagtagaaagtatccaaactgaaatgcaaagagaagagaaagatatttttaaaagacatccaaaatctgtaaggtgctgtcagtttcacaattggcttccctgaaagaaaggagaaggacaaaggaaaagaataattcaagagataaaaggtaggagctttccacaattgatggaagtgatcaatgtataaatctgataatttctgcaaactcgtcaggataaatacaaaacaaaccacaactccacagtctaggtatatcatagtcaaactgctgataaccggaaataaagagcagatcttaaaagcaatcagaagagggataaaaaacatgttatatacaggaggacagtgataataattatctctgacttttcagcacaaacagtggaggtcagagtataatgatacagcatctttaacatagtttaaaaatatatatatataggcggggtgtggtggctcacacctgtgatcccagtacttctggaggccaaggcaagtggatcacctgaggtcaggagttcaagacccagcctggccaatatggtaaaaccctgtctctactaaaaatacaaaaattagcagggtgtggtggcgggtacrtgtaatgccagctacttgggaggctgaggcaggagaaycacttgaacccaggaggcggaggttgcagtgagcaagatcatgccattgcactccagcctgggcgacagagtgagactccatcataaataaataaataaataaataaataaataaatcccgccagctaattctgtatccagcaataattaattaattaaacctgccaactaatctgtatccagcaaaaactttcttcaaaaataaaggtgaatggagacattttcagacaaaagctgagtttgtctacagtaggcccatatcaagaaatattaacaggagcctatttcatccagctaaaaacactattggcttyaaatatatatgtaacaattatattgtttgtttgtaacatatgaagaagttaagtaacaggcaacaggagcacaatggatgggagggaaatatatgaatatgtggaattcagctggcagagtcttacattgttcatgaaatagtataatatttggaagtagattgaaatttaaagatgcatactgtaatctctagagaaactattgaaaaaatagagacacacagagaggtatagctgaaaatccaacacaagacataaaatcgagggcccagtgccatggctcacacttataatcccagtgctttgggaggccaagttaagggatgaatgctggaggccagacgttcaagaccagcttgggtggcatagcgagaccctgtctctacaagagaatgaaaaaattagctggattttatgagccacacctttagtcctagctacttgggagactgaggtgggaggattgcttgagcccaggagttcaaggctactgtgaaccattattgtgccattacacttctttaaaaaaaaatttttttttggccaggctcagtggctcacacctgtaatcgcagcactttgggaggccgaggcaggtggatcacctgaggtcaggagtttgagaccaccctggccaacatggtgaaaccgcgtctctactaaaaacacaaaaaaacattagctgggtgtggtggcgggtgcctgtaatcccaactacttgggaggctgaggcatgagaatcgctcgaacctgggaggtggagattgcagtaagcagaggtggcaccactgtactgcagcctgggcgacaagagcgaaagtccatctcaaaaaaaaaaaaaattcttttttttaagaagctgaatactgccgtccatatttgatctatccaaagaagatagaaaaagaagagcagagaaacaaataccaaaatgggaaacattaaacctgccatataaataattatattgactgtaagttttcttattttgagcttttttttttcttttttttaaattacagacttcatgttttgcctgggatagggacagtagttaactggaaatgggcatgaggaaaccttctggtcattggagatgtcatgcgtcttattctgagcagtagttacacaagaatatttttgatggactccgtgatataaaatatatcacaatgtctgtgaatataatgtctgacaattttactatgtttaccaactttgtacttttttttttttttttggccttattgtattggctagaccctgtagtccagtgttgaatcaaaatgtatgagtagacatccatgccctgttcttagggaatagctaaaattaaaagagtaaccaaatgttggcaagaatatggaataactagaactccataaatttctaataaaagtataaatggtttaactactttggaagactctttttatgtttataaaaacacttgtacaaaaatgtttatagcaggcttgttcattatagccaaaaacttgaaacaacttaaatctctcaacataagaatgggcaaartgcgatatagtcacgcaattgaataccatctggcaataaaaaaacactgtagatgaatttcaaaaccattgttaaatgaaagaagctagacacaatagagtacctattttatgattccatttatttgaaatccaaggacagttaaccctcatctctgaagtggaagtcagaaacggcttgtgtggaatggggacactcttagtatgctgttatgccgtcacctcattccctttgcctcagcagttctgcttctaggtctttgtcgtrcagataaactcacatcatttctaaaccaattaaaaattctccaaggttggcacttgcagcattgttgatgagtgggggtctgattatatccatcatggtgcaggtactcaatataatacaggaaaaaagccatcttcagaaaacttgatatacttaggttggatgatctcctaggtataggatagagaaaaaaaaatcaaaggtatgtagtatgtattgccatctgtgtttaaaaataaaagagcatatggggaaactgtatatgcatgtgctttatctaaacctaatgtatttctgaaaggaggtctaagaaactgctaagatcaaacttccagggagaggaattcaatggctggaaaaggaaggtgggagatgtttgggtctatccttgttttgtacgttttgaatattgaaacatatgactgtattacctattttaaaaattaaagaatacagttacagtttggaaataactgaaatagttcatcacacacagagttggctgaactgacagaagcctgctacrtagacttgctgagaactctccctttccctcaccgcagttgataccttgtggattttgtatgttagtcttaagttgtcccttttgtcccttcctgcccatcctatctttgtccaggatcatttccatgggccgcttagcttgcttcccctccttgctgtttgttttctttgtttgtttgtttgtttgtttttgagacagtctctcgctctgtcgcccagggtggagtgcagtggcacgatctcagctcactgcaacctccacctcctgggttcaagcgattctcctgcctcagcctcctgagtagctggaattataggcgcccaccacgacgcccagctaatttttttgtatttttagtagagatggggtttcaccatgttggccaggctggtctcgtactcctgacctcaagtgatccactcgccttggccttccaaagtgctgggattacrggtatgagccacggcgcccggccgctggttttttttcaattatccagcccaaaatgtcagccttgctgttctttttgacccacttcccttcgtcttgtctgtgccctcacagggcttactgttccccaatttttgcctacatcatctgtctctacttctgtcctggaggatccttaaaagtagagactttaaggatactgcctggaatctggggggataaaaagtattttattgtctcttgggaaaaataaaactagttcatgaaactggtaggttttaaattttaccaatattgttgcttaggcaaggctcagtttaaaaaaagagagtgattttttgaaatattcagtagtaattcaaacgaagcaacataatgcaaatggtacatagaaatgtaccttttttaaaatatttttagaatatctctgaaatattcactagtaatacaaatggagcagcataaatggggtggcggagctctggcctccaggagattctggcttacaaggaacagggcctcacaccaaggaggcacttgttaccagccttcacctgcctggagccttctatgtggtcacctaactgcactctgcccaccccaccctccaagtctaaccctgcagagcagccaggctgctgcttgacattcatgattctctactttgattcttgccgttgctcttcatggaatgggacccccctgggggtcctcgcccatcttctccctcaactttctggctcagccccatacttcacctcttctctgaaggctttcctgatgcatttgtttcctcttgctgctttaacacatcacagcaaactgagcagctttaaaaaacacacacttactcttttatagttctggaggtgagaagtccaaagtcagttcacaagattaaagtcaaagtattgacagagctggtccttctggaagttctgaggggagaattcatttccatacctttttcagcttttagcaactgccttggcttgtggccccttctttcatcttcaaggcccgtcattctcttctccatttccatgttcagatcaccttctcttctggctctcactcctcttggtcccacctgagtaatacagggtcctctctccatcacaagatcctcaatttaatcacatcgggcaggtctcatttgccatttaagggaatctgttcacaggttctgaggttaaggtgcagatcctaggatgccatcaccattctcctgctcacagtctgtccattcttcacttacctcataggataattacctggtaattatctattcacctgaccagtacccccagtgtaagccacttgagggctgtgatgggctctttctcaccttgcctgcctggtgttcctgccatgtggtagaagtccaggtgtttgaaggagtgaacagattgcccagtacaaatagcactgtagttcagagcacagacttgaggttcgactgcctggctgtggatcctaactgcacctctcaccagccctgtctattctgtgtcccatctgcaaaatggtgatgaagaataaaacccagcctggagcccacagtagagggattcagttgggtcacatgtgaaatcattagaagagtgtctaacaataaagtcaagacagttttgtcattgttgattttgtttttgatgtgaaatggtatatgttatgtaaattattattgacaagtttaggaaaggataagctttttgctatttagttatgtttgtttatttttttttatttttttttgagacggatctcgctcttgtcgcccagactggagtgctatggcgcaatctcagctcactgcatcctccatctcctgggttcaagtaattctcctgcctcagcctcctgagtagctaggattacagggacccgccatcacacccggctaatttttgtatttttagtagagacgaggtttcaccatgttggtcaaactggtcttgaactcctgacctcaagtatcagcccgcctcagcctctcaaagtgctgggattacaggcttgagccaccgtgcccagcctgtttaaagaaatcttttccttgattttaaatattttccaaaaagtttttaggctgtatgatgaacatgtagaaggtgataaaggatttgcttaggatgaccatgaacctgtggaacagtccgttgtgcaccactctgctttaagtgggtatcgactgcttgggagagattactatgcagagttaatccttagatctcattagcctaagagatggtggagattcaagaaaaggttaaaggtgtgtgtgactatggaatgcacacaatacttcactgaatttatggatacacttgagacttccggcttcttgaagccactctaacataagccaaatgtgcgcttaaattcagctaaccctcactgagaacccatcaagttctttgcaccattctaacagagacaactttgtgaaggtcccttgatacctctgttagaggaacttctagatgtcatgtgcctttggtctttttatgtctcaatcttggtattcagtggtgtttccatcagtgtacataatccagagatccaagggttgtttgcatgagatttctagttttgagaagtgagaatcctttgttaattgtaaaatgtgctggattgttcatcctcgggaggcactatatgccattatggggatgacaccatcccatatgccatgcaaagaacagggtttgcagtaaagagaggtgctggaatgtaatgtcagagcacacctatgttccaggagagctaaacaagtctactgcagttaaagaaaagaaatgtttaaaataccttgcaacaagttttttcattgagagcacgtactctgaccaaagwtcatgactacttggtgtgcatgaagaaagtcatatttttagaatgccatgataaatggagaagtatatgaaaagcattctagctttaggaaataatgctagtatggattttagattaaagacataataagatctgcctaagcagagtgaagagagatggtttagtagtgaaaaataaggttatcagacaagtaaatggcaggctggaaaataaaaatgtatcatttgaatggcagggagccattgccagtttttcaaaaagcaagatattaaagttatcataccctctgcatcatttaacttgatcgttaaaggagtgatcctagtgatcctagagttctagtgacaacgggagggaaaaattgtagtagtcccactggaagattagggtccaatttatgaatttatttcagggattgaggttcaagtgtagattaaatataaaatgaagaaccagacagctctacttcaaaattggatgcaagtaacaaaggacaaaggatagttgcagacttcgtttctgttctgtggaaggcagacataacgttctgtgattgagatcttggaatttggggtgatttgtgggggtagagtggaaataacgccctattttcaccatgttgggcaggaagggtgatgaagtatctaaattgtgtagttaaactaaaatcaagcagatttggaaaagtgctgttctcaacaggtgaagacctgaccgtaggaaggaatccattgttgagtcctgctcctgcaggacttctgcctggggctagcccagagctcgggaggcgccacaggcaacctccccctcccatgtctcaccctgaatccaggtgttaccactacggaaaagaatccaatcctaatgctgaggaggaagtggttcttacagatgtgataggccaagattttaacctctcagaaatcaacagaaatgcattgtggggttgaggggagaaaggttggccacttgagctgtgacgtggggttgggaaaaaactcctgattcaaaygtgaatgagcaggaaagagacaccccctccttccaaaaagcgatatgacttcttagcagaattccagagctttgagtgagagagggacacagtgactttgcygtaactcctggattttgctggttgcctgtgggctagaaggagttggagctggtggcttggcagaaggcaggaaggacactgcttgggcgtactcagccttgcactagttgagccacttcccacataccctaaaggccacacaccttgctaaggttgcagagcccaggtctgctctaatctcaacgttttacctgcatttcaatagtacttctcacttcatgcttcaggaagtgcttggccaagacaccctagatctgttggcataacagacagccacttagcttgtaggctacatgataaatgttttgttggagttctaggatagcaargagatggagagatgaggaagatacccctattacagaggaagagttacagcgaggcccctacactcaaagaacttaaaattctcatgggtaagtcagacattgaacaggcaaactttaaaaagaaaaaaacataaatgaactactcagatgttgtgaaagctgctctaaagacaaagtgcagtggtgagttgggtgggaggctgcctggtggggtagatggcacaggtgtctatggtcattaacatttaagctgagacccaaacgatggggagcatctggccaggggagagccagtgggaaagcatccaaggaagaggagcagtcagtggtccgtgggaaggtggacacagggacaattgaaaagatttgagacttgagaccagtttgatgactgcagtggccaaggcaggatgtgctggggtcatgaaccagggcagcattgacacatgagccaaagaaaagacatctctgactcagcaaaagtcagaaaaatggaagtcacagcaagtatgagtggaaattcgtctgttctctagttgaaagtgttgactggggagctggttgaaagtcttggggcttataacctgttttctctgagaaggctgaaacaagctgttgtcctgaagagacaggtagctggaagtggtagagaactggaaaggaggagagagaatgtgggataattgctgtggaatggaagaaggcctaagacgcatgcccagcagacaaagygtagaatcttcatggccgtccacatagttttgtaatttttcctccagcgaagccaccacccaaccattgggtagaggaagcaggtggagaggctgttggggcttttctgggtggttgagacaagacaggcaaggaggctagagaactggtggtgtgggcaagtgatgctggtgatcaatggactggaagccaacagcagagacttagacccaagaagggagcttgaggtacaagaaaacttcagggtagacaggaaggaggcgtggtgaaagtgatgaaaggggagagtagaagggtggtccagggtcagacagggagttagatttaatccttcagggcactttcattacatcatagctgccattttgtcttttatctgactcaataataagtcagtaataagtaatgttttaattaaaggtaaatgcttggcaggtaggttaaacttcattgagtcccaatcctgtcataattattgtgtatacctttctcagctttttgtctacttgaaatatatttcttcttcctttgagcagccaaaatggaagtgttggatgtgttggctctgttggtaggctcctgttggatgcctgttgtcactcataaatgtaacaccacaaccataattgatggagagttgagttgcaagcttttaggactaattgcaaagtctaaactaaaacatttcctggagctgcctttaaataataataataataccttgtatagatacagtgctttacaatttacagagcacttccacatacatcatctcatttaatcttcacaataaacaatgctttttgaatgcttagatatttcctaagtgagaaaccatgttgtacatcctgatttaatcatagtgagtcaccaaaagttcttgatacaataaccatttatgagtaccttctgtgtacaaagcactttactaaggataccaaggggtaaattttcagtaaataaatatccaataagtagtacctatcagtaaatatgatcttgcctcctaatttaccttcgcttcctagtcacagtcactgttttggaggctacttgccatggcataaatttatataaatattgccaggaattcattgtatcagagttgaagttttaaaactaaggattctgatasttgtctaagctcatgattcatcagaaagtcatcctgtctattcaacttgcacttttcttgaagattatcacttgaatctcaagaaaaatatttcaaggcctcagcatatctgaaaatgccagccattgagttcaatgtcctgattggagtgatttgggtacaacttggccaaaaaacaagagtacaatttggcaaaaaaaaaaaaaaaagtataacttcgtacttggttccagaagtcttatttttcattagaaaagaagacacacccatctttgggctctactggccagactgggatgctttgagaagactgggagacaaaggacttcctgggaggctgccctctgggtgaggggggaatggaaggtagtattggagctgggcccaatcccagggcaagaatcctgaacctgtgtcctggagtcccccaagtgtccaggcgtgtcttctgggccaccatggctcttcagaggatacacagattttgaggtctcactcaagattctccaaatgtagaacccccaaaataataggaaccctgccgtcagagtgccctgggcagagtagctccctgaaagtgagcggtgtgacctgcaaaccatgattccttctcccatccggggctcgatgaggccccaaggtgtgatgttgaacttcagctgagaaacccgttttgtcgatgaaatgcaggtggtcgtcaggggcactgatgatgaatcgggtccccttggtgcagctgttacttctccagccatcttcctgctccttgttcaacaccttaatgttattaattcgcatgttaacactagctctcactcacctatttacatgggaatgtggtttgggaattgggggaggacaaagccagatcctaaaaagttttttttttaactagtgtatacattcctggacatagttttttaggaatattttcccatgataacatctctttaaataacaggttttgtgttttacaagggaggctaatgtctgtrttgccaaactatctcttgattcttttgataaggagcttagaacccttccttcttggtgtcgggcagatgtgcctaatgctttattttgacrgaggatatgcactcagcatctgagcatcccataaatactccagagaggaacacaattaggatacagcgtggtgctgggagactgagcgttggttgagtctaagtgatgtttccgactggggctggaaacgtgctttacataattgtattctgatcatttaggtctctctttatagggcatcttttatgaccaagactgtccagtaccaaaatgagctacataaattcctaatctgggatacagctggacaagaacgagtaagtcactctttaatttactctgtttttctgaggcccaaatgaaagttccaactaaactgtcagcatccctgtcatctcacgttactcacttctcttctgtgcaccggagacacatttatttccatttgcgtaggccagcctttgcctttgccttttcaattagagccacagagtccaccgatggagaaagtgataatgggcactgagggcatttttataccttgcagtgtcttaaagtaaatgctgaccaacaggcctgataaaatcccactcagagcactgtgtataatttggggctctctcctctagtaaagatatataaagcaattagtggtagaaagggtgagttaagcacaactcatttatcgctgccttttaaaagctaaagagggaactttacagcatatgaagggtgagatataagtgaaaaggataagctaacacagtgccttgcaatagatacttaataaatgcctgatgacaaaattggccacaatggttatctgcttaaggaagagcctgaaccagaagcggggcctgaacatggcagcatggggtctaatggaatttggggaagcccacccaaatcagaaagggccgggaaggcagggatggggacaaacacatctgcttcctcccctttcctctgggtactgagacacatctgcctcctcccctttgctctgggtactaagacacatctgctgcctcccctttcctctgggtactaagtccaatttcccttccaaggtgtctctggcagccaccccattattcagctgccgtttaattttgttttcaaacagtacgatccaaacagcacatctgatagatgcatggtgctatcttaagctcttaaaagtgtaccagaagtaatcaggaaaaatagtctgtcatcacagccttatctaagacaccatagatagtgtgtgtagtatgaaatctgacaagaatcatcacagacaaatggaggaaaacaaaacaagccattactgttgtcctagacatagactccatgcatttgtacaggtttaatgtcttaagtttgctctgtttggtttcttctgtttttaacactggatgttgtgcctctgtcccattactcatctaagatattctgcttaccgtcttccactccccattccttttcctttgctcatgttgtacatctagaatggagcatttaggacagctggacctttgctaaccatccctcttctgtccttcagaagtgtgtcgcttaccagaatcctgaatatatctgtagacacagccctgggttctgtcctgttagccacgaatccgtgtggcccttcctattagtaatatatgtaccctccactaaatcccaagtttcagttacccctcacatatatttgatgatacagcaaagccctcatcataaagaatcatgctgtaatatagattccattatgctttgaatcagagcctgtcctggtatatgcagtggcgtataacatctctttttttctggaacacaaaaaaaaaataacacaaaggtgtttgcctctctccctttctgccaccatggtagcagaagtctgtgaagttttgtacttagctggttttcctgcctcttgcttgtccacttctcattggttctgcaacaggagtagttgctctgagatgcaaacctgccttcagcctgcctgatgcaccatcacacagcccagarctgcacaggagatgctcatggggccaagccacaggccaggggtgctgaccaggatgccctgcatggagaagacaggagaggagcaccacctgatgagcacacactccagccagttgttgctgggcgtgagcacatgtccagggttgccaaagcgcagtgctgaggaaagccacacacctgacagctacccacaaattgtttgaaatgctgggaggatcacacaagacacgtcttgtaagcctgtctgggtcagggactgcccgtttatcctgggcagtgcattgaaggtccagaatgtgccatccacagccaggctctattttcacctcctcccaccagtctgtcctctagtacaaactgcgtgctgttctccagcatgccatagtttcacaccctcatgcccttccacaactctattcagccttcagaaccaacctccaatgtcacctaaagggggctttcctgccatccctgctctcggacaagtaaccacatcgccacactgccgtgttgctctagacccatatctggaggcctccctgggttcctcccttggcctcagtgctggacaccttctccacccaggtgtcctgacagcttcattctctacatgtatcgcaaataggttcacttctccatctccgctcccagcatcctgctctcagccacctttggccattcactgagtactcctttagccttttcgtgggtcccctgctttccctctgtccatgacatgtcctcataggacccagaggaatcttctggaaacaaaaatcagcctgtgttattggcctgcttaatatccttcagtgacttcccactgcacctctcataacagccacactctgaacagagacctcccaagccccacgtgacttgcccaggcctcccccggggctcctctcttctcagggcctccagcactccttggcctcatgcctctggatacgctgttccttctcaccaaaactctctgttccctccactggagcccagctggctcctttcccgtcttttagtgtcaggttaaatgtgatgcactcagagttttctctaaaccccctgcatctaagcagggccccaactttgttcttcattactgcccttactcattttcctcagaacattcattaaaaattgtccttagatacctgtctacctaccttcattgacagaatctcccatcagactgtaactccaagagctgggaccacagtgtcttgttcactgctgtactcccagggcctagcatggtgcctgacctagagctgatgttcagatattggttggttggatgaatcagcaaataaactctttggagtattcctttgtatcctgaagtctttgattgctgtcatccatgggattgtcacctgtttccttacctgtctgcctttcattagactgtaagctccttgagggcaaggactgccttcatatctctgctctcagccccttggcacatggtattgatgcccataggtttatgtctactgattgccagccctacttaggcacagataaggacagctcctctacctacttttaccatgtgagtagtgcatgactcaaattataaatttctgttgttgtatgtttattactctttgtagttatgacatttattatggaaccaaaattgtcgtaaaatgaaaacccttttgatgaattgaccattcagacatcctccccaacctccccatttgacatcttgtactgcacatagttttgacagatggattgtctttctgatggtccagctacgtttgattgcaaagtgatttcattaagtcaatgaaagtgattttggagaatttctcaaatgtcctgtgaagcccttgacagtagggatcttgttaacttaaatgaagaggaaaaatactgctcaggatgatgatataagtgcttcagaagataatggtttgtgtatcaaagggttaagaggggcctagggaaaattgatgaagccctcaaatatttttgtaaaaatttgtcatttttatgataagactatgaaagtcaaacatgaaatgaaggatatcgtattgtgctagtatgtagttttatcagaaaattcatagccaagttatcaatcaagttcgactcagtgttcatccagaaaattagctcctggctgcaataataaacctaaggtttttcaaataccagataaaattaaacttgattttacaattttaagtttatcttctcaagatagagtctttgtgagaccattttgtccctattatttgctatcttgaatgaatgcatttaaaatcaccctttttccaccaattatctccttcagtaacaaagactcctgcagtagcattgagacagacacaacacatatattaaaaaacctcataaatacaccatacctgtagtaagagcatgtcaaatacttgccatctgtgtgtgattgtataaaagaaagcttcttggccaggcatagtggctcacgcctgtaatcccagcactttgggaggccaaggcaggcggatcacctgaggtcaggagttctagatcagcctggccaacatggtgaaaccccatctctactaaaaatacaaaaattagccaggcatggtggcgcacacctgtggtcccagctactcggaaggctgaggcaggagaatcacttgatcccgggaggtggaggttgcagtgagccgagatcgcaccactgcactccagcctgggccatggagtgagactccatctcaaaaaraaaaagcttcctaaccagagtctaatagacattgcatccagtctttaaaaatgtacattcctgcatcttaatatggtttctcccaatgactgtttttacagagatcagaacactaggaagcctcagacttatttattgtcacagtagtcatgtaaggaattgttctcctgtttaaaatcaagaacaagtgtagtggcttagtatcatctagaattggggcagacagtcccagaaaccagagtctgcagtgcatcatccacactggccagtgcacagttaccatccacatgaagagacaagaagacctgactccatgagtagaagcaaacccgaaagtgatcccattattagaatttgcagacagaatttacacatatatttttgggccacatccaacctgccaccagtttttgtaaataaagctttcatggaacatagccatgcttgtttgtttattatctatggcagggacgtccagtcttttggcttccctgggccacattggaagaagaattgtctcaggcygcatataaaatacaccaacgatagctgatgagcttaaaaaaaaaaatcgcaaaaacagctcagtgttttaagaaagtttatggatttgtgttgggccacattcaaagctgtcctgggccacataacaggccgcaggttagacaagcttggtctgtggctaccttcactctacaatagtagagttgagtagttgcagcagagattatgtgacccataaagccaaaatattcactacctggtctttaccagaaaaagtttgccgtcacctgatctagagccaggtttggagcagagatgtgctgacagcttttgagtctcttacatgcctccaccttctttctttgcatcaaaaggacatgaaagtttccatgtcagtaatagcgagtggcttgccctcccacagctaaaaattatatataaactccagacaaagctttaaaaaaacaactgtttgaaggcactgcagagcaaccaaatgcagtcagggactgcaaaggggagctttcttgtgtaagatccacatttttacagcttttccccagtgggtatttcccagttsgagtggcacagggtagctagtacttaagcagaaagcttgtgttgagtgcagagtttaggactgctagagcagccagaaaaagaggaggcaaatcgcagaaaagggattcaacaaggagggaccccctaaaatctgtttataaattccctgaagtttttttgacccccaaattgtgaattcacaagagagacattataaaatgcaacagaaaccagtagctggcaagggtgacaagacagcagagatttcagctgctcctcattacagcagggctagacttcaaagtttgaatccaatcctgctgtgttacaggggatcactaaacaccttgggcattccgatgaaacttcagaagagccatgccttgggagtagaaaccgtgtcctaggactaagggcaaatccaaaaacccaagtagaccaaccaatctcaggatgagtcaccagtaacttaatactcttcagagaagaaaaaaaccaagcgtctacagtgcatcatccacactgtccagtggacagtcagcactactacacatatgaagaaacaggaaggtgtgacccagtgagtagaagcaaaccctaaagtgacccttttcttggaatttgcagacacagaatttaaagcacatattttacatatgttcagagatttaaagaaaactaggccaggcacagtggctcatgcctttaatcccagcactttggaaggccgagacaggcatattgcttgagtcgaggagttccaaaccagcatggacaacatggcaaaagcccatctcttaagggaaaaaaaaaaggagtgttaatgacttaactgcaaatggggaatctcacatagaatggaaactaataaagaatcacatgaaaatgctaaaactgaaagctgcaatatctaagatgaaaaactcactggagggtgatagaacacattaatcagaagaatagaaaaacagtagaaaaatatggacagagtctcagtatcatagggacaaattcaaacagtctaacgtatgtgtaattggagagccaggaggagcaaagagagagatggaaacagaaaaaaagatttcaagaaataatggctgaaaatttcccgaatttagtgaaacataactcacaaatccaagaagttcaacaaatctgtaagttcaaagaacaccatatctaggtaagtcgtagtcaaactgctgaaaaccaaaggtaaagagaaaatcttgaatgcacccagaagtaaaagacacgtaaacaggagaacaacaatatgaatgatggctaactttacacataaacgccggagaccagaagccagaggaacaggatctttaaagtgtggaaagcaaaaacctatcagtttgccaaaattagttttcaaatataaagtcaaagtaagaacatttttagaaaaacaaaaacagaaatcaacagcagctgtcccagaaggtttttcacactaaaggaaaatgacaccacatggtaattcagatccataggaagaaataatagccactagaaatggcaaatagaaacgtatgttttttcttcttcaattattcaaaagttaactaattcaaaaattataacactggattgtatagtttatagcatatatagatttagattatttgacagtggtagtacaaagaatggtaggataacaagaaattagacttttgcaagtctctgatattttacatgaagtggtgcattttaaactaagtagactgtagaaaaacgtgcagtagtccagacacaggggctcacacctgtaatcccagcactttgaaaggccacgacaggtagatttgaggccaggagttcaagatcagcctgtccaacatggcaaaaccccatatctactaaaaatacaaaagttagccgggcatggtggcacttactgtaatcccagctacttgggagactgaggcacaagaattgcttgaacccggcaggcagagcttgcagtgagccaagaacacaccactgcactccagcctgggtgacagagcgagactctgtctcaaaaaaaaaaaagaaaaatgtgcagtatatattatagttacaaaagcaacaacttaaaaaataatacaagcaagtacagttcaaaagtcagtagagaagttaatatactaaaattgaacactaagaaaaattcaagcaatgcaaaagaggaaaagaacggaggagcaggaattttaaaagaaatggaacagatacaggccgggcatggtggctcacgcctgtaatcccagcactttgggaggccgaggcaggtggatcacctgaagtcgggatttcaagaccagactgaccaacatggagaaaccccatctctactaaaaatacaaaattagccgggcgtggtagcgcatgcctgtaatcccaactgctagggaggctgaggcaggagaatggcttgaacccgggaggcggaggctgcggtgagccgagatcacgccattgcactccagcctagacaacaagagcgaaactccgtctcaatggtagacctaaatccaaatatattagtaaatacattaaatataaaggagctgaactgctgaaccttccacttaaaaggcaaaggttgtcaaaaatcaggacccaactatgtgctggttataagaggactactataaatataaaaacaaataaagaatgcaaaaggatgtagtattcaaataataaacaaaagagacccatgtggttatataatatcagtaaaacagacatgaaaacaaggtggaagaaggacattgtgagaagaatattgaggaactttgtgttgatagaactgtttgacatcttagtggatgatattcacacagatatatacatttgtcagtttatcaaattaaaatttaatttgataaattttaaatttatcgtaaaactcaaattaatacgaaattttaaaagccaaaaggttaaactcattggataagcagttccagaatccatagttctgtatgtggtttatgtatgtgcaccaaatgctcccctgtgataatccctgcctgtgttcaggggtaaaccaccattaacaacaggatgtaaatacagtgtcatcagatcataagtaggggtcaggcttcagagtcagggtgcaagacgaaaattaagtataggcaaaattcttgtcattaaacattgacatcatatccagttggtgagatgctcacataggacgtgtgcccaagaactgagattgactgggcaaagagcttcacagtctccatctcacactcattgagagaaatagctcactgaatcacccttgctgttcaaatggttattcctctcccttctctttcctccctgttgtgtgtcaccggttgtggaggccagggtgaccagggtgatgagtgggaagaagctgtgtattcagggttaaattgatgtaaatgaaatgagatctgtacccagcatttgagaattgccacatgcaaggagatatcaaaaaagcaagttgcaaactcatccaagtagtgaatgtagatgtgtactcatttctgaaggacaatcagtgttcagattacagggttttctttatgacacccaaatgcagctacttctctggagaactatttatagcattatttttatctcccctgatagttagggaagccaaagtttaaaggactattgaacaaatgaatttgggaattataacattgagttcaattaaaaagcctttttagctgaaacaattgtttatagcgccatatttaattcctataaaactgtattctgaactatcttctgagagacatttcagtgttacattaaaagtttttgcctttggtaattactggttcatttgctttaaagcagcatstcattttcttggcttaagagaaagattactttttgtgcagggataatgggcttataaatctagtataaaacatatttaaycagttttcccaattttgtttatttttccccctcctctgcagtttcgtgccttagcaccaatgtactatcgagggtcggctgcagctataatcgtttatgatatcacaaaagaagtaagactatatagttttctttagattgttttgaaaactcttttggttgcttagatctccagttgctctcttttttgkgtgttacaggagacattttcaacattaaagaattgggtgaaagagcttcgacagcatggcccacctaatattgtagttgccattgcaggaaataaatgtgatcttatcgatgtaaggtaagttattagaacgagagattacaatacctattatgtgttccttttcttaataagcaatatccagtttaagaatcttgcttttattttatctctgacattgaaaaattccttttggttgtgtggttggagtcctaaatttttaaactaaaattaagatttcaggcatttggagctaattatattatgtatacagacaggtgtgcaatttayggaaatactggttgcgttgcatccaacattatctgagatcagagcagcccccaggctcccatgacttagaatacttgaatgcagaaagcacatttattggcagtttccctgggccacttccatcattcccaaagcaagggctttttgaaaattttggctggggaagaaaaccctgccatccctaatcattccattagctacattactagtggtaccgagttttgtttcactttgtttgtttacccatggatgtggtgtaatcgagaagaccatgtctcagggcccatccagcagccatttagtccatcctttgtcatcataaatctggttaactactgggtaggtgggggtacaactaagatcttcatgggtagaatttctgatatgtagttgttgccttccagagaagtcatggagagagatgcaaaggactacgccgactctattcatgcaatttttgtagagaccagcgcaaaaaacgcgataaacataaatgaactctttatagaaattagtgagtatctytgtgccttatccatttcctctgtaaaagccgcttaacacagaatgatcttcctggttagaattcctgtcttacttagagcagtctagtctctgatattgtgatcagtgaaatgaagttggagaaggtaagagtaatgtccagttttcatatcatgttatagttgctgaagagctgccgcccttctggaaagagtgttgctactgaataaataatgcacagggtactgaggtcatgaaagctgtcccatttctttctctatttaaatatgtttcygttagtcgtccaaggtcattgaaaatgaacaaaatsaataaagggaaatgaaatgcaggtatacttgcacggtaagaaaaccctcaaaaataatactaggcaagtgaaaggtaagacctgttttcccttctctttcccttccctttccagaagtgttaatatgatgatactcgatgggagaggggctgctgcatgcctttgggatcctctgcagatcgtatctatgtttattcatttcattcaaattcatcaaaatatttattgggagctgttccaggctcaggggaaatagccgtgaagaagatagaygcagcccctgctctcctggagcgcacattctacagagggaaacagacagtgaacaccaaataaataggatcatttcagatcataataactgatacaaagaaaataatttaggatgaaatgaaggaatgtctgcaagcaattggggaaggtctccctaaggaggtgctatcagagctgaggtccaaagaagcaggccctgtagaggtgtggggagtcacataaacatgtcagacttccaggtggagaaaagcagaaagccgtcagagcagggtggatgtagcgttaagatccaccatgtggttgagagccaagggtactgaagcagggagggtcctttgccattgtgtcgaggaggggcatgaactccagagcccaccaaggccaggcaaggttgacccatgagcagagcaggcccaggtgaagccttgggaaccccagctcaggccaggcccagctccatcagctggggccacactggaatgtgggcccctggttgctgaggttgttttcacattttttttttacatgtcccattgtttagatttggccaatcatttaagtattttcagagtactttgcaggcctaaggagcccatctgctgccagatatggccagtgaactactgattgcaccctctaggccagcccgttcatttcagtgttaaaacgtcatgatgtgcccgggcatggtggttgtcacctataatcccagctactccagaggctgaggcaggaggatcacttgaggtcaggagtttaagaccaccttaggcaacatagtataaccctatgtctaaaaaaatataaaaatcaaaatactagggcattgtggcatgcacctgtagtcccagccactcgggaagctgaggtgggaggatggcttgagcccaggaatttgaggctgcagtaagccrttgattgcaccgctacacttcagcttaggtgacagagcaaaaccctgtctcttaaaaaaacaaaaatcatgtttattgttgtcctggatgtaaatagcaggtacccagatggatttttgaaaggcaacataaagccagttgggaatttttcacagctcaagctaaaatgtctaagtgtgtggtgtcatgagtatgttaaaattactgctatctttttgtgttcttyactttagtggtattaaaaacaggaaagtaggccagacatggtggctcacacctataatcccagcactttgggaagccaacatgggtggatcacctgaggtcaggagttcragaccagcctggccaacatggtgaaacccccatctctactaaaaatacaaaattagctgggcgtggtggtgcatgcctgtaatcccagctacttgtgaggctgcggcaggagactcgcttgaacccgggaggtggagattgcagtgagccgagatcacgccattgcactccagcctgggcaacaagagcaagactccatctcaaaaaaaaaaaaaaaggaagatagtaaactataccaacaatgaaaagtcttatataaaaactagtatgtacatattcaatttaactgtgaaaaacaaaacctatatgttcacaaagattagaaaaattgggagagatgtacatagactttcttgttcactggcttagtaaaactgcgtgagcacagtgcctggcacactgactttgtattgaagtataatagacatacagaaatgtgcacgtatcagaagtataaggctcagtgaattttcacaaactgaatatactccggtgcttggcactctggttgggacatggccgttcctacacccaacggtaaccatcctgatactaattcttcagattggtttatctggttttgttttacatatattttgtactttatatttttaaaaacactctgtttcctcttgtgtgtctggcttctttcattctgcattacatttttagaccatccatgtcattgcatctagctgtgaatgatccactctcatggctggtttgtgcgtgtgagtgtcagagtccgagttgtgcgggtaagggggcagtgaagaatacccacaatataattatccattctgctgttgatagacatttgggtagctgtttccaatttagagttattacaaacagtactgctctaaacattctgatcgtattctttggtgaacatctgtacacatttttgttaggtatatttatacccacaagaaaaaatgcttgtcattgagtatgcatgcattcagtacagctttaccgccaaccagttttcaaagtggtagttgtactagttgacaaccataccggtagtgtatgagaagtccgatcaccttctgtctctggtgggtagtcagtgatctccattttcatgacagttaatgaagtcgagcacatttccgaatatatgtttacatttgtcgtatctacatatcctcctttgtgaagggcctgttaagtcttttgcctgttttcctgttgggttacctgcctccttcttaatgttttatagttctttattttggagatgagtcacttattgactatgtatattggaagtatcttctactgtatggcttgcctttgatttttttagtcaactccttcgatggattgaagtttttaatcttcatataatctgactgatccttgttttcctttatgtttagctgcrttaggtttttggttgctgttttagaaatcattacctgttcccagctcatgaaaatattctcctcttatttcttttaaaaatattatttgttcaacaattttttgatgtcatatttcacagatgtctcttagataccagctatatttcaatatccatttattgagaataatgacaagaagcttgggtaaagcttttaaacagatttgtagtatattcacagcagtgtctagtcatttgaaaagtagttasaakacattgggagatactttctcaatgtagaaaccatgctgtgtactccccacacagatccgcagacaactcaaagtggtggaggctcaaggcttgagagaacctgagtcagcggagaggccatcttagccttgttaatgtcaaaaggtgtacatgtccatttattccatgtttacaaaatacttctgtgtcaggtattgtgctgataagatactggaaacataaagatggacaaataggatctcttccctagaagagcttagggtctaatgtgagggagatagtcatgtaaacagatatgagatatgtgtagtaacctgtttctggtgtcctgattgattgtagtgtctgggatgttacagagtaaggaagtgggagggtgtcaggaaagcctttgtacaagaagcaacccttgagttatcagccaggtaggtagatgggtgatttaaggattctcttgaaattgtcattatgcttcacggagcagtgaagtgaaacctgttcattctcatgcattgttggtaggagaatatagtggcacagcctcttcagagagtaatttggcagcatctgtcaaaatttaaattgcacattcttcctgcatttgtgctagatagacactggaatacaatgtatgtgtcagacaaatacccaggagtagaataccgtgacctagctcttccactccgggcattaatcctacacacatactcgtaagttcagaaagatgcttcttgcatctttgttaataacatcaaaatattggaaacaaactaaatacccatcaatagagaaatggttaaatgaatggtggtacatctacaaatgcagtattttagagctgttaaaaagaaggcagcaggccaggcacagtggctcacatcagtaatcccagcactttgggaggctaaggcargcagattgcttgaggtcaggagttcaagaccagcctggccaacatggcgaaacctggtctctactaaaaatataaaaattagccgggcgtggcggtacacgcctctaatcccagctactcgggaggctgaggtgggagaatcgcttgaacctaggaagcttaggttgcagtgagccgagatcatgccactatactccagcctaggtgacagagccgatagcctgtctcaaaaaaaaaaaaaaaaaggtgacggctctttctccatgtactatgatgccacaatccccaggatgtgttgagtgaaagtatcaaggtggagaatggtgcatatggtttgctttatttcttgccccatttggccttggaaaggggagatgggtagggatataggtgtgcctgagtgtttgtgcatatatgtctctggaaggctacacgagaaatgggccacagtggtggccttgtcatgagacagagggacaaccatgttctgactgaactttttaaaaaacaaatcctatgtattacctactcaaaacaaaatgtttttgatgtgtggctttttttaattaaaaaacgtttactaagtgctgtgtgatatccttgtttggatcctggggcagaagcaggacatgtagaaaaactgatgctatctgaaaaaagtctggagttaatagtgatgtggcaatgttgaactcttcattttgacaaatgtcccatggtaatatgtcagcactgggggaaactgggtgggaggtacacaggagctctatcatctttgcagcttttctataaatctaaaattattcgagtataaaaagtttattaaacttttttttttttttttttacttcagtgaaacctgtcaaattgcatctgcaaaattgttgtgtctgagaaagttaaagctcactcccttcccttttctcatcttggtttaggtcgaagaattccatccactgacgccaacctgccatctggcggtaagggcttcaaactccgaagacagccttcagagccaaagcggagctgctgctgaccraacctcagcctctcagacttgatgatgaagtaggtggtcctgaaagttaacaggagggctggggtccctgccaccagttttcacctagccagtcttgagtcttctccgtgcaaaaaggattcacagaaatggaccagttctgttctccaaagactgcagcaatgatatttcagtctgtgaacttctattatgtaaagaatctctagtgtacaaagggactacatcgttggcttttgaccttgctgaaaaggaacatataattgtatggatggtaggattaagttgttgagtagttttgtaatcaagattttatgtaacatttgtaaagggaaaattagcacttttgtggttcttaagggaaaagaaacagaccttgtggagattataatttccttggtttctgttaccactgttagagggagttgtatcatttaacatatagtaggatagtttaagtgtagggaggacaattattgtctgaagctaaaatgggttatttataggactgatggaaatgatttcatctctgccatctctaaagcacttttcattgaacatgttagcctaggatacgtacagtaaattaacaatgatagcagcagatgcctagctcatcctgggtttgcttctgaccttgtcatgtgtgtgccaccaaacacgttattggcacctttttaaataagctctcatgatcaagatggtgatggtagagaagctgcccggaataaactgaatttcatatgttctaaaatgactagcaatggtttaaaaaggaagaagagtggaagtgaagaaggtggtataaatgctgtcaatttttttttaacccaagtattttggtggggaaaagcaagtatctattgcttagcatatgtaaagttgtagtctatayttatggggccattgcttaaagattataaattatgtaaatacattaataaattytaagtttcatttgacattccattgaatctcgcacccagtcttgcgtatgcctgcccagttttcagcctcttaacgggagactcaagcacattggtattgtataaaggtatagagcacttagcttacaatctttaaaggtttctctgccttcccttctacccacccgcctcccaccagatcccatctggaaatcataataaagacatatgccactttgacaaacctgactagtccttactagcctgagggtaaaagattaagctccaacctcaagtcatttacctggtcttggtaataagtttcttttagcttgtacagcatcctcagaccaactgaggagctttccttgttaacaatttagcttatctttctgtttcctttatttttcccctgcctctgttagtggttaacactcttttccctcagggagcctaatgaggtttttaatatcatctaaaaataaagcattgaagtgaagttggtgaaaatttgttcctggtctaatttggcacccttccaacctgagtattgtaggggaaggaaatttacaagatttaataggaaatgaaacagcttgaatttcaaactaaattgtattttcagagctatcctgaaactgaacagctgaaactttaaaaaataattggtattattttgtgccccccacttaatatggatagattttaatgggaaaattataattcagattaaataaaaaacaattcccttttccctgttgtatatcttaagcatttggaattttttttatcttctgaaatcatataaaaagaatgtcattagtaaaaattctaacttcgttttgtttaaaagacatgtggatgctccatgcccctaggattttgcttcctccccggtgctaaattagcaagctcctagagaagccatgtgattcccagagccaggcgctttacacctaaagtagtttgactttcttctgtatacatccagatggatcccaggcatccgggcaccaccctggtgtgtccctagaattcccactgctgggcctctatctccatgacaacaaaataaaaacagaggttgcttgactcattaccaaagaggcaaagcatgtgcgaccctttctgtcttattttaccaaaagatggtgcaaatctatgaccttcacattttttccaccacacccaccagtagctgttggtgattgcatggtgtctcggtgcatggggaaaggcaaggtcttctgagctcatcttaactggtgaggcatctggatgtgtctgatcttactgtgatgttttactgtaccgagcccaatgtgggtccatctcatcagccctttgctgatttcatgatttctcaccctccctcccatatgtagggtgtgattctgttttattatagccacatgttttattaacagaatgagtgatatgaagcttgtacttatgcatttctcgggcctcttccctcattttcatcagtctgtctaagaacttgactcggcactgtttctcgtgtaatatccttctaatgcttagcaacaacaacaaaaaattgctctctcagatccataatccatactcagtgaaagcagggaaaaaatattttcacttattttatttgcttctaaaatgcaaagatgaatactaaagtcagaagcagtgtttcattttgaacacattttggattattaagctgactaagcaatgatctaatacacatttcatattttctttataataatttcttatggagaagaggctatatttcaaaggaattgagacatactcccatctataaacatgtttggttttcttacgatacagggccatttttttaaaactctcaggactgaacagaagagaaaaattattaattagctgctactgtatgttgattcttttcggagaaattgaaataagctctttgcaggcgtccaatcctagaaaccaatggtctccagaactctcacacaagtgtttttctgattctatgataactaattaaccatcatctggtgattaaaagaacataaagtaagattatgattaagtgtccatcacctgcctgtcagccgtggtcagaataagttttacacgaagcaggtgaaagatttagttcttttcaaagtaacttattttcttgtgacccgtttatgatgttgtttgaagtccctgtttcccattgtgtacgcactttctggatgtctggaaggatcgggacttttgtgtgagaggcttgagcgcctcctctatgtgggctggtgtccttcttgaagttgtcaattcctcttattcttaaatatctaaagggaaaggaaaccaactttaatttcagaacttctctttacgtcttgtatgtatttcttttctgttctcaaggaggaaaattggtctaggaagccttctaaattaaactctgggaaatatagtaatgaaaatatcctttagctaactttcctgtaactgtcaaaccaaaatgtcagtatttttagggcattgtgttaaaataagcagtttagattccgacgacactgcactaattggcatgtcagcctccagctcagaaaggcatttgctcatggttacaggcatcttttagattctaagagtgagttacagaattctttttggtactttcacttattctttcagaatacatcaaggatgtgatttatgggcccttaagagtataagatataggtgcacagtatgttacttaagtaacggatgagcccccctaaacatccacgtgtctctgcaggaacctgtgtaagtattgtgaaaacccttttcttccagggaaaaattattggaaattccttaactgagctatacttggtacttgctctagaacatttgggaaatgacaaactcaggctggctctcctctctaacctcactgggctataaatgttccttctaactctgtaatgaaagttcagtgacaaactagatagtgaacctgtgaaagtcattatttacatttgctttaaagggacagttttaccgttcaacttcaagagtttttctacctctttaacagttaatattttttaaaggaagaaatggaatgtaccttcaggggtcaagctgttaactgtatacctgcctctagttagcttggtttatcaaaaggatttttaaatgattcaaggtaatgtttaggatatttgttttaactcctgctgtgctgtgatttaaaaaaaaatagtctaagaaacaaatttatccatgagataaacatcatattttatagttttagaaaaaagggttgggggtggaatttagcctagaacttaaagaaacaacctctgcgaatttctcttgacagcggagttgcttgtcttgacttctaataatataaatccaggcagtttgattatccgatttgcaagaaactttaatggaattctggggcatttgtcctgttttatgtgcaaatgaaagtctaaaaaatatgaggaagatattacatttttcaggagcctccattttttcagtctaagagaatgataagtgagaggcctattgtgatgaagttgcattggacataatgtgggaagtgaataaatagaaccaagaatcttcatctatctctgttggtctttcaggattctcttagcatataggaaaatgatttaccttccagatctcgaaggacttccaatagcatagatcaggtttaatttgatggtctataccatcagaaataactaatatctgttttctttccttttagagtataatcaattatggataggccagaatatttttggcttcaaaacaaaaggattcataagcttaaaaaaacaaaaatcccaaaccttccatctatcccttttattacgttgaacattttagatagtaagattaagatgtatcattagtatatggtgaaattaaaaccgtggtgtctaacagatttaacaaaaagtgtttaatttactgcaagttcatttttagatctgtatggtgcccagtactccacaaaatgcatcataattgaaacaacaaaattattttcatgagcaagaattcaagtatcaaggcctatcagccaattaaaagccgtaagatagtaatgattttttttctttttttttttttttctttttttagatggagtctcactctgtcgcccaggctggtatgcagtggcgcgatctcagctcactgcaacctgtctcctgggttcaagcagttctcctgcctcagcctcctgagtagctgggatgacaggcgtgcaccaccatacccagctaatttttgtatttttagtagagatggggtttcaccatgtttgccaggctggtctcgaactcctgacctcaggtgatctgcttgcctcggcttcgcaacattctgggattacagacgtgagccaccgcgcccaaccagtaacgatttttttaaagggcctttcttaattgacagttttaagctgtagacattaatattctaacaaacaaaacatgccagttttactgattccgctttttgcttgattcaggaacttttcattgtttggggaagcttttgaatgcagtactgtggaggaaatcatccttaaaatagcatttcacacatagggccaaaattgaaattgtcaaggaaacccctcagcatctaacgtcatcttgtagaagagctgggcatacctcttcctctaggccaattcagaggccactggccacccaagtagagtggggcccactggcatgagtagtccctgtgcccatgcccatggtggtgcttgactttgctttggggcttaatcctagtatcatttggccattaatttttaattaagtttatacttgaataatcagttttactcctgaaaaattttgaagccagcactgactttgtttatattcacttaccttgtatatgaacttatgacattagagtttgtgaaactgtcttaacgtggctcatacacgtgatgtcagagggactggtcagttctttacagggtgaattaatcggcagctggctagtcagagcaactgatgggtggcttttttttctttttttttttgagacggagtctcgctctgtcacccaggctggagtgtaagggcgcgatctcggctcactgcaacctccgcctcccaggttcaagcaattctcctgcctcagccacctgaatagctaggattacaggcgcccgcccccacacccggctaatattttttgtatttttagtagagacagggtttcaccgtgttgatcaggctggtctcgaactcctgacctcacgatccgcccgcctcggcctcccaaagtgctgggattacaggcgtgagtggtggccctatttttaaaccattcgttacgctgtgtagacagagctttattgccctggaaaagattttttttttaactctcatgcagttcagtctttccatcatttcactttgtgagtcactcacataattgtcaatcattcctctgaccttcttaagaatttacaccttaccgtctctgtgattgaagcagacttctcgctttatttcccttaggctcatttttctgtgggctctcccttaaagacacatggccacagacacctccttcacatatgtaatctgccttcccctgcggccttccgtggtcacagcaacagggactgctcaccccctccagctggggcttttctaacaagcacagtcagaaatgcgcaggcctggggttggggatgaacagaagttgattagtgggcacagaaatacagttagatagaaggaatagttccagcattcgatattacagtagggagactgcatttaacaataattgattgtatatttgaaaacagctagaagaataagaatattcccaacacaaagaaaagataagcgaggtgaaggaaatcccagttaccctcattcagtccattacacattcgatacaggtatcaaaatatcataggcacctcaaagacatgtacaactcttaatttaacatttttgaaagaaaaaaaaaccggccagagcattaaaacaaataaaataagaaacacagaggccagtgttaggtgaagaactccgctgcttcagaaagagaatagcagcgctcgctt

SEQ ID NO: 97869 - DNA, 14902 bp, Homo sapiens
tgggaggttgagatggggggatcactggagctcaggagttccaggccagcctgggcaacataatgaggctcccatctctaaaaaaaattattttaactatgtgggtgtggtggcacgtgtctgtggtcccagctactcgggagactgagacaggaggatcacttgagcccaggagttggagaccagcttgtgcaacatagtgagaccccatatctccacaaaaaatacaaaaattagccaggcatggtggcgagcacctgtagttccagctacttgggaggctgaggtgggaggattgccggaatctgggaggttgtggctgcagtgactatgatggcaccactgcactccagcctgggtgacagagcaagaccctgtctcaaaaagagaaaggaaaactaaatcctagtcctagcagagctgacacgctaatgtgggccctgccgtggccctggctcaggctcagtgggtgatgagttactgggatggaatccccctagtcctctcccagctctctcccttcgccctccagtggtgattagaaaagggggagggagggggaagaggtttcagcgtctcccacccctgcaggtgatgttctgcaccctgaacacccacaaagtggacatggacaagctcctggggggccagatcgggctggaggacttcatcttcgcccacgtgaaggggcagcgcaaggaggtggaggtgttcaagtcggaggatgcactcgggctcaccatcacggacaacggggctggctacgccttcatcaaggtgcctggggagacggggcaccccggaggcctgggagtgagggtgggccatgggaccccggaaaccagggcagagccccaagggctgatgactccccgcccccgcagcgcatcaaggagggcagcgtgatcgaccacatccacctcatcagcgtgggcgacatgatcgaggccattaacgggcagagcctgctgggctgccggcactacgaggtggcccggctgctcaaggagctgccccgaggccgtaccttcacgctgaagctcacggagcctcgcaaggccttcggtgaggagccgccccctggacctccccagtggcgctgctcgcatgggcgcaggcggtggtgccgggagcggccagcaggtggcgcccaagcctggcctgccgaaagggaaggggttgcagaaagggaaggggttgcagctcctcccgaccccagacggggtgctggcccttggcccagcctgggagaagggcgggggcgaggaggaagttgccctcacacctagcttccaggggccattagcccagccaagcgccctcagccctggccagccccctatccccaacaggccaggcttgactgctcagtgccagcccccccacttttccatctggcttcactaactctcaggaatgggccccaggcccctgaggtgggggtgggggactaaatcacttccctgggcaggtagggctggtctgtggcccagcagccatacccccttggccaagaggagacggactcaggcagctggagactcaggctggggtacacctgcttcctgtcccccagcccctgggagcagaagtggcccctccagtctcccctccagcatttcctattcctggcccccagctgttccccctgctctgccccacatccatgccaggcctgagtcaggattcctgccctcctgggatcaccccggccccagcccccagaaacttgcagaagcctggagaagtttggggtggtggtgaaagccaggaaggacaagttcctgcccagaacgtgctaaaaccaagcttcccccacactcactcctctcctgcctcccacagacatgatcagccagcgttcagcgggtggccgccctggctctggcccacaactgggcactggccgagggaccctgcggctccgatcccggggccccgccacggtggaggatctggtgagtgctccagccggaccctatctccggcatcccttccctttcttttttttttttttgagacagagtctcactcttgtcacccaggctggagtgcagtggtgcaatctcggctcactgcaacctctgcctcccaggttcaagcgatactcctgcctcagcctcccaagtagctgggattacaggtgcccaccaccatgcccagctgatttttgtatttttagtagagatggggtttcaccatgttggccaggccaggagttggtctcgaactcctgacatcaggtgatccagcctccttggcctcccaaagtgctgggattataggcatgagccaccgcgcccagccctcccttccttttcataaccggcagcattacctgttagctgaggggactctgggcagacagcctggattctagtccacttctgccacttcccagctcccagggaccttccttgggcacatgggccgcagtttgcccatcagtaaaatggggatgagctgaacaccgataccaccttctcagggttgtcctgaggtctaaatacgaatatatgtaaagtggtgacaatggcagtccgtccaattactatgtatattcacattgttatgatgtcgctgtcacccctccctggcccccagccctctgcctttgaagagaaggccattgagaaggtggatgacctgctggagagttacatgggtatcagggacacggagctgggtgagtgagggctgcctgggggagggggcatctaggtctgctgggggccgaatccaccctgagccccttggtccctggtgtcatttgtgcctccgttctgacccctcccccaatagcggccaccatggtggagctgggaaaggacaaaaggaacccggatgagctggccgaggccctggacgaacggctgggtgactttgccttccctgacgagttcgtctttgacgtctggggcgccattggggacgccaaggtcggccgctactaggactgcccccggaccctgcgatgatgacccgggcgcaacctggtgggggcccccagcagggacactgacgtcaggacccgagcctccagcctgagcctagctcagcagcccaaggacgatggtgaggggaggtggggccaggccccctgccccgctccaatcggtaccatcccctccctggttcccagtctggccggggtccccggcccccctgtgccctgttccccacctacctcagctgggtcaggcacagggaggggagggatcagccaaattgggcggccacccccgcctccaccactttccaccatcagctgccaaactggtccctctgtctccctggggccttgggttctgtttgggggtcatgaccttcctagtttcctgacgcagggaatacaggggagagggttgtccttccccccagcaaatgcaataatgccctcacccctcctgagaggagccccctccctgtggagcctgttacctccgcatttgacacgagtctgctgtgaaccccgcaacctcctccccacctcccatctctccttccaggcccatccctggcccagagcaggagggagggagggacgatggcggtgggtttttgtatctgaatttgctgtcttgaacataaagaatctatctgctgttggacctgtgtggcttcggggtgggagagggggaagattggggctgagaaagaattcagcagctgaaatccatcttccgcaggctccaaattgaattaggagctggcaccaagccacctgccccctcccactgttccttctggctgcaggccaccaggcttccaggcagggccagagcttcctggactactgagggttcaaatcctgccccctctcccacaaggcctcctaccccctggagcttcacaaggctgctgtctgcagctggtgacaacccccggaccgtggggagcaccagggcattgaaacctggcttggaaatagaaagatggaacctcaggcctgccagagccccacccctacaccgggaggttgggggcaggcgtgaggcagcccccaccccacccggcccaatgctggacacgcaggcgtccatggggcaccctgctttgtcctagacataaacccagcatacttgttttgacaacccactcatcttcgaggattgagggtgatcagggaaaggcggggtgggaccctggccagacctggagggaagggaagggattgaagcaaggggcgctgggccagagggccccacaggaatgcttgggggtgagccgagaggctgtggggaagtccgaggccagcttgcaatcctcgttccaaaaggcgggcgggcactgggccaccaggaagaggggaagggggaaaaggggaagaccctgggggctgggtgttggtggacagacccgggtggagtcggggagccgcagtcctggtgactcagggcatccccgggcacctgtgggctcctcgggtgtctgtgctgggagccgcttgcggtggtgaaggggtgtggctatgtgtgtctcgggtgttgggtagcactgtgagtctatcaagagtgttgatggctcgtgacgcaatgagggagggctgtgtcgtgggtaagggatgtgataaccggctctgtgttccagggcaattgcaggtgtaactggcagtgtctggtggtggggagtgcaacggagtgactgtgtcttggggtgtcccggggtgtgggggtgtgtgtcttagggtgctgtttctggggcaaggaggggtgcttggctaggccttggggtgttcaggggtgtcagggtatgtctcggggtgttgctgtttcctgggtgggggtgctggctaggtctaggggtgtctaggggtgcaggtgtgtgtgtctcagggcgttgctgtttctgggtgagggtgggggtggccagctaggtctctggtgtccagcggcggggggtgtcacttcttgtgccttgggtgtacggagtttgctggtggggcctgtctgggattgttggggggtcattgaaagtcaaacagagtgtggtcaggggcagttttggcaataaggagtgtgtgtgcgtgtgtgtatctctcggggtgccaagtgagaccctatttcccagcactaaggagggtggttcgggtgatcatctcagagggctgcattttggggtgttgggaggggctggaattgaggcagtaactctgggtgcgtcccggcgctgggggtaagaccctgagttcagggatgtggcggcagcaacctggctgtgctgagatggggacaggatgaaactgagtggtaagtgacaggattgtatgtcttagggtgtgaggctgtgccagtgtgaccctacttctcagggcaggaggcgagtctttgtgtcttaggacgtgtgtcacaggtgtcactcagcccatcttaaaggagccagtcactggggagagtccccaggtcgccaggcctcctggttcccctgccccctttcagcctcctcccaggatatgactcgctgtggccctagccggggcttaagcccctgtataaataggcggatcccctggccaggctgggcctgacccaagctggtctacccgaggccctgcccaccagcacccaccccgacatccacgaaggctttggcagggcagggggggcattgctggccccacagaattggagttagcctctctagctccaaagccccagggaggggggcagtggcaccccctgcagctgccccagcccgccccagacgacgctcacattttccagtgtttagattttatccgctttattaatgaggcaagaggcccgatcctgggggggaagggggctgctcccgccctgctgggaggagggggtcacatggggccagaccaactccagggagcctcactcctcgtggagggagccgctggggcccagagtggcccccgcccattgccaggagcagagaggggggtctctgccactccaggcccccagcgggcgtgcgcggggtggagcggcccctggaggccagcaagggcggcgggaggagctgaggagccgccccaggaagagggagggaggaagcggcttgccggagagccagggcgcagtgggcggcagggctgagcggccggtgatggggaccccacatcccaggcagtgccgggtaagsgggttgcacatgagggtccctgattggggaggaggagggcatgaaggggtggrgccatggccacctgctgtccgtcctgtgtccccgggctcttctccctgatctgtgcgtccctgtcttaccgtctgtccatcctcccttcccatctggcctggtgggcagttccgccctttcagccctcaccaccaggatatcaaagagtggatggtcgtggggccgcctccaggcctctggggcagggatatggagtggaaccgtgggcacccagggtgaggcagaggtgatcggggtagggcctggcgagagaccgcagtggagcagrggcaggtccatggggcaggggcagagatgggtccatggcacagatgtggctgtgccatgtggggtcagagatgggtccatgggggacagggacatggccgtggggagagatgtgcccgtggtggtagagatggggctggggcatcgaggatgggactggagtaaagctgacatggggaaagtcaggtagggccacagkggcagaaatgggtgagagctatcagatggagccacaggccccaggaatttgctgggtgtaaaaatggaaggtgggggtcggaggcactggcagagatgcctgagggcggggctggggggaatcttgcaggaaaccatgaagggcagagaaagggccagtggggttagagggaggccctggagcaggagatggggtggtgagaggcaaaagagagggagaagggtttccaaatggagtggccaggtcatttggagttgcccatggcaactgccatgggcagaggggccgcctgagaacgccatggagtcaaacaggccctgatgttctgagatggcaccgtgggctggtccccgcccgggcccagccagcctcactctgccctcctctcctctatccagcacccctggcgcctgacatgagcccttgcgggcccctcaacctgagcctggcgggcgaggcgaccacatgcgcggcgccctgggtccccaacacgtcggccgtgccgccgtcgggcgcttcgcccgcgctgcccatcttctccatgacgctgggcgccgtgtccaacctgctggcgctggcgctgctggcgcaggccgcgggccgcctgcgacgccgccgctcggccrccaccttcctgctgttcgtggccagcctgctggccaccgacctggcgggccacgtgatcccgggcgcgctggtgctgcgtctgtacactgcggggcgcgctccggccggcggggcctgccacttcctgggcggctgcatggtcttcttcggcctgtgcccgctgctgctgggctgtggcatggccgtggagcgctgcgtgggcgtcacgcggccgctgctccacgccgcgcgggtctcggtcgcccgcgcgcgcctggcgctggccgcggtggccgcggtggccttggccgtggcgctgctgccgctggcgcgcgtgggccgctatgagctgcagtacccgggcacgtggtgcttcatcggcctgggtcccccgggcggctggcgccaggcactgcttgctggcctcttcgccagcctcggcctggtcgcgctcctcgccgcgctggtgtgcaacacgctcagcggcctggccctgctacgcgcccgctggcgacgccgctcccgacggcctcccccggcctcaggccccgacagccggcgtcgctggggggcgcacggaccccgctcggcctccgcctcgtccgcctcgtccatcgcttcggcctccaccttctttggcggctctcggagcagcggctcggcacgcagagctcgcgcccacgacgtggagatggtgggccagcttgtcggtatcatggtggtgtcgtgcatctgctggagcccaatgctggtgaggggcgcaccggcccctcgagccacgctccttcccsctccctctcggcaccctcccgccctttgtcgtcccaggacacctggggcctccatcctggactcaaccaaggccccgrcccctagaggccccacctgccccgaaagccagcatcgccttctccatctgacctcccatccttcctcctagcccccctctcctcttcctttttggggtctttgtagcgcaccccgacccacacaagcctcctctcctgccccaccgttataagtcsccgcgcttcattccctaktcctttcacccaacccccttgcttttcctctttccgggacacytgagactcctctacggccggacccccacccactgaaggtgtttgtttctttgccccccttttttttccgcatccgtttctcatstggatccccatttaccctccctgcgacggctcgcccctcctcccaggcttttaccttccagccacgcccccaccatccctgcgcccccctgcgcccgcgcctgctctatagctcacaccggcttcccccgcaggtgttggtggcgctggccgtcggcggctggagctctacctccctgcagcggccactrttcctggccgtgcgccttgcctcctggaaccagatcctggacccttgggtgtacatcctactgcgccaggccgtgctgcgccaactgcttcgcctcttgcccccgagggccggagccaagggcggccccgcggggctgggcctaacaccgagcgcctgggaggccagctcgctgcgcagctcccggcacagcggcctcagccacttctaagcacaaccagaggcccaacgactaagccagcccmccctgggctgggcccaggtgcgcggcgcagagcctttgggaataaaaagccattctgcgagcccaggcaggaccgtgtgtcccgtcggggcttcggcatccactggggccgcgcggggggctgcagggacgccgcgtgcgcctccagggtggatgcagttccggggcctaccagaagagggcgcggagacaagggggcgcggttctaggaggtttgagggtgccgggcccgtgggcgccagagccgcaggagcaagcgcaccgtgcgggcggcgggggctggggctccgctgggagcagagacagagggtgtgtggggcgtttcctgaccttgccgctgccctaacggacttccgaaaccattctgctcactgcggctttgagctcttccaatacagccccaaaaccctatccccaaaccattttgacccacgcccctgggcgccccccaacacaatcccgacgccccctcccatctcggctcacccacgctccccaccataagaacagccccgagtccacgccgccccttgatcctcttcagatgacacccccatcagtcgagactcccacgaccacccagccacctgccccgcaaacgtccacacctccaagcacgcccccacccccaatgactgcacacaagaagacacggaggatgcaaggatccggcaaatcccaaaggcctttttaaaaactaagagctctcgggcaggggcaggggcaggggcaggggagggggctagcagcccccggccacgaagtcgaagtccaggaaggctgcctgctccgcggctgtgaggggccgcgcgtcgcggggcgggctcagtgtgggggcctccccggtgaactcctcgtcgaagttgctgacgtcggtgcggccggacagcgtgggcacaaagggcggtggcaggcgccgggccaacagggcttcccagcccagagtctgcaggggagggaagcggaggggagggtcagcctggaggctgaggagggggcgtgctgcagtggggaccagtcctggggctcggggaccacggagaggagtgagcatacagaggacaagtggggtggggggactggggctcaggagggatcacctgcgagagcctggtggagaagccggattaggaaaagtggaggcccggcgtggtggctcaggcctgtaatcccagcacttcgggaggccgaggcgggaggatcacttgaggccaggagttcaggaccagcctggccaacatggcgaaaccccgtctctactaaaaatacaaaaattagcctggtgtggtggagtggtgcacgcctgtaatcccaggtactcgggaggctgaggcaggagaactgcatgaacctgggaggcggaggttgcagtgagccgagattgagccactgcactccagcctgggcgacagagcgagaccctggctaaaaaaaaaaaaaaaagggaaaagtggagatgtgggattaggagggtccttggggggaacaaaagtggaggagggaaatgggggtgtcaaaggaggtgacgatgttgccctggaggtgcaacgaggcccttgaggcgcaacgaggcccttgaggcaaagcggctaggcatgggggccgtctgctgtggggtgatgaatcggccctgggggagggccggggtcactgaggtccttgtggggaatctcaccctgaagaagggctgtttcttcacatcttctgcatctctctcgctagatcccagcctccgctctgggttcctccgaagcagcttggaggaaggagcactgtgtcaggatctgtcccctcctgggccccactgcccctccccaggcccgccccacgtcgggggtcctcacccttctcatgatgccgatggcttcggccgacaggaagcgggggtagcgaacctcgtcgttgacgatgctgtcgaagacctcctcctcatcatcccctgggaatggggactggggagagggaggcccggggtgaacgaggcccctcctctggctgctccaaacccagcccggcctgagccccacactctgctgcagctcttgggtgctggcttacttgggcagggaaatgccccattttatagatgtggaaactgaggccagggaagcagagccagcagccctcaatcacacaacacatggtggaggcagacttggatcccaccctgggcacgcgcaggttccaatgagatccgagacacacaggggcggggtctcacctcgccaaccagcatctcgtagagcagcacacccagtccccaccagtccacagctcgcgtgtacgacgtgtccgtcagcacctcaggggccaggaactccggggtcccacagaatgtgctggtccggtccccatagcccatccctggggacagcaaggccatgtgaggttatgggggccagaggagtcactcagcccaatgtggggttgtccacacagccagccctgtcccagggtcagggtggggggcaccccgaatagggttagggaccccattccttccccctcctttgtctaatccagaggccagcccctcaccctccttgcagaggccaaagtctgcgatcttgacgtagccctcggtgtccaggagcaaattgtccaacttcaggtccctgttgggggttggaggggtggaaagagggatgagcgggggtctgggtcctgtccccacaacgggcagtgtgcacatgcatgcacacacgcacacacctgtagacgatcttgtgttcgtgaagaaactgtaggcccagcaccacgcaggcggaataaaagctgcagagagagagaggctgctgagaggggtggggccaccctgcaaggagggagggtcacataagcctggcttccacatcctcaaaagccccccagtctccccaaagctctgggaggctgagggaagcaaggcctgagggtggaggggtgagaagcaggctgccagcctctcggggggactaagtgtcagatgctgtaggggaggcaggggcccgggctggggtccaggctcacatggcacggggctcagagaacacgtcgctgtggatgtgcagcatcaggtccccaccggccgagtactccatcacgaagcacacgtgctccggtgtctggaaacagccgaagaggttcaccaggaaggggtgtcccgcactggtcactgccgccaatatccgcttctcacacatcaggctggggaggggtgggggatagaagtcagagaccatggccgccacttactccagactcccagatggcaaccaaagcccatacagagggaagcagaactgagaaacgtcatctcagcacctggatacagccatgcctgaaggtagcacactcctggacttttcagatccagaccaataaatttctttacttgtttcagtctttctcagttgggttcctgattatcaaaaggatgctgggaagaccaggcacaatctcagtgcctgtaccgaatgtttagaggggttaggcactgtgtagagagcacctgacaaccatgtgtggaaggcaatagcattctgcttctccacaacaagaggggttcttttttttttttttttttttttttttgagacagagtcaggctggagtgcagtggtgcgatcttggctcactgcaacctccgcctcctgggttcaagcgatactcctgcctcagcctcccaagtaggtgggactacaggcacccgccaccatgcctggctgatttttgtatttttagtagagacggggtttcaccatgttggccacactggtctcgatgtcctgacctcagatgatctgcccacctcagcctcccaaagtgctgggattacaggcgtgagccaccatgcccagccaagaagctgaggttctgaagggagaagtgacctccccaggatctccaagcccatgctgcagaattgagatttgaacccaggaacctgaccctaaagcagaggcagtatggtggcaccacaaagggcacaggcttcagagcctgagtctctagctttgaatcctggacctgctgcttactggctgtgtgaccttgggtaaattgctgaacctctctgtgccatcagtatttatcttatagggctacatggaggaacaaatgaataactttcctaagagctattattatcttggtattaggctagtaggtattagtgactttttgttttgagacagggtctcactgtgttgcccaggctggagtgcagtggcgcgatctcagctcactgcaaccttgacctactgggctcaggcgatcctcctatctcagcctcatgagtagctggggctacaagcatgtgccaccacacccagctaattattttgtattttttgtaaagatgggggtgtcaccatgttgcccagcctggtcttgaaattctgagcccaagtgatccacctgcctcggcctcccagagtgctgggattacaggtaagagccactgtgcctggcgttagtgactactatgagtcactctccctgtagctccaaggagagaactgctctgtcatttcccaaaagagaagacagaggtccccagaggaccacggcaggtccccacctctccacctcgtctcgggccacaatgtcccctttcttcagagccttgatggcgaacagctccccactgggccggaattcggagaggagcacctggaaccacagtaggcaggggtggttttagcggccagccagggacctggggggtctcccaattccctgccctccacctcaccttcccaaaatgaccccggcccagcaccgccaggaacttgaaatcttcgagggtcagaggtgacttcctcagagggctgtggagagaggccactggtgagaacaaggacagcgggcaggggtggtggacagggggccagggagtggtgtcacctgcacagggcggggcctggggtctcctgggtctccgaaggcagctcgggagcagtggattcctggatgggggagctctgtggcggagagaggaggccagagtaaggggagtcagagatgccctcataaccacagcagcctccgaggccctgcaagatctgcccccgacctctctgtcctcacctctcctcccacgcagcccctcactcactctcctccagccacacgcctgcaccaccatggctggctaatttttgtatttttagtagagacggggtttcaccatgttggccaggctggtctggaactcctgatctcaggtgatccacccgcctcggcctcccaaagtgccaggattacaggcgtgagccaccatgcccaacctgaatttttttttttagagacagggtcttgctctgtcttccaggatggagtgcaggggcgcagtcatagctcagtgcagcctccaactctacctccgcctcctgagtagctgggactaaaggcatgcaccaccacgtccagctcattttttttttttttgagatggagtttcactcttgttgcccaggctggagtacaatggtgtgatcttcgctcactgcaacctccgcctcccggattcaagtgattctcctacctcagcctcccaaacagctgggattacaggcatgcaccactacgcccggctaattttttatatttttagtagagatggggtttctccatgttggtcagggtggtcttcaactcccgacctgaggtgatccacctgcctcagcctcccaaagtgctgggattacaggcgtcagccaccgcgcccggcctaatttttgtagagatggggtcttgttctgttcctcaggctggtctcaaacttctggcctcaagcgatcttcttcgttcagcttcctgagtagctgggactacaagtgcaagccatcatgcctggcttgacaatgtccattttttattattattttttttatttttgagactgagtctcactctgtcgcccaggctggggtacagtggtgtgatctcagctcactgcaacctccgcctcccagattccagcaattctcctgcctcagcctcccaagtagctgggattacaggcgtgcgccaccacgcccggctaatttttgtatttttagtagagatgggatttc

SEQ ID NO: 97870 - DNA, 12950 bp, Homo sapiens
agagggggcgcctttttccgccgccccagtcccagcggcatgagcagcgagaagtggggtcaccagaagatctgcaggacaggaagtggggctcagggcctgggcagaggccttgggtgcccctcccacactactcgaaccatacaggcccaaggaaatactcagagaacaaattggcctcggttgaaatcctcatctcttgtatagtgacaggacacttatataaaagtaataatagggctgggtgcggtggctcacgcctgtaatcccaccactatggaaggctgaggtgggcggatcacttgaggtcaaaactttgaaaccagcctggccaacatggtgaaaccccacctctactaaaaatataaaaattagccgggtgtggtggtgcgcacctgtaatcccagctacttgggaggctgaggcacaagaatagcttgaactggggaggtggaggttgcggtgacccaagatcgcaccactgcactctagcctgggtgacagactaaggctccgtctataaataaaataaaataaaataaaaagctcacacctgtaatcccagcactgtgggaggctgagacgggaggatcacttgaggtcaggagttcgagatgcctgaccaacatgtcgaaatcccatccctaccaaaaacacaaaaaaattagccaggcatggtggcgcatgtctgtaatctcagtgattcaagagggtgaggcataagaattgcttgaacccaggaggcagaggttgcagtgagccaagatcacaccactgcactccaccctgggcaaaagagcaagactctgtctcaataataataataataataataataataataataataataataccagctaggattattgctttgtgaccttccttgtgtgtttcatttgttgttgtgacagggtcttgctctgtcacttagactggagtgcagtggtataattaaagctcactgcagccttgatctcccaggctcaagggatcctcacacctcagtctctcaaatagctgggcccataggcacatgccatgaagctcagctaacctttattttatttttttgagatggagtctcactctgtcccctaggctggattgcaacggtgtgatcttgactcactgcaacctctgcctctcaggttcaagtgattcttgaagaagagaccctgactcttttttttttttttttttgagactgagtctcactccgttgcccaggctggagtgcagtggtgcaatctcagctcactcactgcaatctcttgcctcccgggtacaagcgattctcttgtctcagcctcccaagaagctgggattacatgtctgtgccaccacaccggggtaatttctacatttttggtagagatggggtttcaccaagttggccaggctggtcttgaactcctgacctcaagtgatccgcccacctcagcctcccaaagcgctgggattaaaagcgtgaaccactgtgcctaatgctcagctgacgttttaaaactttttgcaggccgggtgcggtggctcatgcctgtaatcccagcactttgggaggctgaggcgggtggatcacgaggtcaggaattcaagaccagcctggccaacatagtgaaaccctgtctctaacaaaaaaacacaaaaattagccgggtgtggtggcatgtgcctgtagtcttagctactcaggaggctgaggcaggagaattgcctgaaacctgggaggcggaggttgcagtgagctgagaccgtgccattgcctgggtgacagaatgacactccatctcaaaaacagaaaacaaaaaacaaaaaacaaaaaacactttttgcagagatgaggggtctcaatatgttgcccagagtgatctcaaactcctagactcaagcaatcctcctgcctcggcctctcaaaagtgctgggagtacaggaatgagccatagtgcccgcctgtaatcccagcactttgggaggctgaggtgggcagatcacctgaggtcacgagttggagatcagcctggccaacatggtgagaccccgtctctactaaaaatacaaaaattagctggccgtggtggcgggcgtctgtaatcccagctactcgagaggttgagacgagagaatcgcttgaacctgggaggcagagattgcagtgagctgagattgcaccactgcactccagcctgggcaacagagcaagactcagtctcaaaaaaaaataataaaaataaataaataaaagagtcagggtctcttattgctctgtccccaggctggagtgcagtggggtgatcacgataatggctcactgcagctttaacctcctgggctcaagccatcctccattctcagcctcccaagtggctagaactacaggcatgtaccatcacacccgactattttttttttttaattttattgtaggcctggtgcgatggctcacatctgtaatcccagcactttgggaggctgtgagcagaacacttgaggtcaggagttcgagaccagcctggccaacatggtgaaaccacatctctactaaaagtacaaaacttagctgggcatggtggcagacgcctgtagtaccagctactgggtaggctgaggcaggagaattgcttgaacccaggagacgaaggttggcagtgagcagagatcgtgccaatgcactcactccagcctgggtgacagagatagactccgtctcaaaaaataaataaataaataaataaacaaatataaatatatatatagagagagagagagagagagagagagagagagagagagacagagagagggagagagagagaaaggagttcttttttttctttttttgagacagagtctcactatgtcacccaggctggagtacagtggcgcgatctcggctcactgcaagctccacctccagggttcacgccattctcctgtctcaggctccggagtagctgggactacaagtgcccgccaccatgcccagctaattttttgtatttttagtagagacgaggtttcaccacgttagcaaggatggtctcgatctcctgacttcatgatccgcctgcctcggcctcccaaagtgctgggattacaggcgtgagccactgcgcctggcaaggaggtgatctttctctgttgcccaggctggtctggaactcctggcttcaaggagcttttggcctcccaaagctctggcatgacaggtatgggccaccgtgcccggcctgtgaccttccttaaccctcacaccacactgtaacacagggatcacgttatgctacaattatgcccattgaacagatgagaaaatggaggctgaaagcgactacgcttctattttcctctcagccacagtcactaacactgtgtgcaaaaaatttctgactctccccctttggaccaaacaggtggatggcacttcctggcctccttgtgactgggcagataaatgattatttctggcaaataggttgtgagaggaagtggcacatgacatttctgggctgaggcatttaagtgctggagcctccagagatctatctttcccaggcagggtgatgagccacatttgatatggtggcgactctatgaggccgggccctgaatgactacggtgaatggtgccccctgctgagccgcaatggaagtgtagcaggaagaaaaagcaaatctttgctgaattcagccactaagacttttggggttgttttctacaccacatacattttttttctgtttctttcttgctttctttctttctttttttttttttttttgagacagagtcttgctctgtcacccaagcagcagtgcagtggtgcgatctcagctcactgcaacctccgcctcctgggttcaagcgattcacctgcctcaacctcccaagtagctgtgactacagaagactcctgacctcaagtgatccacccgcctcagcctcttgaagtgctgggattacaggcatgagccaccgcgcccggcccgcttctttatttctctctttctccattctcccctcccttcaaacaattttttttttctttttagtacttactgtattctgtgcaccattttagatactgtcttcaataaaaaaagcaagatccctgactagggccaccatgttcagttacacaagttgtgtactgtgcaaaattactagaccaaggtggcaagtaggactgaaattcggtctgtgcactgcctgccaagctatatttcttggtgtggtgtctgccaggaggaagagatgcctttctttttttcttttttttctttctttctttttttttttttgagacagagtctgttctgtgttgcccaggctggagtgcagtggtgcaatcttggctcactgcaagctccgcctcccaggttccagcaattctcctgcctcagcctcccaggtagctgggactacaggtgcacgccaccatgcccggctaattttttttgtgtttttagtagagacggagtttcactacgttggccaggctggtctcgaactcctgacctcgtgattcgctcgcctcagcctcccaaagtgctgggattacaggcatgagtcactgcacccggccgaagagatgtctttctaattcactcacagatgctatataggctagctggggctctgcacatgacctccagaagtggacagtccggaagaggaaatgcacagggagcagggaaatgtgtaaatgtctaatataaattttttcctttattttcctttttttttttgacagagtcttgctgtgttgccaaggctgaggtgcagtggtgcaatcagagctcactgcacccttgccctcctgggctcaagtgatcctcccgccccagcctcttgagtagctgggaccacaggtgcttgccaccatgccctgctaatttttttatttttattttttagagacagggtcttgctatgttgtcccggctggtctcaaactcctgggctcaagtaatcctcctgccatggactcctaacgagctgggattataggcatgagccactgtgcccagcctcatataatttttaatagtgatatggagacaaagcaagacaagttctatagacaagatcagtgagggcgtctctgagcacgtgaagctgaacttgagacctgaaccacaggaggaagcattcatgcaatgatttggggcaagaacgtcccaagtagagagaacagccagtagaaaggccctgagctggggctgggcatggtggctcaagcctgtaatcccagcactttgggaggttgaggttgacggatcacatgaggtcagcagtttgagaccagcctggcctacatggcaaaaccccatctctactaaaaatacaatacacaggtgggcgtggtggtgcacacctgtgatcccagctactcgggaagctgaggtgggagaatcacttgaatgcaggaggcggaggttgcagtgagccgagatcacaccactgcactccagcctgggtgacaaaccgagactccatctcaaaaaaacaaagaaaagccctagccaggcgcggtggctcatgcctgtaatcccagcactttggaaggccaaggcaggcggatcatgaggtcaggagtttgaggccagcctgaccaacatggtgaaaccccgtctctactaaaaatacaaaaattagccaggtatggtggtgcatgcaaacctcatctctactaaaaacacaaaaattagctgggcgtagtggtgcatgcttgtaatcccagctactcctgaggctgaggttgcagtgagctgagatcacgccattgcactccagcctgggcgacagagcgagactcggtctaaacaaaaaaaaaaaaaagaaagaaaagccaagccctgaactgggcatgcaattggcatgtttgaggaacagtgaggaggcctggggggttggaacagtgagtgaaggggggatagtgagaacatgagggcagggaggtaacaggttgctatgttttcctgattttttttttttaatggggtctcactctgtcgtccaggctgcagtggagtgatgtgatcacagctcactacagcctcaaattccygggctcaagcaatcctcctgtctcaacctccygaatagctgagactacaggtgttcacagccaygcccagcyaatttttattttttgtagagacgggtctcactacgytgcccagaytggtccygaactcctgggctcaagcaatcctcccgccttggccttccaaagtgctgggattataggcatgagctaccacacccagcctgctatggtttggataaggtttgccccattgaaactcatgctcgaacaatcgattggctaacgaggtcgatgacgccaggcacaagatgctgggcctaccgcggtagcgtgagggaagccgtgcgttctgttccaaggcatctgtgagcccatggagtatacmccatgagcaaagctcaccctcctgagttgaaaaaatttacggacaagaagttttcattgaaattaaatggtggcagacatgtccaaggaatattgcrgggatttgatycctttatgaaccttgtgatagatgaatgtgtggagatggcgactagtggacaacagaaaaatattggaatggtggaaatacgaggaaatagtatcatcatgttagaagccttggaatgagtataaataatggctgttcagcagagaaacccatgtcctctctccatagggcctgttttactatgatgtaaaaattaggtcatgtacattttcatattagactttttgttaaataaacttttgtaatagtcaaaaatgytttttcagatgttctgaatatacaatattagctctcattccaattttttctaacatgaattttcctggttgacattgatttcaaagggttttatgtattaaagtgacagaatcttattaaatgtgaaacatggcaaggagaaaaaaaaaaaaaaagaaactcatgctaaaatttgatccccaaagtggtggtgcggtgttgggaggtggggcctagtgggaggtgtctgtgttatggggccagatctctcctgaatggcttgaagtagctctggaagcaatgagtgcttgctctcaagagcccggattagttctccagaacttacagtagttggccaggtgcagtggctcacacctgtaatccctgcactttgggaggccgaggcgggcggatcacgaggtcagcagttcgagaccagcctggccaacatggtgaaaccccgtctctactaaaattacaaaaaattaggccaggcacggtggtgggcacctgtaatcccagctactggggaggctgaggcaggagaattgcttgaacctgggaggtggaggttgcggtgagtcaagaccgtgccattgcactccagcctgggcaacagagagagactcagtctcaaaaagaaaaaaaagaaaatacattagttaggccaggaacggtggttcacgcctgtaatcccagcactttgggaggcagaggcaggcggatcatctgaggtcgagagttcgagactggcctgaccaacatggagaaaccccatctctactaaaaatacaaaattagctgggtgtagtggcacatgcctgtaatcccagctactagggaggctgaggcaggagaatcgcttgaacctgggaggcagaggttgaggtgagctgagacagtgccattgcattccagcctgggcaataagagcgaaattctgtctcaaaaagaaaaaaaaggccaggtgtggtggctcacgcctgtaatcccagcactttgggagtccaaggcgggtggatcacgaggtcaggagatcgagaccatcctggctaacacagtgaaaccccgtctctactaaaaatacaaaaaaaattagccgggcgtggtggcacacacctgtagtcccagctactcgggaggctgaggcaggagaatggcgtgaactcgggaggcggagcttgcagtgagccgagatcatgccactgcactctagcctgggtgacagagcgagactccatctcaaaaaaaaaaaaaaaaaagaaagaaagaaagaaagaaaatacattagttaggccgggtgcaggggcggtggctcccgcctgtaatcccaacactttgggaggccgaggcgggtggatcacctgaggtcaggagtttgagaccagcctggccaacatggtgtgagccaaagaaggctggtgtgagccactgcgctcagcctatattttcttatgtaaaagggacttcctggtgcctcctatccaatggtctcttccagggggccatgctggattcagcttggccgcatccaatcttttttttttttgagatgaactctcactctttcacccaggctggagtgcaatggcgcgatctcggctcactgcaacctccacctcccaggttcaagcgattctcctgcctcagcctcctgagtagctgggattacaggtgcgtgccaccacacctggctaatttttgtatttttagtagagatggggtttctccatgttgaccaggctggtctggaactcctgacctcaggtgattcgcccgccttggcctcccagagtgctgggattagaggtgtgagccactgcacccagcctgcacctagtctcatgtatccatttgttcatgcatccattcgtctgtcccctaacacaccctctcatctcacctggtccatctccatgatcacttacctaaactagtgtggttgcctcctgtgggtttcccagcttccaccctcaccccctacgacttcttgtccagacagcagccagaatggtcctgtaaaacataagtcatgtcgcatttgtctctgctctgacccctccccgggctctgacctcgctggaaagaaaaatcagtgtcggccgggtgtggtggctctcgcctgtaatcctaacactccgggaggccgaggtgggcatgagccaccacgcccagccatatattttcaaaattagccaggcgtggtggcgggcgcctgcagtcccagctactcggaaggctgaggcaggagaatggcatgaacccgggaggtggagtttgcagtgagccaagatcgtgccactgcactccagcctgggtgacagagtgaggctccatctcaaaaaaaagaaaaaagaaaagacccctcatcatccctccaattccgccagctctacgcactgggaggcaggaaactaaaaacatgaatctggaacctggcttcatctcttaatagctgtgtgactttgggcaagggtcttaacctctctgagctccaaggaaatcatgcatgtgcttggaacagtcctggcacacaataagggttgcataaatattggtgacaattactgctactgccatcttttgtttttttttttgagacggagtctcgctctgttgcccaggctggagtgcagtggcacgatctcagctcactgcaagctctgcttcccgggttcacgccattctcctgcctcagcctcccgagtagctgggactacaggtgcccgccaccatgcccagctaattgtttgtatttttagtagagacgctgtttcatcatgttagccaggatggtctcgatcccctgacctcgtgatccacctgcctcggcctcccaaagtgctgggattataggcgtgagccactgcacccggccttgctactgccatctgtaccaagattcaagcttcctccttttcccaagatccctacatcctgaccaccaattcccagcctccttactctctctctctgcccaccccactgccctggttcatgccagcttccgtgtccccacccgtgaggaggcattaacagcagtgaggaaagtgagtgagtaatgaatctgcctgccacggccataagaggcttcgtggcctgggttcaaatcccacccctgccacttaccagctgtgtggctggggggcaagtcacttcacatcacagggcctcagtttcttcatctgaaaaatgggtggaattcctgtcactctcaaggtggttgtggaaatccaaagagattacccacgtatcccatctacactctgcctcagactccatttaaggacgctgttgtcattactatgggtgtctcctcctctgccctgccctgcccaggaatatcccaaccctctctgcctgccaatacctactccaggcccactcctccatgaagcctcccaggcttgccccagcatgctggaactgcccctgtggtacagatggctcaggcccatgaacttaattgcatgctgccctggcagaactcttgtcttccagcttcaggctgtcatttaacttcatgtctctattttaaaacgtaaaccagatggcatcactgccctgcctgaaactttacaacagtttcccaccttctggaagaaaaactgcaaactccttactgtgacccacaaacccctgcagaatcgctgctctgggttcatcttctgctccaaccatgtgattccaaacttggtccagcctaaagaccttggccttgcccatctctctctcttttttttttttcgagatggagtcttgctctgtcacccaggttggagtgcagtggcgccatctcagctcactgcaacctccacctcctgggttcaaacgattcttctgccctagcctcctgagtagctgggattacaggcacgcaccaccacatccggctaatttttgtatttttattttgtatttgtttatttttatttatttatttatttttgagacggagtttcattcttgttgcccaggttggagtgcaatggcgcgatcttggctcaccgcaacctctgcctaccgggttcaagcgattctctcctgcctcagcctcccatgtagctgtgattacaggcatgtgccaccacgcccagcttattttatatttttagtagagacagggtttctccatgttggtcaggctggtcttgaactcctgacctcaggtgatctgcctgcctcggcctcccaaagtgctgggattacaggcataagccaccacgcctggcctatttttatttttttttgagatggagtctcgctctgtagcccaggctggagtgcagtggcacgatctcagctcactgcaacctccgcctcccgggttcaagcgattctcctgcctcagcctcctgagtagctgggcttacaggcgtgcgccaccacacccagctaattttcatatttttaggagagagggggtttcaccatgttgatcaggctggtctcaaactcctgacctcttgacccacctgtctcagcctcccaaagtgctgggattacaggggtgagccacgcccctagccaatttttgtatttttagtagagacagggtttccccatgttggccaggctggtctcaaactcctgacctcaagcaacccacccgcctcggcctcccaaagtgctgggattacaggcgtgagccaccacgcccggcccccttgcctgatctttgctgggctggcaccccttgcccacaactactctctacagtaccacccgctcatattttattcatagcagttagtgccatctgaaattatcttctttatttacttgctaacttgtttgttggctgcttccttcctttcagagtgccaactcctcaaaagtagggattttgttttgttcactgttgcattttctgtgccaagaacagtgcctagcacatgcacgtagcaggtgctcactaaatatttgtagactgagtgaatgaatgtgtctcaggtcctcgttctgattgctctctgtgctccccatccttgaaacagccccctaaacatgcctgctgtgcggttgccaactgtcctaggctccccactttccctggctcccctcacacctgaacacagagatgaagagccacttcagcccggatattgagtgtttgggctggaatttcagcatcctcaccccctcatcctgggaagggcctgaaacttagcaaccccacggccacacagaagcagtgtggccagcaggaggaggggaagggggttcctgggagcacacagaagctaggggaagggggaaaccacgcccaggctccccgttccagcacagtgttgctttggagagaaggagggaaagaggcctctgattcactcttgaaaaaccggctcctgggtgtttccggggagaacgcctacttcccagcctcggcccaggttgccaggggggaacccagtgggcccagaccccagcatcctggccccctgcagacgccactctcttctctggacccaggtagttagacctgccctctccagctctggggagaagggaaaggagggcagcttcctgtttgagtggctggtaaagcaaaagaccagcaggtgtggccctgatgatgagtacggggtagggggtgggaggggtagggggccggagctactcagcaacaactgagccgtggagttattggtatccagtctagtgggtgtgactccagttctggaccctggggcatgagttccagtcccagatgtgccagttactagctgtgtgaccttgggcaagtcactccacctctctgggtaggctgcctcaccttttttacaagaaggcacagcacctcccatgaggtgtttagagtcaattatcctcatggtaaatgcctgacacggaagctctccaataaatgctagctgaggtggagtttttcatgacgattattattcagaccgtggtcctcactgcgtcccccccaaggccctggagggttcagacgcggttagctcaggggaagtgcccaggaaagggtcagaaacactgaccccgcgcctgtccacgctgggatggggacagtccagccgggggacggggggaggggcaagcccagaaaccccagcccagcgttgggaggcgtttgtcccctgcccgccagcaggaagggagctgcccccaccaccccccacccccgcttcccctgggaaggggc

SEQ ID NO: 97871 - DNA, 39535 bp, Homo sapiens
cggccacttctgctcagctatcctcgaggttgcttatataccatctatttataaccccgcccccccaccccacgtcacccgccccctgccagggcaaccagtgaactcagtgtccatggggaaggggaagtgggttactaggtgctagagtttgtttggggtttgggggtgcctctgctgcttcctgaagggcttcatttcctagaagctgagaacactgagctgacagatcaaccccccttccttcccacagtgggtcatggggccaaggaggaagaagaggaaccaggtgctggcaccccaggtcgcaaacacatgcactccccctcagccccggagcacggggcctcgttgccttgtccctctgagccatcgcggcctctcgcttctgccctctttatgtttgggctcctcctggacttcccttcagcaccagagacccctgcagcccagaccccaggagactaagaggcctgggtggtctctgggatgggcggggaggcacacatgtgcaggactggctcttccccactctgctccagggccgaggccccaaatagctggacttctatatttagaagctggctcagcagcaccagggaactataaatacagcccagatcagtgcagcctccaaaatccccaggccaggctgggatgagtagggagcaaggagttagggagatgtcagtggggccagatggggtctgcagtgagggccccctgggccaggtgcacactgacaggccaggctcccggaaacccaggtgttcagcctgctggaggagacaaacagaccatagtgggacctgcccccggtgggggatcagggttggccagcgggcttcccaccctctttcccgttctctggggcttcctggcacagggacagctgtctggtctcacaatagctgcgccgccctcctggagccagctgcggggctcatccgtgtgggggctgcccggccccttcctctgccattgtctcccagccagggggcatcctgttatgcccccctccacccggagaccccatctgaccccccgcctcagcccaggcttgtgcgggtgctgggcaagggctggcggcataagaagccggggagtggggcgttggggtctcctggtgtccctccctgttgcagagggcagcaaagagacagttcaccccgctctgggatcatcctaaccgcggctcctgttgtttattgagcgtccatgcccacctacacttctgcaatgtgttccctccagtctggtcttcacgggcacctggagaagttctgaccatttcacagatcgggaaactgaggcccggaaaggccacatcacctgcctgagaccacacagcccaaaagggagctctgggcgtggtggcttacgcctgtaatcccagtacttttggaggctgaggagggtggatcacctgaggtcaggagttcgagaccagcctggccaacatggggaaaccccgtctctatcaaaaatacaaaaaaattagcctggtgcggtggcaggcgcctgtaatcccagcttactcaggaggctgaggcaggagaatcgcttgaacccgggaggcggaggttgcagtgagccaagatcgcgccactgcactccagcctgggcaacaagagcgaaactccatctaaaaaaaaaaaaaaaaaagtaaaaaaagttagccaggcatggcggcacgtgcctgtattcccagctacttgggaggctgaggcgggagggtggcatgagtccaggaggtgcagtctgcctcaagccataattgtgccactgagttccagcctgggcaacagagacgctgtctctaaaataataataataaattaggctgggcgtggtggctcacgcctgtaatcccaacagtttgggaggctgaggcagtcggatcacctgaggtcgggagttcgagaccagtctgactaacatggagaaatcccatctctactaaaaatacaaaaaaaaaaaaaaaaaaagaattagccgggtgcggtgtcagatgcctgtaatcccagcttactcgggaggctgaggcaggagaatcacttgaacccaggaggtggagggtgcagtgagtcgagatcgcaccattggactccagcctgggcaataagagtgaaactccgtctcaaaaaaaattatactaatatattataattatattataataattattatattatataatataattattattattatattatataatataattattataattatattataataattattatattatataatataattattactatattatataatatattataatgttacatattatatattataattattatacgattataataattattagattatataattatattatataataattattatactataattatattatatgactataattcttagattatataataattatattatataataattattatactataattatattatataataattattatacataataattctattatataattattatcatactataataattatataatataattattttatactataataattatattatataattattattatactataataattatattatataattattattatactataataattattattgttggttggataatcttgggttgcttcttttttttttttttcttttttttgagatggagtcttgctctgttgcccgggctggagtgcagtggcgcgacctcacgatctcacgatctcagctcacagcaatctacgtctcctgggctcaagcaattctcctgcctcagctgcccaagcagctgggattacaggcaatcttgggttacttctgagctgagcaacctggggccagtggctcaaaacgcccaggtgccagtttcccttttgacaaatgaggaccatgttcccgcccctcatcattgcagaacaaaagtcatgaggttgtccagaagctgcaaaataggtcagcaggactgagacttcaggacaaagagaaagtggagaaacataggcagacgccccggcagggaccagatcagcgaggctgaaggaggcttcctttagctgggcggcagcggagtggagtggcaggagtactactaatttgcatggtttaccatatagggccccactcagcacaggctctgtgctggtgctctgcagagaaaaagacaaaagtcactcagggggctgacagcctaatgcggctcgagggcagattgttgcaagggaagaagggagatggtgagaagtattggagagactcaagaaagccgccaggaatggtgactcacgcctgtaatcccaacgctttgggaggctgaggcgcgtggatcatttgaggtcaggagttcgagaccagcctggccaacatgatgaaacttcatctctactaaaaatacaaaaaactatccaggtatggtggtgcatgcctgtaaccccagctgcttgggaggctgaggcaggagaatcgcttgaatctggaaggcggaggctgcagtgagccgagatcgtgccactgcactccagcctgggctacggagagactctgtctcaaaaaataataataatgaaaataaataaataaaaattaaaaaatgaggacctggttgtgctcacctggaatcccagctactcgggaggctgaggtgggaggatcgctggagcccagcagtttgaggctggaatgagctatgatcgtgccattgcactccagcctgggcaacagcagactctatctctaacataaagtaaaataaaataaaataaaaaagtgtcgatgatcactatgaaggggtgtagggacaatccctggcatcaggaagcgcctcctgcctccctgagattctgcagacaccagctgtctgacgtgcccatctgatctgcagagaagggacgttgagccctggggttctagctggagtttctgactttctgagaaaaaaagggcaaaatccctccagagctggtctggccctctctccttccagcttctgctggtgttcattcccctcccccacagcccaggccacccccacaggagcccaggacaggaaggggtaaattctaggactggggatgtttgattattcccaggacaatagttctgtgacttcagtgattagtgactttttttccccatcgctgcaatctccccctttgaacaattgaactatattttgcttagcattcatcacttctgcatcttgaatttattcatgtaacaaggagacttgatttcggcatcctcactgaaaaaccctcctcattgccccaaatagtagggaaacctaaaaataaatgtgaatataaggaactcaaaaccaagtccttgaattctggctggacacagacgcctgctaagcctcagggtcacggaggcgctaaagacatgttagtgcccagtagagactttcccctgggctcattgtagggactctggggctgggctgcccgcctatggatcttctcagctgggtaggtcacttgtgcctcagtttcctcctctgtcaaatgggaatgacaacatcattgcagatgttttgaggagtaaatgagttaaaatagattaaaaaaaaaacaaacttatgaccaggcctggtgcagactaagtgctctataaataatagcattttcttggcagcatagcgagagcttgtcttaaaaaaaaaaaaaaaaaaacttaagaaaaaactagccaggcgtgatggtgcacagctgcagtcccagctcctcaggaggctgaggcaggaggatcctttgagccctggagtttgaggctgcagtgagctgtgatggtgccactgcactccagcctgggtgacagagtaagatctcttaaaaatatatatagcgtttgtttgtttgtttttagacagtttcactcttgttgcccaggcttgagtgcaagggcacaatctcagctcaccacaacctccgcctcctgggttctatcagtcctcctgcctcagcctcccaagtagctgggattacaggcatgtgccgccacacccggctaattttgtatttttagtagagacagggtttctccatgttggtcaggctgagtctcgaactcccgacctcaggtgatccacccacctcagactcccaaagtgctgggattacaggtgtgagccaccgcacccagccaaaaaatagcgttttaaaaaattatgaggtagctcaagagacaagctaatcatgtgatttatccagaaaggaaagaaccctcctatcacatgattctctgttgattaacgaagaggcctctgaaatataagtttcccacagggggaaactggcttagaaagatcagaaagatccaggaggtctgctctgtgcggtgaagcttctcttcttggcacctgcctggcatcggaagagggccccttctccctccctgggcttttatgtggacactgtaatgcctcagttttctttctttctttttgtttttgacacaggatctcactctatcacccaagctggagtgcagtggcaccatcatagctcactgcagcctcaaactccccagctcgggtgattctccccgcctcagcctcctgagtagtagtagctgggactacagatgtctgccaccagcctggattatttatttatttattttgtagaaacaagagtttcgccatgttgcccaggctggtgtcaaactcctgagctcaagcgatcctcctgcctcggcctcccagagtgctgagatcacaggtgcgagcctctgcacccgacctgtttcctcatctggaaaatggcagggaaacgttctgccagctgggacgcaggctctgccaactctggcatgccaaagctctgggcacagggcgagtcccaccagcgtgggcgtccagagctatttctgacaagacccctttgcgcctgcccagggaagagccaagtggccccaggcaagaccgccccgcccggctgccacaccttcccctcagagcagccagccccaacacagaggccaaagggttcgtcagagccacatggtggaaactctagcagagggtttttgaaagcaggttgcacttcattcttactgagtgcacgtgtgtgtgtgtgtgtgtgtgtgtgtgtgtgtgtgtgtgtatgcagcgcccctgggtctgtgtttttattgcactttcctgctggcttccagctgcaccgccagttccggggagggccctgggccagcggctgtccgcccymsctccttcataaagtcctggcctcgggacagcctgcacagctgccyagcctgyggagacgggacagccctgtcccackcactctttcccctgccgctcctgccggcagctccaaccatgggaggccgcgtctttctcggtaagtactttggggccccgctgggaggggcgaggaagctccagcgggaccccttggctgcgtctgagaaacgggaggcgccgctggtgtctgtggggcctgcgatagaggaagccacatggtcaagcaggcactcacgggcacacggcgagaggggctggtggtgcttgggcacccccacaccccggcaggaactccagggtgctctyggagcctgctaccctgcctggagggatcctcaagctttctactggagccagtctggcatctgctccmtaagaggggaaactgaggcacgggggaaggaaaggggcaaaaagtgagtgctgggaccctgagagccgctgtgcttaatataacgcatagaaggacatgggcgggggtggggaagctagaagccaggacttctccactgcaaggtacccccaatttgtccctcgcagtctcagcagcaggggcagcccccagagaccccagttcttgctccccgcagacctggctggggctcagctgcggatcgaagggactttgcctggttctgggtttgaatttgatttttgttgtgacttcctgggactccctttcccgccccacccaaggtgactgtaacggttatcagggtagctcgttgcctaagcaacggggcaacaaagagagtgaagaaatgacatttggggcaaaaaccagaacttcctggaccacagggacacagcttccctgggccagccccaagtggcaggtgtcagctcagcaccccgccttggcttgagagtgagagacaagagcccaccttgggtttcttgggggcacacttgttgggggcagttgccaagacctggcttcccaagggttccacgccctggctgtctgtgtcaccagggccaagtcagagagcctctgcgcctcacttttctcatctataaaatggagcacaacccgtctccgtcttagattgttttaagggatgagtgagttaggacacaaactattcctggttcacagtaagaattaggtaaacagcattttaaaagtgttggctgggcacagtggctcacacctgcaatcccagcactttgagaggccgaggcaggtggatctcttgagcccagggactggagactagcctgggcaacacatcgagacgttgtctctaccaaaaacaaatttttttttttttttttgagacaaagtctcgctcttgtcgctcaggctggagtgcaatggtgcaatctcggctcactgcaacctccgcctcctgggttcaagcgattctcctgcctcgcccccatccaccccgagtagctgggattataggtgcctgccaccatgcccggctagttttttgttttagtttttgtgtttgtatttttagtagagacggggtttcaccatgatggccaggctggtctcaaactcctgacctcaggtgattcacccgcctccgcctcccaaagtgctgggattacaggcatgagccaccgcgcccagccaaaaaaaattttttttaattagtcgggcttggtggtgtgcgcctgtagtcctagtggctcaggaggctgaggtgggaggatcccttgagcccaggaggttgaagctgcagtgagctgtgtttgcaccactgcactccagcctgggtgacagagcaagatcctatctcaaaaaataaattaataataaggccgggtgcagtggctcacacctgtaatcccagcactttggtaggcccaggccagcagatcaccagaggtcaggagttcgagaccagcctggccaacatggtgaaactctgtctttactaaaaatacaaaaattacctgggtgtggtggcgggcgcctgtaatcccagctactcgggagcctgaggtaggagagtctcttgaacctgggaggtggaggttgcagtgagctgagatcacgccactgcactccagcctgggtgacagtgagaccctgtctcaaaataaatgaataaataataaattatgatgattattaaattctggtaagacactagtgggtctggggaattgtctcggggtccttaggaggaagcctaaagaaggggtgactgccccaccaccccccaccccaggatctcaatgcaggaaactgactacttagggctcagcccagagaatgcaaaccagaaggaactcaaaccagaacagcagcttctctcccggcttctgtttgggcaacttccaaggccccagatggaggcagctgggccctgtagcctcacggtgggagtagagaacccagctcagcccatgcagaggggatggggcacaaargaaccctgcccagggccctgaggacctcaatccctcaattcctccttccccaacctcttctgtttattggattcctcctgatccttttctgggctccaagcctcagtttctctatctgtagaatgggcatcaacacagcccctgcctcctagagtggttctgagctttaaaggagttacctggggctttgggagttagagatgaatctgcctagatcctgtcctgccaggggaggtcattttgtggtctgttctgcaaagaggaactgggttctggccgagggaggaactagccaagccttgtggccagagaggaggaagaggggaatcctgacagaagtggggagtacgggcttgggctggggggtttcggccttggtttaacccagctggaaggagtgtggaggtgggagtggggatctctgccttccacccacctaaggggtactaaatttgaacacagtggctgagtggtccggggacctccaatctgcaccccaaacacccgccctctgaagctgtgctcataacagaccccaaaattcccctggaagcccctccagggttgaattggggcaaatgagtggtgagtcattccttcccttaggcccaggaagtgactcatgcccagccgttgtcctggtccccatccctctgcccgacaccccccttcaggtctccctggattattggggtccccagtattcccagatcggcagggactggacgtcccctcccagcccgccccaggccccacctgccgctcatatcccaacgccctcccttcccctctgtttccatccaccctcctttctcatggttttctttcttcctcactgtttatctctctgtctctctgttctctctgtcccatctcctcctgtttccccttctgctctttatgggccccttgtttctctctccacctctctctatcaccatgtaatttctgtctctctgtctgtctctatctctccgtgtctctgtctcctctgtcttmtmtttctctagctgtcttctttctcctctctgtctccctctctctctccagcttgtctcctttctcctctctgtctccgtctctgtccctctatctctctgtctctctctctctttgttcttttcttttctttcttttttttttttttgagactcttgctctttttttttttttttttttttgagagtcttgctctgttgcccaggctggcgtgcagtggcgggatctcagctcactgcaacctctgccttctgtgttcaagcgattctcctgcctccacctcccaaatagctgggattacaggcgtgtgccaccatgcccggctaattttttgtatttttagtagagatggggtttcactatgttggccaggctggtctcacactcctggcctcaggtgatccatctgcctcggcctcccaaagtgctgggattacaggcgtgaaccaccaagcacagccccccaccttctgtctctctgtctctttgtgtctctgtctctctttctgtgtctctctttctttctgactctttctctctctctgtctgtctctctctctctctaatctctattttctctccacccctgcttctttgtctctatctctctggtgaacagcaaggagatccctaggtccccatctctgaatcccctggtgacctgaggagggtcccccagaacatgccttgggagggggaaccccctgagtgctgggaaccgccactccacgtgcaccccaacaggcggctacagcgtcttcctgtgggaggggggcccgggggtgaaatatcaccactgggttccaggacagaccgccagggccagtggcagttgtgggtgtggtgtgtgtgcacctgtgtccctgaggaagcgtggaggtccagggcatctcagagcctgggtgatccaacaccgtcatttttttttttttttttctgagacggagtcttgctctgtcactcaggctggagtgcagtggcgtgatcttggcttgctgcaactctgcctccttagttcaagcgattctcaagcctcagtctcccaagtagctgggataacaggcacccaccaccacgcccagctaattttttgtattttcagtagagagggggtttcaccatattaggcaggctggtctcgaactcccgatctcaagtgatccacccgcctcggcctcccaaagtgctgggattacaggcatgagccactgtgcctgaccacgccttcatttttacctaaagaaatgaagatggcaggcagggcctggcggcttgtgccagcactttgggaggccaaggcaggtggatcacgaggtcaggagatcgaaaccatcctggctaacatggtgaaaccccttctctactaaaaatataaaaagttagccaggcgtggtggtgggcgccagtagttccagctactctggaggctgaggcaggagaatggcgtgaacccgggaggtggagcttgcagtgagcagagatcacaccactgcacttcatcctgggcaacagagcaagactccatctcaaaaaaaaaaaaaaaaaaaaaaaaaagagaggccgggcgcggtggctcacgcctgtaattccagcactttgggaggctgaggcgggcggatcatgaggtcaggagatcaagactaccatcctggctaacatggtgaaaccttgtctctactaaaaatacaaaaaaataagctgggcgtggtggcgggagcctgtggtcccagctactcgagaggctgagacaggagaatggtgtgaacccgggaggcggagcttgcagtgagccaagtttgcaccactgcactccagcctgggcgacagagcaagactccgtctcaaaaaaaaaaaaaaaaaaaaagagaaatgaagatggcaggctgggcacggtggctcacgcctgtaatcccagcacttttggaggccaaggcgggaggatcacttgaggccgggagttcaagaccagcctggccaacatggtgaaaccccgtctctacaaaaatacmaaaaaatcagccgggcttggtggcgggtgcctgtaatcccagatactctggagactgaggcagaggaattgcttgaacccgggaggtggaggttgcagtgagccaggatcgtgccatcgcactccagcctgggcgacagagagagactctgtctcagaaaaaaaataaaataaataaataaataaaagaagaagaaatgaagatggcagtaaatgctcaggcacaccggacagcagtcatgtggtttactcccacacacactacactggggagtgggcgccatcatccctattctacagagggaaactgaggcagagaggcccactgtctgggatttgaactggggatgcctggctcctgtctgttttcttagccactccccacacaccccaggtcagaagagcagcagctggagctgagacccccaccaggctcatggcccttccctactcagttcctgaaactccaccctcaagccgagctcgggaggctgaggcggggaggatcgcttgaggccaggagttcaagatcagcctgggcaacagagcaagactctgtctgtaaaataattttttgaattatttttaggccggccacagtggctcatgcctgtaatcccagcactttgggaggccgaggtgggtggatcacgaggtcaggagatcgagaccatactggctaacacagtgaaaccccatctctactaaaaatacaaaaaattagccgggtgtggtggtggacgcctgtagtcccagctactcgggaggctgaggcaggagaatggcatgaacccaggaagcggagcttgcagtgagctgagatcatgccactgcactccagcctgggtgacagagtgagactccgtttcaaaaaaaaaaattatttttaattttttggcctggcatgataaattattttattttaaaaattttgagtcaggaaatgtggctcacgcctgtaatcccagcactttgggaggccaagacaggcagatcacctgaggtcaggagttcgagaccagcctggccaatatggtgaaaccctgtctctagtaaaaatacaaaaaattagccgggtgtggtggcagactcctgtaatcccagctactcaggaggctgaagcaggagaatcacttgaacccaggaggtagagattgcagtgagccaagatcacagcattgcacttcagcctgggcgacagagcaagactctgtctcaaaaagaaaaaaaaatttagtgcacacctgtggtcccagctacttgggaggctgaggcaggaggatctcttgagcctaggaattggaggctgcagtgagatatgattgcaccactgcactccagcctgggtgaccaagcaggagcctgtgtcaaaaaaaaaacaaaaacaaaaaaacccgcccctatgggaacagggtgacagactctttggctttgagcatctgagtgggacatgacatctgctcactctgaacgaccgtcaggatctgagcctgagaggggtcagcatcctcctcccacaaagtgcatcacccttacgcctcctttcccaccctgggatcccctctgaccccctttcctttctctgttgcagcattctgtgtctggctgactctgccgggagctgaaacccaggactccaggggtgagtctgctgggaagcagaaagcacagtccacagccagagccwggggagggycctggaccccygcccagcccccttcagcccagggaaagagaggsctcgcgcacgrgaaactcagcgcyctgccccatctccccsagtgccccctttttgtgtattcccttacccctcaccttctgaccgtgctccctgctcttgcaggctgtgcccggtggtgccctcagaactcctcgtgtgtcaatgccaccgcctgtcgctgcaatccagggttcagctctttttctgagatcatcaccaccccgacggagacttgtgacggtacagaggcttgagggcagcgcaggggacatccgcgattatgaggcattgcccagccagtgggggacagaggttgttgtgaggggccacagccttaccttccagactatcatcatggccagagaaaagaaaaagagggcaggcgtggtggctcacgcctgtaatcccagcactttgggaggctgaggcgggcagatcgtttgaggccaggagtactcagaagactgaggggagaggattatttgagcccaagagtttgaggctgcagtgagctatgattgcaccactgcactctagcctgggcaacagaatgagatcgtgtctcagggagagggagaggaaggggaagagggagagggggagaggaaggggaagagggagaggggtagggggagggagaaggggaggggaagggggaaagggagggggatggggagggagagggggaggggaagggggaaggggaggggaaggggaggggaagggggaaggggagggggatgggggagggaggggggaaggggaggggaaggggagggggatgaggagggagacggggaaggggagggggaggcagagggagaggaaaggaggcaggaaggaaggaagggaggaagggagggagagagataggcccggcatggtgggtcatgcctgtaatcccagcacttcaggaggccgaggtggacagatcacttgaggttgggaattcgagactagcctggccaacatggtgaaacctcctctctatactaaaaacacaaaaaattagccgggggtggtggtggtcacctgtaatcccagctactcgggaggctgaggcaggagaatcgcttaaacctgggaggtgaatgttgcagtgagccgagattgcgccactgcactctggcctgggcgaccagagcaagactttgtctcaaaaaaaaaaaagagagagacagagaaggagagaaagagaaagaaaagtaggcccggcatggtggcttacgcctgtaatcccagcagtttgggaggccaaggcgggcggatcacctgaggttgggagttcgagaccagcctgaccaacatggagaaacctcatctctactaaaaatacaaaattaaccgggtgtggtggcccatgagcacatgcttgtaatcccagctactccgggggctgaggcaggagaatcgcttgaacccgggaggcggaagttgcagtgagccaagaccgtgccattgcactccagcctgggcaacaagagtgaaactctgtctcaaaaaaaaagagaagaaaagaacaagagagagagggagggagggagggaaagaagagggagggagggaaggagggaggaaggaaggaaggaaggaaataagggaagaatatgaagggggagaagtaagaagtgaataggcatggcttcctggagagagagaagctgggtgctcaggaatctggagtctgtgcctcagtttacccttaagactggggagggggtacattctggctatgaggtttttttttccttttttttttttttgagacagagtctcactctgtcacccaggctggagtgcagtgacccgatctcggctcactgcaacctccacctcctaggttcaagcgatcctcctgactcagcctcctaagtagctgtgattacaggcatgcaccaccatgcccagataatttttgtatttttagtagagacggggttttgccatcttggccaggctggtctcgaactcctgacctcaggggatccacctgcctcagcctcccaaaatgctgggattacaggcgtgagccactgcacccggccgccatggggtttaaatttctacaaagagactggggatggggatgtggagcttcctgtccatccctcacctcagcactgttcactgtgtccaaatctaagatgccagccrgagaactaagatcaagtgtggtcttcaggaatggcttgctccagctgcagcatagcctgtgcagtgcaacttaagattttttccaaaagatactaagcagcaggccccatgttggggagtcaggatgggggtctctgccctgacagaactcacatctttgggaggtgactccctgtcctgttgtgttccagacatcaacgagtgtgcaacaccgtcgaaagtgtcatgcggaaaattctcggactgctggaacacagaggggagctacgactgcgtgtgcagcccgggatatgagcctgtttctggggcaaaaacattcaagaatgagagcgagaacacctgtcaaggtaagaaccaccccacgtcctctgactttccatccatgaggtttggggtcaccagagccattctggcagcatccagagagcagggccttggttgtagggtcagtgcctggcgtctgagatgggacaggtgcacatgtacctaccccaccaccccagagaggcagagtgatgtgaggattaagggctgactctgggaccagctgcctgggccaaatcctgataaccaagtgtatgacgttggccaggatacttattcagaaaccgctgtccacatgtgagatgtgataacgttatcatgcttgtaattccagtgctttgggaggctgaggcgggaggatctcttgaggccaggagttcaagaccagcccatagcaacatagcaagaccccacccctataaaaggggaggcgaaggcaggtagattgtttgagcccaggggttcgagaccagcatgagcaagcgggtgaaaccccatctctacaaaaaataccaaaaaaaaaaaaattaattagccaggcatagaggcctgcgcctgtagtcccagctactcaggaggctgaggtgggatgattgcttcaggctgggaggtcaaggctgcagtgagccatgatcaagcccctgcactccagcctgagtgacagagcaagatcctgtctctaaaaaagaaaaaatcaaaccaaagctttcttggaggcaggattttaaaaaattaaaaacattaaatgaaaaaagaactggccgggcgcagtggctcacacctgtaatcccaacactttgggaggccgaggtgggtggatcacaacgtcaggagtttgagaccagcctgaccaacatgatgaaacccccgtctctactaaaaatacaaaaattagccagacatggtggcacgcgcctgtaatcccagctaccagctactccagaggctgaggcaggagaatcgcttgaactcaggaggcagaggttgcagtgagccaagatcgcgccactgcactccagcctgggtgacagagtgagactctgtctgaaaaaaaaaaaaaaaaaaagataggttgggtgccatggctcatgcctgtaatcccaacactttgggaggccaaggtgggaggatcacttcacttgagtctgggagttcaagaccagcctgggtaacatttcaagaccccatctctacaaaaacaaaaatatagacaaggggaagaaagagtccttatcttttatttgttttgtttgtttgtttttgagacagagtctcactctgtcacccaggctggagggcagtagtgtgatctcggctcactgcaacctccgcctcctgggttcaagtgattctcatgcctcagcctcccaagtagctgggattacaggcgtgagccaccatgcccaggctgagtccttatcttttaaagataaaaacaaaagtagctttgacttttgttaaatatagaccttggacaggttactttcaccttgttaaaaggttaaagttactttcaccttgctaaaaggggagtaatggcatttacctacaaaagtatttaacaggctgggcacagtggctcacacttgtaatgctagtactctgggaggccgaggcaggtggatcatctgaggtcaggagttcaagaccagcctggccaacatggcgaaaccctgtgtctactaaaaatacaaaaattagctgggtgtggtggtgcatgcctgtaatcccagctactcaagaggctaaagcacgagaatcgcttgaacctgaaaggcagaggttgcagtgatccgagatgacagcactgcactccagcttaggtgacagagcgagactccatttcaaaaaaaaaaaaaaaatggctaggcgcgatggctcatgcctgtaatcccagcactttgggaggccgaggcgggtggatcacgaggtcaggagatcaagaccatcctggctaacacagtgaaaccccgtctctactaaaaacacaagaaattagccaggcatggtggcyggcatctgtagtcccagctactctggaggctgagtcaggagaatggcgtgaacccgggaggcggaggttgcagtgagccgatattgcgccactacactccagcctgggcaacagagcgagactccatctaaaaaaaaaaaaaraaatcacttaaaagctcctggcttgcagaatgcactctatcagcaatggctaatggggattttattgtaattctgatctgatgcgcccccaggatgggtatccgtagggtgcgagatcagagagcagctgcaaggctctacccctgcgcagaggccacagcctttgctatggtcttgcttgaggccacagctcaggccgggagaaactgggactccaggctttgcctattttccagggaagctggttgggcaggggaggggcttccaggattcacaggggcagatgggagccagcagtgggcagctgggagctgcgactcattcaaagagagggagttagtgcagggtaccgagatcaggaagaggagtggtgcagaggtgggaggtgatgagactcaagactacagagagaagaaagggccggcagcccagatcccagccccacccctcctgccctgcattcaggcagagcacagagggataaagagggaggtgggttgggggacaaggcagagatgcatatacctgggacgtacacctgcgtggagcccagaaggaggcttctgtccgccacactgctagtccccagggcccccttgcaagtggacatcatgttaccccacatgcatgtgacttggccagaggagacagagtcttcatgtgaactggaaaaagatccccctctcccggtggatacatttgacaaacaaaaagtgggctggttttcagcccctgctcatctcattggcccaatacctgtgcagtgagcaacctgcacagctgtacttggtgatcatggtttcctcccagggtgctctggctaggggtgccgcccacccactgctatgaaccccctgcatgggatggtggttgtggttatgaaggaggtgtgttgctgtgttagaaacaggcctgggctgagagaaggggactcagtcaggcagctgggcagagacatggacagcagggctgaggtgataagagggacctccacggacatcaaagcaggtgatggagccaacagcctgctggtttggagcaggacctatgaccagaggtgagacgctcagaggggcctgggcccctccctttaacccaaggcactccaggcttcgctattgcacctgaggacacgtgcacccagtgtcacagcccatggggcctgtgacatccaggccagagacctcgggcggctccctccactcctcacccccctgtctccaggcatctcagggccatcctaaacccctgatcacccgtctttgtcccaaccctgagactcgggacactccacaggaggccactttggaagctcrgaacatccccctgcccatctggcatcttatttgcataaaacaaaagggggctggcactcaggatatttcatgggctcatgacatggcgtgtggtggcgcattccagtacagtatccatcctctccgccatcgccggggactgccaggatgagacttgctgccaccggggctcccatgagctcagccacacctggaacccctctgacacccacacctaccataatgaaccccaaaaccctgtccagaaactcaggaggagggaatctcaaggacaggacaactgtctccagccagcagccttgcttggagaagatgcctcccgaccacctttctggccgtttagccctcatccatttccccatccaaggctccaccctaacccaccctggtaattcctsggcctgaasgcaccgtcaatgaccaaagcttgggaggatgctgtggccaggtgtgggcagcgtgatgtggaccccacaaatggattcagagggctgggtgccgtgactcatgcctggaatcccagcactttgggaggccaaggtggaaggwtcacttgaggtcgggaattcgagagcagcctgaccaacatggtgcaaccctgtctgtactaaaaatacaaaaattagccgggcgcagtggcacgcacctgtaatcccagctactcaggaggctgaggcaggggaatcgcttgaacccrggaggcagaggtcgcagtgagctgagatcacatcattgcactccagcctgggcaacagagagagacgctgtctccaaaaaaaaaaamaaaaacaaaaacgcactcagagggttggatgaaggaggcggctccagcctggactagccggcaagagacagcatcactggggaccatcgtcccaggcccgatcctctcctgtagtcagtcctggtctggaccactcaaggacagagatggaagcttgaaccccattcagcagggcccacaggtctctgtccctggtggaakgacaagggatgagaggacagatacatctgccacccctcacccatcggcacctgtgccctctctagccacaggcccccgctcacggccagttctgcttagatatggattctcaccaaatcctgctatttccatatccatagatcctttcctggggatcagaaaaaagcatctttgtagactcggggctgcctggctggacatcagcccccactgttcaccccagcctggtgcccactgtccgggcagccctagcctgtcccacatcatcccgcactctccccacccctgctattgccctgcatcgygggggcactggcttagggaggggtcttggtcyatgcccatgaagctgggctctcagagctagtgtggatgggagagcagcatcctgctagggccaccaggatgctgagaatttggccagcgagcggccgttctgtgggagtcaggccgagggccaccgttgggaaccaagacgtgtcctgcccaggcgcacggcatgtcccctgcatttggttctcaggaaggccccaccctggcctttgcccggaatccttaggctgggacacagatggctgggacaccccagcttggagytgcccaggaaggcagaggagaaggggaggacttggctgcttccagccacatctggacaacagaaggcctgagccaccaccctcaccataggatgcctctgtgtggattggaaaagggaggagacagtggtgccttccagatgcttccgtgccaggaaacatggcrgaccctcagcccygaaagctgctcacagctacgggcatccttcaccctctccttcctcttgcagatgtggacgaatgtcagcagaacccaaggctctgtaaaagctacggcacctgcgtcaacaccctyggcagctayacstgccagtgcctgcctggcttcaagytcawacctgaggayccgaagstctgcacaggtagaggccccaggaagacgccgtgaggctggaygggagctggggatggagctgaggcacgtcctccaaagcagccgaggaggagggggaagatccgcaggttcccacaaggtcaaggacctgctaagcccctgcctaaggattcacctcccaggaaggtcctgccacacggcagggaggcggcagggccttcagggctggagtgcccttgtgggcccccagacctcaccccttcctcatctgtcacgtgcgagtggaagaaggtgtcacttccagttctaagaaggggaatctccactatgaccagggagggagcagatgagagtttttagtttttagtcatggaaatctagctcccatgactcagtttcccttttggtttcacctcctataaactggggaccatggtccctgctgtgcccatctggtaggaagaccatcataagatgctttgaaggtgaagttgaaggtcaccaagtggcggcatgtgcaataatggtcttcagtctgaggcaatgaaaagataggggagtgggtgcagtgagtggagggcaggcccaggctggtcagggacagggtttgaccctctggctttgtcctcagatgtgaatgaatgcacctccggacaaaacccgtgccacagctccacccactgcctcaacaacgtgggcagctatcagtgccgctgccgcccgggctggcaaccgattccggggtcccccaatggcccaaacaataccgtctgtgaaggtcgagagctcagatcccacgtttctagcgacccacaaacatctgatcacatgttcaacggcgcccacacaaaccaagcagaatgagcgctggaggcacctggctgtgccaggcgttcgttcattcttctgaggctagatgagaaaagagcaagggtcctscggaaggagctggggtactgaggggggaggctcagggggaccccaggcaacagctgatgactcactgrgaggaaggcgtttcaccatattcataacctgctcatctgcacggggcccacctgctgtgcccaggcctctccacgcttccataacccagcgtccaccactccaaggggggcactaatgccrggaggaatgagctgggggcacagacaggagacaggaccctctccaggctgggacaggacctgacccccttcttcctgtcctcagatgtggacgagtgcagctcygggcagcatcagtgtgacagctccaccgtctgcttcaacaccgtgggttcatacagctgccgctgccgcccaggctggaagcccagacacggaatcccgaataaccaaaaggacactgtctgtgaaggtatgacctggccctagaagctccccacccccagcacacacactgacamgctcckgcctaatgagmcgcttgtcttgttccctacagatatgactttctccacctggaccccgccccctggagtccacagccaggtgagtggcccccacagggacgaggcggcgggaactccatccacacagcactgcatccgtctccttgttctaaacttcccacccgccgtccaggctctctgacccccacatctcctctctctgcagacgctttcccgattcttcgacaaagtccaggacctgggcagagactccaagacaagctcagccgaggtcaccatccaggtaagggcaggacgctgggggaccccaggacagtgtagaatcrgctagcggaggcttccatgtggccagagagagtgcccaacccaagcaggggcctctagtcagagacacacatgcgcataacatacacacaccacatacagtatgtgcacaaacatacacacccggacacgtgaagacacacgcatgcacacacacacaccaggtataatggcaacagagtgcagcacttaaggacctggagttgaggccgggcacggtggctcacgcctgtaatcccagcactttggaaggccgaggtgggcagatcacgcggtcaggagatcgagaccattctggctaacatggtgaaacccccgtctctactaacaatacaaaaaaaaaattagctgggtgtggtggcgggtgcctgtagtcccagctactcagcaggctgaggcaggagaatgacgtgaacctgggaggtggagcttgcagtgagccgaggtcgtgcagctgcactgcagcctgggcgacagagccagactctgtctcaaaaaaaaaaaaaaaaaaaaaaagagcctggagttgggccacagaagttcaaatccccccattgccacttcttgctctgtgatctaaggcaagtgacttgccctctctgggcctcggttttctcatctgttttgggggttgtggtgtgtttttttttgtttgtttgcgttttttttttttatttggaaacaaggtctggctctgttgcccattctggagggctgtgacatgatcatggctcgctgcagcctcaatctcccaggctcaagtgaccctcccacctsagcctcccaagtagctgggaccaaaggcatataccaccatgcctggcttatttatttatttaatatatttatagatgggggtcttgctatgttgcccaggctggtcttgaactcctgggcttaagtgatcctcctgcctcggcctcccaacatgctgggatcacaggcgtgagccactgtgtctggccagtttcctcatgggcaacacaggcatgaaagtaatgcctccttcatatagtcagtgtgaagggtaaatcaactaatagaagtaagactcagaacagtgcctgacacatgataagccttatataaaagctttcctggccaagcacggtggctcacgcctgtaatcccagcactttgggaggctgaggcaggtggatcaccagagatcaagagtttgagaccagcctggccaacatggcgaaaccccatctctactaaaaatacaaaaaattagccgggcgtagtggcgggcgcctgtagtcccagctacttgggaggctgaggcaggagaatggcgtgaacccgggaagcggagcttgcagtgagccgagatcccgccactgcactccagcctgggcgacagagcgagactccgtctcaaaaaaaaaaaaaaaaaaaaaaaaaaaaaaattagctggcgtggtggtgcacgcctgtaatctcagctactcaggaggctgaggcaggagattcacttgaacccggaggcagaggttgcagtgagccaagattgcaccactgtactccagccagggcaacaagagtaagattttgtcttaaaaaaaaaaaaaacagttttcccatatgtttttagcacagtagaaaaatgatgtgagccacttaacatcattttaacttttccagtagctagattatttagttagttagttttagagatacggtcttgttttgtcacccaggctggagtgcagtggcacaatcacagctcactccattctcaacctcctgggctcaagcaatcctccctcctcagcctcccaagtattaagagctgagactacaggtgtgagccactgtgcctaattttttcattttttttttttcttttttgtgagacggagtctcgctctgtcgcccaggcccggagtgcagtggcacgatctcggctcactgcaagctccgcctcccgggttcatgccattctcctgcctcagcctcccaagtagctgggactacaggcgcccaccaccacgcccagctaattttttgcattttttagtagagatgggatttcaccatgttagccaggatggtctcgatctcctgacctcgtgatccacccaccttggcctcccaaagtgctgggattacaggtgtgagccaccgcgcccagccattttttcattttttgcagagatgggggccttgctatgttgcccaagctggtcttgaatcctgggttcaagtgatcctcccacctcagcctccaaacgcactggaagtacaggcgtgcaccaccgtgcctgttgtctaataactacactttataaagtaaaaataaagttaaattaaagttaagattgcaggccgggcatggtggctcaagtctgtaatcccagcactttgggaggctgaggcaggcagatcgcctgaggtcaggagttcaagaccagcctggccaacatggtgaaaacccgtctctaaaataacaaaaaaaattagccgggcatggtggcgggcacctgtagtcctagctactagggaggctgaggcgggagaatcacttgaacccagaagtcggaggttgcagtgagccaagatcgcgccactgcactccagcctgggagacagagtgagacttagtctcagataaataaataaataaagttaagattgcatttaacctaatagatccaacgtattaaccactttaacatggaatgattttttgctttttttgttttgatctgagatcgtgccattgcactccagcctgggtgacaagagtgaaactccatctcaaaacaaaacaaaaaaaaaattacaaaaattagccgggtgtggtggcacgcttctgtagtcccagctactcagaaagctgaggtgggaggatcgcttgagtctgggaggtggaggttgcagtgagctgattatgccactgcactcaagcctgggcaacagactgagaccctgtctcaaaaaaagaaagaaaaaagaacaggaaatcaaaacagagcctggcaggcagcccgtgcccaaccagtgttaagcgctgtgattcatacgtgcatgcaggcaaatactcaatccgtcgcttgttttctggttactgcatcatctcagtgattcccttgtgcctgtgggtctccagtgtgtcccctggtagggggtgacatccaggtccttcaggcaacccctgtggtctgatgctccagcgattctgtcacccrccaccccctagaatgtcatcaaattggtggatgaactgatggaagctcctggagacgtagaggccctggygccwcctgtccggcacctcatagccacccagctgctctcaaaccttgaagatatcatgaggatcctggccaagagcctgcctaaaggccccttcacctacatttccccttcgaacacaggtgaggccttggcctggcctgccctgccccaaccctgggccccacctggtacctggggtccctaatcacaacygcccctctcccctcagagctgaccctgatgatccaggagcrgggggacaagaaygtcactatgggtcagagcagcgcacgcatgaagctgaattgggctgtggcagctggagccgaggatccaggtagcagcgrtggtctggagggggagcccgtgggagagagatggaggtgctgggatggggccagggtgaggttcagaatagaacaactgactgggcgcggtggctcacgcctgcaatcccagcattttgggaggcccaggtgggtagatcgcttgagctcagaagttcaagaccagcctgggcaacatggtgaaacccggtctctacaaaaaatacaaaaattagccaggtgtggtggcacgtgcctgtagtccccgttactcaggaggctgaagcgagaggatcaattgagcccgggaggtcaaggctgctgtgagctatgatcacgccaaagcactccagcctggacgacatagtgagaccctgtcttaaaaaaaaaaaaaagtccaggcacagtggctcatgcctgtagtcctagcaccctagcactttggcaggctgaggtagatggatcacccgaggtcaggagttcaaaactagcctggccaagatggtgaaaccccatctctactaaaaatacaaaaattagctgggagtggtggcaggtgcctataatcccagctacttgggaggctgagacagaagaattgcttgaacctggggagtggaggttgcagtgagctgagatcacgccactgcactccagcctgggcgaaagagcgaaactccgtctcaaaaaaaaaaaaacaaggaacaactagaaactgactcatcgggaggggctcctggcgtcatcgtggtggactggctgagcctgagctgggtcatcttgggagggaggatagagcatgggaggaggacaacgggagtaggcagmgagtgtgtctgttccccaggccccgccgtggcgggcatcctctccatccagaacatgacgacattgctggccaatgcctccttgaacctgcattccaagaagcaagccgaactggaggagatatatgaaagcagcatccgtggtgtccaactcagacgcctctctgccgtcaactccatctttytgagccacaacaacaccaaggaactcaactcccccatccttttcgccttctcccaccttgagtcctccgatggggaggcgggaagagaccctcctgccaaggtctctgctcactctgctcacttcctcaaagataacccagggccttcgcacatgctgggcctctctctgggatgctctttcccgacgtgactcagtcttttatgtttctggccttctgatttgggccttccccaacctcattacttatttatttccttactttatttatttaatttaattaattaatttatttattttaagacagagtctcactctgtcgtccaggctggagtgcagtggcacgttctcggctcactgcaatctctgcctcccaggttcaagtgattctcctgcctcagcctcccaagtagatgggattacaggcatgcgccaccacacctcgctgattttgtatttttagtagagacggggtttctccatgttggtcaggttggtctcaaactcccgacctcaggtgatctgcccgccttggcctctcaaagtactgcgattacaggcgtgagccaccactcccagactttcttttcttatttatttatatttttagacaggagggtctcactctgtggcccaggctggagtgcagtggcgcgattatagctcactgcaacctcgaactcctgaactcaaccattcctccagcctcagagttttgagtagctgaggctacaggcatgcaccaccactcccagctaatttttttatttttgatagagacggggacctcactatttttcccaggatggtctagaattcctgggctccagtgatcctcccacctcagcctcctgagtagctgggactataagcgtgcactactatgcccagttaattaaaaacaaaaaaattaatggagatggaggtctcgctatgttgccacagctggtctcaaactcctggcctcaagcgatcctcccaccttggcctcccaaagtcctggaattacttacaggcaagagccatcatcatccctggccaccttctaatgcactatctacattacttattcgttaggtttatgtcataatctgcctctcccacytttttttttttttttttttttttttttgagatggagtttcactcttgtcatccaggctggagtgcagtggctcattctcggctcagtgcaacctccacctcccaggttcaagcgattctcctgcccaggactcccaagtagctgggatttacaggtgcttgccaccaggcccagctaatttttgtattttttagtggagacggggtttcgccatgttggccaggctggtctcaaactcctgacctcaggtgatccgcctgcctcagcctcccaaagtgctgggattacaggcatgagccactatgcctggccacctctcccactcttatgtcaacctcacaagggtaggtacttgtgtgtgccctgttcactgctgtgtctccaaacctgttacattcagtaggcgctcggtcaatactcatctagtaaaaagcagccctcttagactcagcccaagcccaggacctaagagtgagctccaggccaacctttctgaccacccccatctgcccacaggacgtgatgcctgggccacggcaggagctgctctgtgccttctggaagagtgacagcgacaggggagggcactgggccaccgaggkctgccaggtgctgggcagcaagaacggcagcaccacctgccaatgcagccacctgagcagctttgcgatccttatggctcattatgacgtggaggtaagtagctggaggcatcctcaagtgcccacaggtaatgaggtccagctgcaaccagacaggcagctagttctccatggagccctactggttgctcagatatatctgcatggttgcacagcccaggtgtccccacgtcacacccttcgcagcctcttcctttggcctcttctctacaacccagcaactatacactgggtgcagccactagctccgctcctctgcctgtccatcccgtaccagttgtgagatgtcaactaaaagctccccatggagagcattccaagggggcaccacttgcccgtttttttttttttttgagacggagtctctgtcgcccaggttggagtatggtggcacaatctcagctagtgaggttcaagggattctcctgccttagcctcccgagtagccgagattacaggcgtgcaccaccatgcctgagtaatttttggtatttttagtagagacagggtttcaccatgttgcccaggctagtctcaaactcctgacctcaggtgatccacccacctcggcctcccgaagtgctgggcttacaggtgtcagccaccgcacccggcctctttttttttttcttttggacagagtcttgctctatcgcttaggctggagtgcagtagtgtgatcttggctcactgcaacccccgcctccggattcaagcgattctcctgcctcagcctcccaagtagctgggattacaggtgcatgccaccatgcaccgctaatttttgtatttttagtagaggcggggtttcactatgttgggcaggctggtctcgaactcctgacctcaggtgatctgccccccctcagcctctcaaagtgctaggattagaggcatgagccaccacacccagcctggagcaccactttctgtacgtgacttcagtaggatccatcgttaagctgggccttgtcgaaaactgcaattaaccaggcagagaaggggggcgcctgtggtccaggccaaaggcccagcaagcacaaaaatgtgaaatccctagactccccttccagctggtaagtgtggccagatctaggagggacaagggaggaggtcagagaggtgggcccgtcaaagtgtgggggggaaaagggaccacaaagagggcaggaaggcctcatgccctgaaggaaccctgagcacccggtgccactcctaggactggaagctgaccctgatcaccagggtgggactggcgctgtcactcttctgcctgctgctgtgcatcctcactttcctgctggtgcggcccatccagggctcgcgcaccaccatacacctgcacctctgcatctgcctcttcgtgggctccaccatcttcctggccggcatcgagaacgaaggcggccaggtgaggtcccgccccgctccctcctgagctctggggtcagggaggcctgggaggggttagccccgcccactcccggggctcagtcgggtaggcgggccctggaggcatgaggccccgcccctgtccgggatctggccccgcccacckgggggtcgggttgtctctttaaagggcgctggctttggagctgcctggccacaccccgagtgcccgctcgcttctgagcgttgttgggggtgggccctggggggaaacctggcccccgctccagacccgcccaccctccggctgtggtcccgcccactctcgggacctggcaggcgactggctctggcgccgcatgcccctccccgcgctgacgtcgctccgcccctccgtccccgccccgcaggtggggctgcgctgccgcctggtggccgggctgctgcactactgtttcctggccgccttctgctggatgagcctcgaaggcctggagctctactttcttgtggtgcgcgtgttccaaggccagggcctgagtacgcgctggctctgcctgatcggctatggcgtgcccctgctcatcgtgggcgtctcggctgccatctacagcaagggctacggccgccccagatagtgagtgcagcgagatggggcaggaggaaggcggggtgctgggcctggggctcacaggcagtgccacacacaatgtccggccgccctcckttccgctcctggcttcctggggcactgatgggacccctcccttccctcctagctgctggttggactttgagcagggcttcctctggagcttcttgggacctgtgaccttcatcattttggtaagtacccactctycctccaccgaagcccgagcgccacaggcccaggcccggctggaccatcgctctcgccctctaacccacaatctgctccctgcccagtgcaatgctgtcattttcgtgactaccgtctggaagctcactcagaarttttctgaaatcaatccagacatgaagaaattaaagaaggcgaggtgagaggagaggctggaaggacttggaggcggggccggggtgaggggcatgaagctggaggtgaggtgggggcccacgctgcaaccccgctcctcgcagggcgctgaccatcacggccatcgcgcagctcttcctgttgggctgcacctgggtctttggcctgttcatcttcgacgatcggagcttggtgctgacctatgtgtttaccatcctcaactgcctgcagggcgccttcctctacctgctgcactgcctgctcaacaagaaggtgggggcctgggcacagtggcgcacgcctgtcatcctcccacctatttgggaggctgaggtgggaggattgcttgagcccagaagttggagaccagcctgggcaacataaccagatgctgtctttacaaaaaaattcaaagatagccagggtgaggcgcctgtaatcccaacagtttgggaggccgaggtgggcagatcacctgaggtcagtaattcaagaccagcctggccaacatggtgaaaccctgtctctactaaaaatacaaaaattagccaggcatggtggcacacgcctgtagtcccagctacttgggaggctgaggcaggagaatcatttgaaccaggagtgcagtgggccaagatggcaccattgcactccagcctgggtgacagtgagacttgtctccaaaaaaaaaaaaaaaagccgggtgtgctgaatacccatctcagcttctcaggaggctggggcaagaggatcacttgggcccaggagttcaaggttgcagtaagctatgatggtgccactacactccagcctgggtgacagggggacccgatctcaaaaaaaagacaaacacaaaaacaccaagaaggtggggctgagggcagagcatggggaggagcgtgcatggtcccagggcctgctcctgccctgacttggtgtctgggccggcaggttcgggaagaataccggaagtgggcctgcctagttgctggggggagcaagtactcagaattcacctccaccacrtctggcactggccacaatcagacccgggtaaggggctgcgcctggggcgggtgtgggcaggaaggcaccagggctagcggggctcaggcctctgggctctcctctccaggccctcagggcatcagagtccggcatatgaaggcgcatggttctggacggcccagcagctcctgtggccacagcagctttgtacacgaagaccatccatcctcccttcgtccaccactctactccctccaccctccctccctgatcccgtgtgccaccaggagggagtggcagctatagtctggcaccaaagtccaggacacccagtggggtggagtcggagccactggtcctgctgctggctgcctctctgctccaccttgtgacccagggtggggacaggggctggcccagggctgcaatgcagcatgttgccctggcacctgtggccagtactcgggacagactaagggcgcttgtcccatcctggacttttcctctcatgtctttgctgcagaactgaagagactaggcgctggggctcagcttccctcttaagctaagactgatgtcagaggccccatggcgaggccccttggggccactgcctgaggctcacggtacagaggcctgccctgcctggccgggcaggaggttctcactgttgtgaaggttgtagacgttgtgtaatgtgtttttatctgttaaaatttttcagtgttgacacttaaaattaaacacatgcatacagaagatggccttgcctgctggtggtgattcagaggccgggcccagggtgtccgtgaaaggccaagatgaccaagaaatagatggggtgggagccaggcttccataataacaagtttattctcatacaatctctagcttctcaacagtggcgcctggaaaggggaggtgaagctgcatgcgggcggctccgggtgggcggctctggcacgtggtggttaccggctctgctcgactgtaagacatgagatgcagtgaactgaagggccgggggaggaaccctctgccccagacccctggccctgcccaaggcacttactgtatgtggagatgtcgatttcctctggaagttctgccacattaacttcaaaccggtcctggacgtcattgaggattttggcatcattctcgtcagacacaaaagtgatggctaggcctttggtgccaaagcgacccgcccgggccacctgcaggcagacaggatcagggtcaggccacagatactacctcaggacttgaggaaaagcagggctggggccccaccccaccgccaggggaaagcaacatgcccgtgaggctgctcacccggtgcaggtaggtgtccgagtcctcaggcatgtcgtagttaaagacgatgttgactcgctcgatgtccatcccccggccaaacagattggtggccaccaggatccgccgctggaaatccttgaactgctgatagcgtgacaggctggggtgcaggagaaacaagtggaggccgtcagacactgggctcctggtggtgctccctgcagccttggcgggcggctcgcactcaccgctcctcctgggccatgccccggtggatggcgatggccgggaagttctgctccacgaggagctgggccagggccatgcagcgctgcactgacttgacgaagattatcacctgagggaaggagtggcagtcagggccacacagtccctgtggcccagtgacctcccgaaggtcctgagccccaggacaggctgatggaagtatcacctggttaaactccagcacatccaagagatcaaagagcttgcggttcttctcactgtctttgagtttgacgtagtactgctgcaggccgtgcagcgtgagcttggtctcgtcgtccacaaacacctccatgggctgtgtgggaagggaggtgggaggggcgggcagggatcacctctgggcatctcgcctgcccagaaccttccagtgggcgactcctttgtgcgacacttcccagaggacctgctgcaccagacctcagtaaacatcgctcaaaagctggatgtaagctctggcccgactcaggtgtggaccaagcttgactcccagtttgacaagaccgaggggaggaaaggaggctccgccggctcccagcatcccagcatcctccgtgccatgtgggccgtgcgggtgtcctggggccccaggctccaggcccctggggaaggccaaagctgccactctcgccctactcacatcctgcatgaacttcctgcacacaggccggatgtccttgctcagggtggcgctgaacatcatgcactgcttctcgtgtggtgtcaggcggaagatctcctgcacatcccgccgcatgtctaggtggggagggcaagacatgggtgggcatgagcgtctgccatgcaggacccccaccccagaccagacccagacccctcccaacctgtgccagggagccagtggcaccgtgacgagggcagagtgagccgcgggagtggccagtcctggtgcctgaggggctggggggtggccagcgagcgcaggcgcgggaggagctgcaatccacttacacgctggcgcggagcagccgtgcccgtgcgcctcgagccacgcttcagggaggggagcctgaggcagagacagccgctggggtgagagctgcagctgcctcccaggacacaagcccatctcccaccggccctgtcggggctcactgagggcaggcggggcctggaaccaacccaacaggtggcagaagcctcatactcccagaggtatgtgtgcatgcctttacgtccaggagggacgggggcttgcttgggccccgtggtcccattcggctcgggctcagaaacagcacatccctctgccagcagcagagctttccccaagatcaccacaggagccccgcctgccggccgcccatgtaacccactcaagagccttccgcctgctatggggcccgcctagtcactgactctcagctggggctgcaagggcagaggactcacccagctgctccagcatcttgtcacactcgtccagcacaaagtgcttcacattctttaggctgaagctcctattccgcacgagcgccaggatgcggcccggggtccccaccacgacatggggacagttcttcttcaacacttcttcatccttcttgatggagagaccaccgaagaacacagacacctatggggatgaggaggaaaccgctccatgctgatacacggcccaaggccccaacctgcacggcccagcacctgcgaacaggaggcctcaggggaccaaggcaggcctgagagcctcccggggctccactcaaaggcagccccaggctgggacctgcgcaggcccctgggagccatgcataattcatcaggcttttaaggagcaaaaaccaccgcaaacctcaaaggcagctgcccctgccaagcttggtaaatgctggctgggccagagccgaggctaacaaagctgcagaaaccaagtggcgcctggtccagtctggcccgagggactcaccttgacgctgggcatgtacttggaaaagcgctcatattccttgctgatctggaaggccagctccctcgtgtggcacatgaccaggaccgtcacctgggaagtggcataagaagagggccttaggcagtgtcctaaaccccttccccaccagagtccacccaacccagtccccctgacactgcacccaacatcacaggccatttgaaggcccggtccaaatgcctcccacttctcacggcccttccccacccctcactccctataccctcccacagctattgaaacctgtctcccaacaccaggacccacaataagaaacagaaaatggaacagaaaatggcccgcataatgtaatggttagacctggcctgcctgggtgacatgggacctggctctctaaggatttcctgaatctcggcactcgggcggccccggtcttcccacccgtgccatcagacactggaccacaccacagccctccacagcaccttcatccttcaggatgtgctctgagataacgagggcacgggcgccaatatgaagcccaaagatgtgcacctggcctgactcgggagcaagacaccagaattcactgaagtgtctccccaggacagtggcacacaagacaatgggagaagacagccagggcctaacagcaaggacagtggtgacagctatattcggggcaacccaaccttcacagatggacactctctaggtaagtggcacggcaaaacagcaacgatgcctctggggcaaggggcaaactgtgggcactttccagttattttggcttattggcaatttctaatttttgttataactaattattttttgagatggagtctacctctgccacccaggctggagtgcagtggtgtgatcatagcacactgcagcctcgacttcctgggctcaagcaatcctccagcctcagcttcccaaagcactgggctaacaggtgtgagccaccccatccagcctactctacttccgccgccacaggcagggtggggccaggaagggaggagcccacccacctgtccgttgacaggctcaatctgctgtagggtggccagcacgaagaccgctgtcttgcccatcccggacttggcctggcacaggacgtccatgcccaggatggcctggggaatgcactcatgctggactgcaggagaagcagagcgtgagggacgagaacctggatgcacccccgtgcaggatcctcaccagttgaccgggggcccacagtgagggcaatcagaagaggccgagtccggacaaggccacagacacctgcagggctggggtatccgcctggtcaaagcagaacgccccactgccgagggcagccacaggccccgctgggcacaactgatccgcgggacagacgggcccctccctcacccacggcaaactggaggcggcaccgctctgggcgggcagggctggtcttgtcttggtgaggacctgggcaagaggataacacccagaaggcgtaccctcagaaggatgctcaaagccacagtccacgatggcccgcaggagctccggcttcagcagaaagtcccggaagccagagctgtggatggaaacgtaggatcccttgatgtctttcttagggggagctggtgtgctctcttgaggagcctggggctcttcctcttcatcgtaatccaaaagatcgttttccacatcctgttctgccatgatgctgagaagagagagaggcagggtcccgcgagtgggcacagaaggatgatgaagcttcattcaaatggcattctctgccgcctccttccatgagtgagcccatcagctctacctgggctgcacctcgcagcttcgccctgtctccacctccccacccccaagctaccccatctctcccccatgcccctctggccacacccacagacagaacaccctccacctccaagggcttcccatggctcacagagttaaaatcccaactctcaccacaggccaggcaatccccttggtttgacccctgctcacctcatcccacaccacccccagccttgttcagctgctcagacccctggagcccctgccccaagcctttgaacctggctgtcaccgccaggaatgctctgcccccaggtctctgcacaaatgcctccttctccacacgcaagcctcagctccagtgaacctcctcagactactcagcccagagaagccccctccctatcactccccaaggaacccactgggctttcatggggcaggagcccaaagatcccaggggtggggctgccaggatgctggtgggaactgagtttgcgagagagcaagcagtatctgcccagccccagcttctcccactctctgtggtctgcacaggggaataattaagtgctctcatgaaaggcctcctattgggcctgggccaataaaaataaagctgagaagatggaaaatggaattaatacaaagtctgcctacctctttgctttattaatctaatgcataccaagtgcctgctgggtgcaagggacccaaacatgaggacaattgtctttcgtcctcctcccctaccccagactccagtggggggtggagcagagggtgacagctgctacaattcttcctgaggctggatgctgaggatcctaggccacttttggcctcgctgtcactcattcccggctcagaaacagcaattccattgtctcaatggctgttttctctctctcaacctccctgtccatgaggcagtgaatcccaccaaggccctctggccagttctcacctatgctaccatgctggccccaagctgctatcacctgttttattattattattattattattattattattattattattattattgagatgaagtcttgctgtcacccaggctgcagtgcagtggcgcaacctcggctcactgcaacctccacctccagggttcaagattctcctgcctcagcctcctgagtatctgggattacaggtgcttgccaccatgcccagctaatttttgtagttttcgtagagacagggtttcaccatgttggtcaggctggtctcaaactcctgacctcatgatctacccacctcagcctcctaaagtgctgggattacaggtgtgagccaccgcgcctggccttattattatttttaactagaacagctttacaggctgcgcgcggtggctcacgcctgtaatcccagcacttttgagagaccaagg

SEQ ID NO: 97872 - DNA, 48287 bp, Homo sapiens
agctgggactacaggtgcccgccaccacacctggcttattttttgtatttttagtagagacggggtttcactgtgttagccaggatggtcttgatctcctgacctcgtgatctgctcacctcggcctcccaaagtgctgggattacaggtagattacttttttttgttttttttgagacagtgtctcgctctgtcacccatgttggtgtgcagtggcgcgatctcggttcactgcaagctccacctcccgggttcacgccattctcctgcctcagcctcctgagtagctgggactacaggcgcccgccaccacgcccggctaattttttgtatttttagtagagacggggtttcaccatgttagccaggatggtctcgatctcctgacctcatgttccacccacctcagcctcccaaagtgctaggattacaggcatgagccaccgcacccggctacaggtagattacttcttaatcacaaagtgaaaattggtatttttacgttgggagagatggcagtcacttccttaaccaagtgattggcttaagcatcactactaggcacctggcatcaattgccacctgcaaaccacacagcaccacctgtgaccatccttgccaaaaatatttaacttaactctaatctgacctttagccctatacctcagtttacaaggggctgaaagaaaggcccagcgacaccatgaggaagcattccagaaggaagcttcccatgaggaagacaagtcaagaaaggggagcattctgcaggacagctggcccaactccttaaaaggtcaacgtgggggccgggcacagtggctcatgcttttaatcccagcactttgggaggccgaggtgggtggatcacttgaggccaggagttcaagacccacctggccaatatggcgaaacccctgtctctaccaaaaagaaaatactaaaaattagctgggtgcagtggcacacacctgtggtcccagctactcgggggactgaggcaggagaatcacttgagcccaggaggcagaggttgcagtgagccaagatctcgccactgcgctccagcctgggtaacagagtgagactggctaaaaaaaaagtgaacgtgggctgggcgcagtggctcatgcctgtaatcccagcactttgggaggacgaggcaggcggatcacgaggtcaggagatcgagaccatcctggctaacatggtgaaaccccatctctactaaaaatacaaaaaaaaaaaaaatttgccaggggtggtggcgggtgcctgtagtcccagctactccggaggctgaggcaggagaatggggtgaacctgggaggcggagcttgcagtgagctgagatcgtgccactgcactacagcttgggcgacagagcgagactctgtctcaaaaaaaaaaaaaaagtaatgtagggcaggggatgggatggtgagggttctattttagaatgacaaagagacaaaacaatcaaatgcaataggtggcatggattggactcaaattcaaaaggaaacctttataatagacattttggagtcaactaagaaaatttgaatatggactgaatcacacatcatttaatggagacattatttccttaggtgtgaaaaggggccgggctcagtggctcacacctgtaatcccagcattttgggaggccaaggcgggcagatcacctgaggtcaggagttcaagaccagcctggccaacacggcgaaaccccgtctctacaaaaaatacaaaaatttagctgggcgtggtggcatgcacctgtagtcccagctactcgggaggctgaggtagaattgcttgaacccagaagacagaggctgcagtgagccgagattgcaccattgtactccagcctgggcaacaagagcaaaattctgtctcaaaaaaataaaggggggtattgaggttacgtgggggactgttcttgagagatacatgctggagtgtttaggatgaaatggcaggataagtgcaacttcaaatttaaaaatatacaaatgtttaacaaatatataaataaatacagcaaaatattattcttgagtctagttggtaaaaatacgggtgatttttgtattctttcaactttttggggcatggtggctcacgcctgcaatccttgcactttgggaggctgaaacgggaggattgcttgagcccaggagttcaagaccaacctgagcaacatggtgaaactctgtctctacaaaataaaaattaaaaacttatccaggatttgtggcacacacctgtagtctcagctactcaggaagctgaggtgggaggatcactggagcccaggaggttgaggctgcagggagcctcgatcgtggcactgccctccagcctaggcagcagagtaagaccctgtctcaaaaaagagggggcctattgagcaaccccttggctctgaggagaaaacaaaccccaggattctgcaccggagaggcctctgcccccagtctgaacatgtggttgatgcgggctctccagacaggtcactggactctttccaccacacatcccctgtctatttattctttaacttgttcttttataaaacaggtgccaatctaccaataagtaatgtacattctcaagtataagaataggggctcagggctgggcgcaatgactcacgcctgtaatcccaacactttgggaggacaaggcagacggatcacctgaagtcaggagttcaagaccagcctggtcaacatggtgaaaccccatgtctactaaaaatacaaaaattagctgggcatggtggtgcgtgcctgtaatcccagctactcaggaggctgaggcaggagaatcgcttgaacccaggaggcagagttgcagtgagccgagattgcaccactgcactccagcctggacgacagagtgagactccatctcaaaagaaaaaaaaaaaaaagaatagggtctcagctagcacctacctcgagaatactcagcctactttggagacccctggtttgaactgggagtgaaggaagcaggccgtagttctcgttcatcttggtatccccagcatttggcataggagctcattaactgctcataaaatgaataaataattgaactaatgaatgaacaagtctgacctactggaggccacatgaggagtgcaggggagtggaggagcaacaatccaaggtccttgggctcggtcctgttccaggggcctcacctctcttgcagagcctaggaagccccctatgagccaacctcactctggccctaaggctgcagagatagtggggtttattttagttttataaaattcacatgcaggctgggagcagtggctcacgcctgtaatcccagcactttgggaggctgaggtgggtggatcacttgacatcaagaatttgaaaccagcgtggccaacatggtgaaaccccaactctgctaataatacaaaattagctaggcgtggtggtgtgcacctgtgatcccagctactcgggaggctgaggcaggagaatcgcttgaacccaggaggcaggggttgcagtgagccaggatcgcaccactgcactctagcctgggcaatagagtaagactccatctcaatgacaacaacaaaaaaaatcacatgcaatatttaaacttctggggccagtaacctatttgggaatccagtgtaagctaaggctcccctcccagcaaacccacattctgaaatcagatactcctcaaagtttgcacaagatctgagatggttcagggactccccactgccaagtccacatgcgggctccaggtaatgaaccccaggactccgagaagccaaggaagctcatggcttatcttacttagtgagacctccctgggttgacatctcgcctctcagctgctacagggctccaggccccctagtcattttcagaagggtttgcaatgaagagaggaaggggctgctgagcccagtggtctggggcatcgccagctctggacctgggtcttctctaggaagaagcctcagcccccacccacagtggggtgtatatgaccccctagttctctaatgggtgctgctggcagacccaggcccctcaggcaagctgtttttggccgttctctgagctcctgctccatgtttctgttttttggggtggataggtacctgctggagtgactcaggtccacagggcacttgtgctggcctgacacacacagatctgagtgcttcaaccaaactgggactccttccacattgttcccaaatccaggagcaagcctctctgaacactttctctgtgcagaacagctctcagatgaccaggaaaggtggcgactcacacatttgcaaccagcacccctgcaatcactctgagaggtagcagtggaggaatctgtttacagatgacagcatggaggctcagggaggctgtgtgaccatcccattcactcaaccacccttttattgagcacctgctatgcaccaggcatggtgctaggtgctagagagtagctgcccttggagtcacagtccaacagtgtggcgagattcctaaacatcatttcaaaccaatgtggcaaatgccatgtaaaagccatggcccaagggttatggggacacataaaccaacttggggtgtggagaggtcaaggaaggctctctagcacgtggttggtgcaacgtcttcaaggacaagaaggataaactgggctcaatgtcatgggaagggaccagcctgttgaaaaagcacggtggcttgaaaccgcatggtttggacagtgctgtgccagcagtctggtgttgtttggcattgctggccagtaagcctagagaaaaatggagccctggctgggcatggtggttcacgcctataatcccagcactttggaaggccaagacgggtggatcacctgaggtcaggagttcgagaccagcctggccaacatgatgtactaaaaatacaaaaattagccgggcgtggtggcgggcacctgtaatcccagctactcgggaaacaggcaggagaagcgcttgaacccgggaggcagaggttgcagtgagccaagattgcaccactgcactccagcctcggcgacagagtgagactccatctaaaaaaaaaaagagagagaaaacaaaaagaaaaagaaaaatgaagcccttctctgacctgaacacccgtggtaagcagtggcaatggagagactgctctcagaggactgacgggagggaggggccagctctgtaaccagcttgttaagaacaactgtaacaaggcatcgagtgccaatccatgccaggtcggcactgacctctccagggtatcactgttcacactgtaaggagatttaagtagcttgttgaagggtgcaccgaggacccgacccttcctcggctctccctctggatacaacgtgaggttaggggttggaggctgagaggaccccgtgaactgcagagcagagctgggacggggagtcaggcctcccgaccgggccgggggcactccctgggcccatgcctcgcgctggcacggagagcggggaggggggtacgcggctgacgaccgtcggggcagcagcagcagcacagcccggcgttggctagcggcccagagtcggggcagggagggttcccgtgcggacgggggctaagaggccgcctccagcccggggcagtccgcgcacccgagcctggagcccggagcctggaggggtggggaggccccgcgcccagggccggaccggagggagagggagagcggtggctcctcccccggcccccgccgctagccgatcggggcgctgggcgggcgccgcgggagccgcagccctttccggggggcggacccggctccggcggcggcacccagctcctgccccgacaggtgcgcgccgcgcgaaggaatgcagccggtctgactcaccagcgcctccttcctacctgcgcgcccgccccataaagcgctgcccgcctcgtccccacccccccaacccccgcgcccgccctcggacagtccctgctcgcccgcgcgctgcagccccatctcctagcggcagcccaggcgcggagggagcgagtccgccccgaggtaggtccaggacgggcgcacagcagcagccgaggctggccgggagagggtgagtgcccgccccagctgggcagccgcgcaggggagctggtcgggcagggccggtggcttttgtctccccttcccctccctgaaggctgacaggccccggtccctctgtccacgctgcgcaggacaggtgcccagcctccccggggtgcgccgggggcagctggcagccaaggggcagggcagctagagaagggtggtgcccatcagacctccaggccagaggagcgccttgggtgcgcctgcgggagaagtgggcagaggccagtggctggtagccctctggggctgggcccctccagggtttgcaaagaaggtggagtagacaccagcctgagtgctgggcccagcccatcatggcgcatctaatgataaaccaacattcctgacttttatgtgaaatttcgttctttctaacattggctcctacttttaaaagccaccctgagaggcagacgccatcccggctccaggcagggcttgctctatgcggtgccacagtccatctggggctggggagtccctgattttccttttctcttggccaagcacaggcctgccttcctcccaaagtcagccccaggcgccttccttcaggaagctctacaggcctcacccaccagccccagggctgtgcccaacactgccacctcctgcagcatccgccctctttcccatggctcagcctctggggtggccctctggctgggactggggctctggggctcctggtgactcccaggagcagggacagggcttctcctctgcccccatggccttgccacaccctgaggacaaggaccaggcacaggtggcatggttgttgctgtccgaaacagagctggcagtgaaggcttggagtctccatcctgggggctgagggaaggacagcaggagggacaggaggggaggtatgtctgtctactcgaccctgatttctcagggagacagaacagccaagggcctggggtccccagacttctggccagctgcctctctggggcgaggaagggcctgggtccctgaggggaggagatgtgacagcgggagaggatagtggacaggagcaggtgtgcccagaggggtccccaggggttgggatgggggccaggggagctctgagcctgtgggtgggtgggcatggcctgtgtgtgtgtgtgtgtgtgtgtgtgtgtgtgtgtgtgtgtccctgtgggggggaaactgcctgtgctgcagtgtgatggcattcagggtggcagtcacacactccagggacctgctggtacataaagtcggggcagcctggtggggtccgggccgcctggagagtaggtgtcctgagcgctgggcccagcccatcgtgatacatctaatgataaacacaaattcctaacttttatgggaaatctcgttgtttctaacattggctcctacttttaaaactttctaaacaaatgaagccaaacactcttgggtgcctcgccaaccctctaactgccattttgtagcytctgcgtggaggctgccatggaggttaaaggcagggcctgcagagcagggccctgtcctggccctcccagtgctgtccgcgggatggggaagttccacagccttctgtgcctggtctctcatctgggaaacgggcagaatgaaatcatctcccgccgggctcctgtgctgagcaatctcctccgtgaagccctgggctcatatggcagtcacagtgtgggaatcagcactgcctgaggggctgtggccagggacagtgggaggaagagctgggctcagctctccaggcctgtacctgcctgtgtaatgatgcctgggaggcctgagcctgcagcctgtattgtgtagcatgtgggtgtggcggctacaccccgaggctgcaaggaagtcatttccctctaggaaccctgctgtccccaccctttccctgctggctcagggctgcctcccagtccctgtgccacaacaggtctgacctgcatgtgttggcgctgctgtggcctcctccaggctgcacgccttagaagcaggctacgccttcctgcccttggcctgagaagggcttctccagcacctcggggaccccagcccccagaccctggggtggccactgccccagaagccgggctgagacaggattcaatggggagggcccgtgggcagggcagaggcttgggcccctgggagacctggccctagagaaagaggcgcggtgctcacctttgccccggccttgcaggcctggatggctctgccgccagcctcttttcttgtccaggcttcaggctgagcatctcttagagggcctcagggatgtccagtcctgccctgaaggccgctgaggacttaggatggtttaatactgaacccacagccgctggggacgccttgaggggagccacagtgtgtgtgcatgtctcactctgggctaacttgtgaaagggtgaacagctcaggggcccagaaaacttaactctggggcaggcagaggtacaggggagggcagatgattcagaccccaccctgatgggccgggcagtcactgcagaacccaacccggtgcagtaagccactgcgggcagctgtggcccagccccaggccccagatattgggaggggcccctctcctcccggctgtgccaccctcaccaaagggtaagtgggccaggacagaaggagcaggaggcagagctgcggccccctctcagggaggcaccctcattggatgaccctgtcatggccaagcctgacccaggctcactgggagctaaaaggcaaagaagaataaacccacatctgccctcagggagcccagtgctgagaggcctggcactgggacaaactcgcaaaccagagtccttgagggctggagggggcctcccggggcagggcataggccactgcagggatggcacggaacagggcagcggaaaaggcaggagtccgaggcccagggccctgyctctggcggctgggcgcccttggtcacattgttggtgctcagagcctcagttcccacagctgtgcagcgagaggaagctgacggcaccraccatggctgtggaggcctcatgtgtcaattgttgctgttctgcaggaggaagaggatggcagggccacgccccagcccatgggccaggctgctcctggcagccttgatcagcgtcagcctctctgggaccttgggtgagtccacgttgccctgcagccccctcctggcaggrtcatcccttgggcaggcattgcccttgcacggggatctcacggtgtctcacctaaacacgcttggccattcagcaactgaccactgcccaccttcagggctggaaaacttgaggctccaagctcttcagcctagagaagcttgagccctgaccacggggcctgagaataggagcgaaggaggctgtgtctagaggaaagaggagacacccacccaggactgaggcacccagaggatgcactgaggccccagaggtrtagtcaagagggttataggaatttggagaagagaggcactgctgacgtgtcacttgctctctgagtgtcactagtggacaaatcactggagccagctcctaccacttgaattttgtctgttagagggggtcctgctggtggcttgaaatagaccacgacagaaatgtttacaccacagaaattggcaaacgctacacgtcaagcaccasagaccagagccgttgttatttttttatttaattcaatgtatatgtagaaacatgctctcactctgtcgtcccggtgaaatgcagtgatgccatcgtggctcactgcagcctcaacttcccaggctcaagcaatcctcccaccttagcctcccatgtagctaggaccacaggcatgcaccaccatgcctggctaattaaaaacaatttttttgtagagacagtctcactatgttacccaggctggtctcaaactcctgagcttaagcaatcttcctacctcggcttcccaaagtgctgggattacaggtgtgagccatcgcactggccaccacagccattgttaaacactgaccagcacaccattgcctgaagcccaggagacctcttactgtgtacaccaggtgcacacagtaggtcctcactgtgatttttaactgagcagagccaaagggaaatctagagttttacttcattcgttactgaggacccactgtgtgccaggtgtgccgggtgctagggctaccgtgataaacaagacaccattcccttcaccctagaaggggctcagaggacagacaggccatgtggcagtggtctcgccgtgaggcacaagctgtgatggaggaggtacctgaaaagggtgctaggtgcagctcatcaaaggtaatggggaaggctgaggaccgtctggctggacctgaggaggcagcaggccagggggtggccagggtgtgccagcaccragtgtgccagtgccactgtctcagtccccaccttctgtccttctggcttgagtgggaagtcccaggtttgaaatcacagcttgtttctagctgtgctacctggggcagatcacatacccctggcctctgtaaaatagggaacggctgggtgcagtggctcacgcctataattcccagcactttgggaggccaaggtgggaggatctcctgaacccaggaatatgagaccatcctgagcaacatagggagcccctgtctctacataaaataaaaaattagctgggctacttgggaggctgaggtgggaggattgcctgagcccaggatgtcgagactgcagtgagctgtgatcatgccactgcactccagcctgggcgacacagcaagaccgtatctcaaaactaaataaaattgaaatgcaggttgggcacagtagctcacgcctgtaatcccagcactttgggaggctgaggcgggcagatgatttgaggtcaggagttcgagaccagcctagccaacatggtggaaccccatctctactaaaaatacaaaaattagccaggcatggtggtgcccacccattatcccagctactcgggaggctgaggcaggagaatcacttgaacctgggaggcggaggttgaagtgagctgagatcgcaccactgcactccagcctgggcaacagagcaagactcgtctgaaaaataaagtaaaacaaaataaaaatacaacaacaacaacaaaccaaaataaatacataaggccgggcccggtggctcccacctgtaatcccagcactttggaaggccaaggcgggtggatcacaaggtcaggagatcgagaccatcctggctaacacggtgaaaccctgtctctactaaaaatacaaaaaattagccgggcgtggtggcgggcgcctgtagtctcagctactccagaggctgaggtgggagaatggcgtgaacacgggtggtggagcttgcagtgagccaggatcacgccactgcactccagcctgggcaacagagcgagactctgtctcaaaataaataaataaataacataaggagggaatccccatctctccaggtgaaggtgcaggtgggaaagtgcttgcctttgctgagcrcctccccattcatgtgcccacatctgtccccccagcaaaccgctgcaagaaggccccagtgaagagctgcacggagtgtgtccgtgtggataaggactgcgcctactgcacagacgaggtgaggacctggcccgggttggtgtggaacaggcaagggtcgggaatagctggtggaaatgaatctagggttggggcagccagggaatgggtgctgcccccagtgaccccctgtccttctggccagatgttcagggaccggcgctrcaacacccaggcggagctgctggccgcgggctgcyagcgggagagcatcgtggtcatggagagcagcttccaaatcacagaggtgcctggtgtggggactggggtgggggctccccatgctcagcctggctatttatgggggtgtatagtgccccttggccgggctgggcccccatcgggcctccggagtgaccctctagccagctgtccccttccactggctgcaggagacccagattgacaccaccctgcggcgcagccagatgtccccccaaggcctgcgggtccgtctgcggcccggtgaggagcggcattttgagctggaggtgtttgagccactggagagccccgtgkacctgtacatcctcatggacttctccaactccatgtccgatgatctggacaacctcaagaagatggggcagaaccygggtacggcagggccagagtggaggacagcagggcaggagggggacaggtgggcgtctgcttgggaggccaggactcaggacagctgcacccacccagaaggaaacactggacatttgagcccccaaaaaccttcccttccattctcaagggaagaatctcggtcagaccctactcaccactggggacttctgagaaggcccagggcaggcgggcagtggagccatytggccctgacaaggagggcaccccctgccacgaggctgtggggaagcttctgctcctcagagctgggctgcattcccagccaccctgcccttgctgtacgcataactccagacccccagtcccatttccctcatccataaataggaacagacaatgttgtgagcatgaacctttgtccagcatgcaaagcgttaacctccctcttcctcccttctgagccagcccttggtggggggcccgtgtttatgccaggcatcagggctcagctatcccctctctgtccttttgacatccagctcgggtcctgagccagctcaccagcgactacactattggatttggcaagtttgtggacaaagtcagcgtcccgcagacggacatgaggcctgagaagtaagtgactgtgtgggtcccgcaggtgggcaagggtccaggccatgtgacccccactcctctttcacccacaacttaaaattatccttctacggctgggcacggtggctcatgcctgtaatcccagcactttgggagaccagggcgggcagatcacctgaggtcagaagttcaagaccagcctgggcaacatggcaaaaccccatctctactaaaaaatacaaaaattggctgggcgcggtggttcaygcctgtaatcctagcactttgggaggccaaggcgggtggatcacgaggtcaggagatcgagaccatcctggctaacacggtgaaaccccgtctctactaaaaatacaaaagattagccaggcgtgatggtgggcaccrgtagtcccagctactcgggaggctgaggcaggagaatggcgtgaacccgggaggcggagcttgcaatgagccaggattgcgccactgcactccagcctgggcgacagaatgagactctgtctcaacaaaaaaaaaaaaaaaaaaaaaattagccaggtgtggtggtgggcgcctgtaattccagctacttgggaggctgaggcaggagaatcacttgaacccaggaggcagaggttgcagtgagccaagatcgtgcataccgcacaccagcctgggtgataaagcgagacttggtctcaaaaaaaaaaaaaaaattctccttctagttgaaacgagccaggggcactggggtctgyggygtsttccccctgtgacactctctctccctcccacctctgcccaggctgaaggagccytggcccaacagtgacccccccttctccttcaagaacgtcatcagcctgacagaagatgtggatgagttccggaataaactgcagggagagcggatctcaggcaacctggatgctcctgagggcggcttcgatgccatcctgcagacagctgtgkgcacggtgggcactgggaagggtgctgccagcctaggccaggggtgagcacttctgggcaagggcctgagctgcccccyggcctgctctggtgccaggctcacaggccctgagggaaagcctgggagcctgcaaccccttcaccctgagacaagctcaractctgtgagtaggtctcagttacaatctgagttcagatgtgcctggagccacggtcccctggcctgagcagtcacagcctggtttcgtatcagctaccaaggcagacctgggctttagcgttctggaatctttagtaccctgaacccaccagctgcccagactccacctgttctgggcatccaaataagccatttcctttgatatgtacatccatttgttcattctgaaaatgacatacccatattactaggttagaaaacaaagagctagccaaggcgtggtggctcacacctgtaatcccagcactttgggaggccgaggcrgggggattgcttgaattcaggatttgagaccagcctgggaaacatggcaagaccctgtctctacagaaaacacaaaaattagctgggtgtgatgcacgcctgtggccccagcgccttgcgggggccgcatctccagctcctgtttctcagcgttgtcactcagtcatgtgccgtcagatgcatctttcatgagggcacttgctgtgaatccagtggcttaagcccagccccatgttgggacccgcgttccccgtcctacacgacgccgtgatgcgtgtcagcaggcagcctgctcagtgggcacgccccgccttgccttccccagagggacattggctggygcccggacagcacccacctgctggtcttctccaccgagtcagccttccactatgaggctgatgrcgccaacgtgctggctggcatcatgagcygcaacgatgaacggtgccacctggacaccacgggcacctacacccagtacaggacacaggactacccgtcggtgcccaccctggtgcgcctgctcgccaagcacaacatcatccccatctttgctgtcaccaactactcctatagctactacgaggtgcggggcccaggtcccacgggtgggaggtggtcaaggtagggggtccatggagcttctcagacacctctccctccctccctccctccctccctccctycctcccttcctccctccctcttttcctccctttccttcctcccttcccaaagcctttagaccccccaaaatgtgggccctagtgggaaggggaggtcatgtgcccatcttccaccccaactcccaagcaggtgggggctaagagggcaggctctgcgacaccacagtaggttccaggcctcagtttccccatcctcaaagtgggaagaatcctagagctgttcagattcatggagatgcttagcctgagacctggccttctctcccgcagaagcytcacacctatttccctgtctcctcactgggggtgctgcaggaggactcgtccaacatcgtggagctgctggaggaggccttcaatgtgagggcagctcaggctccagagtctgagcccttctggggcagggcaggaagtgggcagggtgggcaagaggtgtcttggatcacggtggagaaatgggtctgggacagaccagtgaggaagggtctctagctatccctgaggccccgaggggccacctgggcctggccctggctcctgcaggctctgtgataccccgcatgatgccagccacacttggaggttggggtggagcacagaggccccccacagagcactgatcaacctccttcctcctttagcggatccgctccaacctggacatccgggccctagacagcccccgaggccttcggacagaggtcacctccaagatgttccagaagacgaggactgggtcctttcacatccggcggggggaagtggtacgcctctgtgggggcagcrgggtgggggataggcacagcgccccacaccgagtggaatcgtttaaaacagyggtcaagagcgtggcccctggagtcaggcaggcctgggtgcagatccctgggcctagccgctcggatgagcctaggttgctcctctgcttgttggtttcctcggcatgcaagcgtcgagcccggaggcttgctggggcagtaaatgggttagtgtcacgaagcccagaggccctggccactgtcattgtcgctatgattgtgactgcgctgggaaggagggagtttccagccctgagggaggtgagcaggagctcatttcagggatccagacatctcctaggaacttgggggccgagggccttcaggcatcgatggccccctggtccttggggctgggcctgccttggctgaccacggggcccctgcagggtatataccaggtgcagctgcgggcccttgagcacgtggatgggacgcacgtgtgccagctgccggaggaccagaagggcaacatccatctgaaaccttccttctccgacggcctcaagatggacgcgggcatcatctgtgatgtgtgcacctgcgagctggtacaacgcagccccgcwgggcgggaggggagagctgagccaagcacccagggaccmtgaggaatgaagcagractcmtgtgccccatatcccttgtggggtttcccgaggcacacaggakagcggaagtgtccagtggccccggtcctgctcccccgacgcaccccaccatggtctctctcattccagcaaaaagaggtgcggtcagctcgctgcagcttcaacggagacttcgtgtgcggacagtgtgtgtgcagcgagggctggtgagtggggaagggagttgggcacccaggacaccagtggcccctgatgggaaagctgggctcctgcaggggcctggccctgggtgcaccttgtacacctggctgggggtggggcggcaatcaaagaaacggctaagggcggggcacacccagttgttggtcaaacccaggtcaaagcactttgaaatacagagatatatgggctgtctctagaaagaggtgtgaggattgagackgggttggctgttggggctggggtctggatcttgggggacaggcacacgargcttcctttttgctccatgcctttggtattctgagtcctgtgtcatattgcctgatcagaagagagctcgtaaatgcacggcagtaagggctttagcttcaggacactgggcgagcttgccacaacttgaggcagagcagtggggaaaggacactggaaggggtgacatgacagggcactggggtttaggtctcagctcagccacttctgtctgcatgactgggagctgcctcggccctctcagagcctcagtttcctcatctgtaaaatgggacagcaggccaggcgaggtggctcacacctgtaatcccagcactttgggaggccgaggtgggtggatcacctgaggtcaggagttcaagaccagcctggccaacatggtgaaatcccatctctactaaaaatacaaaaaagtagctgggcgtggtggtgcatgcctgtaatcccagctactcgggaggctgaggcagaattgcttgcacctagaaggcggaggttgccgtgagctgagatcgcgccactgcactccagcctgggcaagaagagcgaaactctgtcttgaaaawaaataaaataaaataggccaggcgcggtggcttacgcctgtaatttcagcactttgggaggccgaggtgggcggatcacaaggtcaggagatcgagaccatcctggctaacatggtgaaaycccgtctactaaaaatacaaaaaattagccgggcgtagtggcgggtgcctgtagtcccagctactcaggaggctgaggcaggagaatggcgtgaacccaagaggcagagcttgcagtgagccaagatcgcgccactgcactccagcctgggcagacaaggcgagactccgtctcaaaaaaaaaaataaaataattaaattaaattaaattaaatgggacagcaaaagccccagctttcctcctgggctgtttcggggaatgaccagttcctccttcaggagtggccagacctgcaactgctccaccggctctctgagtgacattcagccctgcctgcgggagggcgaggacaagccgtgctccggccrtggggagtgccagtgcgggcactgtgtgtgctacggcgaaggccgctacgagggtcagttctgcgagtatgacaacttccagtgtccccgcacttccgggttcctctgcaatggtgagcacaacaactgcggccaatgctgatggcggggtagggagtggacagcaagcatgactttcccgtcaggacccaggttgggagagccagacttggaatcagaatccccaagttcaggcccagcccactctggatgccctgagggccgcccctgagtcctgccccaacctgggcctgacttccctcatctgtaacgtccatgcccaaggtcactgttggcaggactttcccctggttttaagattccaactcccctgaggttctctctggaagttcagttctatgcccaccccacttctccacacccctatctcattagagtgggtgccacccagctcagccctccaatggctggcaggtatatggcattatgatctttcctctctccaaagatgctaaatttctgtgggttttttgttgttgktgctgctgttttttttttttttttttttttttgagacagagtttcactcttgtcgcccaggctggagtgcaatagcacaatcttggctcactgcaacctctgcctcctgggttcaggcgattctcctgcctcagcctccctagtaggtgggactataggcatgcaccaccatgcccagctaattttgtatttttagtagagacagggtttcaccatgttggccaggctggtctcgaactcctgacctcaggtgatctgcccgcctcagcctcccaaagtayacatctgtaatcacacctgggattacaggtgtgagccactgagcccggcccaaagatgctaaatttctacctggaaggcctggagcttcctctgtattcccatgggtccaggccataggcatacagtctggccaggaacatcagagctgggcaggatcacagaactcagacaaggggacatagggaaggattggtagttgaatggaggaggatgaatgaaaatctactcatcaaatacttatgaagccctcactgtatactttccaagcccctgcttttctactctttcttctgttcttgcttttgttcaccatttcttctcttcgactgtctgtccctgagtgtgctcagagaaacagaagagagaactgggcaccactggagaaaggcagacaagtggcacagagggaggtatgagagaggaagggaggaaggtgcctctggggaaggaggcagggccagagtacaaagggcttcggttctagtccagagcaggacttcatcctttggacaaaagggggtcactggaggttttactttcattttctaactatttgcatattaaccttgtatctagtcaccttgctaaacgcacttatgaaatctaataatttgtctgtagattcttctggatactttgtgacatgttcctcacacttgcaaataaagacaattttattgattgattgattgattgatttttgagacggagtcttgctctgtcacccaggctagagtgcagtggcatgatctcagctcactacaacctctgcctcccaggttcaagcaattctcctgcctcagcctcccaagaagctgggattacaggggcccaccaccaagcccagctaatttttgtatttttagtggaaatagagtttcaccrtgttggccaggctggtcttgaactcctgagctcaagtgatcctcccgcctcggcctcccaaagtgtgggattacaggtgtgagccaccacgcccggctgacagttttatttcttttttcttttctttttttttttttttttttgagacggagtcttgctctgtcaccaggctggagtkcagtggcgtgatctcggctcactgcaacctctgcctcccgggttcaagtgattctcctgcctcagcctcctgagtaactgggactacaggcatgcgccaccatgaccagctaatttttgtatttttagtagagacgaggtttctccatgttggccaggatggtctcagtctcttgaccttgtgatctgcccgcctcagcctcccaaagtgctgggattacaggcgtgagccaccttgcctggacttatttcttaccttctaatgcttatacatcttatttctttttctgaccttattgcattggcagggacccattagaggttcttagccaggggagcaggagccacatgattggatttgttttgagataattactcaggctgcagagtggaaggtaggtaggatggaggcagagatggagggaaggagatwccaggaaagtgaggaagagatgacttctaccccaggctagcggcaycctggctcccacagctctgytcccacaggccctccctgccaggtgggcagcctggactacaggcacagatgtagctctcatctcccttccttgtccctctctgcagacygaggacgctgctccatgggccagtgtgtgtgtgagcctggttggacaggcccaagctgtgactgtcccctcagcaatgccacctgcatcgacagcaatggggtaggcctgggcataagacagacagtgtctgtcagcaccacccaccctctccagagagaaccctatggagagaggagagggagcaggcagggatggggcacagctggctcactggtgccccctcctaccccagggcatctgtaatggacgtggccactgtgagtgtggccgctgccactgccaccagcagtcrctctacacggacaccatctgcgagatcaactactcggcggtgaggctaagacctacgaggtgtgggcgtgggaacagggcaggcacagggcagkgtgggcaggaggggctaagcctgatgccacaggagctggccaagggcaagaggtttggggagcgggggtctggcagaggcccacccaacacagtgcctgtctgccccgcctttccccgccaagatccacccgggcctctgcgaggacctacgctcstgcgtgcagtgccaggcgtggggcaccggcgagaagaaggggcgcacgtgtgaggaatgcaacttcaaggtcaagatggtggacgagcttaagagaggtaggggcaggggctgagggttggggttgctgagmgcctaggcagcgggcatccaacggggcaagggtgtcatcacctggacgggggcttgcagtctgggctaaggtcacacagtccggacaggaactccagagctgggagggaccacagaacccagatagaggacaccgaatcccakaaaagggtaaaagcctgagcaggaggcacagaacccaggcggtgggacacastctggcccaggaagggaccaagagtcttggtgggaggcacctgacttgggcaggggcmtgcacccagcaggggtacatggtcacgctgtggagacacgcagcctcccctcctcgagatcagatacgttttstggaccctgagttcctgggtgatgtccaggtcagggaagtgggggaggtaggtttctaggctctgatgctcctgagcaggggagcccccaccacacccgttcctgtgcctggtgagagcacggctttgcaaggacttccactcttccccaggaggccctgccgtgggtgaggcagatcscagagtaggggccccctcaccagaccctgggtcctctggggcggaggggtgtggctggggtgccctgctgactggctgtgggtacagccgaggaggtggtggtgcgctgctccttccgggacgaggatgacgactgcacctacagctacaccatggaaggtgacggcgcccctgggcccaacagcactgtcctggtgcacaagaagaagggtgagctggtggggccgggcgcagggagggggcgtgtggccagagctcggtggggaggacaggcaccacctccccctgcctcytcctctccagamtgccctccgggctccttctggtggctcatccccctgctcctcctcctcctgccgctcctggccctgctactgctgctatgctggaagtactgtgcctgmtgcaaggtgagcacccagggtgcctcccaaggccccacatcccagggtccccaccccaacagggcccccaccctccaccagggtccccagtccccgcctgagttctcatctccccagggtccccaaccccttcctgggtccccacctccccagggtccccatcccaacagggtccccatcctccaccacggtccccacctccccagtgtcctcaaccccctcctgggtccccacctcaccagggtcccctctctgacagggtctccaccctccatcagggtcctcctcagggtccccaacccccaccagggtccccagcctcyccacccaccatccccactcctgcagctttctagccagaggcttcagcccgtaragtccagctgtctggattctggtcccagctctgtgaccttgggcaaattacttaatctctccatgcctcagttccctcatctgtaaaatgaagatcatagaattgacctcagaaagtggagctgaagcttaaattagtgaagttcagaagggactgacccatagcatgcaccatcgcccccacccccaccttggcaagacccacaccaaccccatccagcttccggagtgacagtaatgatgatgacacccatgagctcttagcccgagtcatcctggagccccagcccccagctcagcccttgccagcatccgttctctgcttagctcagtgttcctctttgtgctgtcgccacagcatgtccacgtgactccatttccccgccccccatcaccccatgaggtcagtggggcaaggtcaccatgccctatgacagatggagaaattggggctgagaggcaggtgataaatgcacagtcctcagaaggggctgaggcaagctgagcccacatcttccccagctctagtgcccgcccaggacccccactccatcagccatcagtggccagatccctgagagcacctgctctggggtcagccacgtgcaaaaggcctgggagccacaacagggaagaaagggccctgcccgcccgcagctggcggtcactggggagaacagacaagagaaagcgtggaggatggcatagctcagagtrgggattgtaggcggcagaccacactccgtagtaacccccagtgttgtgggatattaatgtgcattacataggcaaggagttatgtgatcaaataggtttgagctaggcacggctgcgcgtgcctgtagtcccagctactcagaaagctgaggcaggaggatcacgagtctgggagtttgaggctacagtgagctatgattatgccactgcactccagcctgggtgacagagtgagactcaaaaagaaaaaaaaaaagaaggtttaagaaacaagtttcttaaatttaagttacagtggctcacacttgtaaccccagcactttgggaggccaaggcgggtggatcacttgaggtcaggagttggagacaagcccggccaatatggtgacaccccatctctactagaaatacaaaattagctgggcatggaggtggatgcctataatcccagttactaggggggctgaggcaggagaattgcttgaacctgggaggtagaggttgcagtgagccgcgatcgtgccactgcattccagcctgggcaacagagcgagaccctgtctcaaaaaaaaaaaaaagaaaagaaacaagtttcttctctgcaggacttctcagaggctttgataaagtcctgtgcctaacctgcaagaggggcatggggaatgaattcagtgcttcccaagtgaacctgaccacagaacctttacagagcacccggcaggatgagagttccacggcgcaaactttgggaaccytctgcccccatccccctctatgcccttgtgtgccatgcttacaccctrctaccacctggatattctggtgtctggggaggcactgtcacccctcttgaccattggcatggggcggggtggctggaagggcttacctgggccagggcagctgtctcaggyctcaccctcacccaccttgtctcctaggcctgcctggcacttctcccgtgctgcaaccgaggtatgggcctggcatcgcaggggcagcaggggctctgactgctctttctctgagctggggtggagggaagctgaacctggaacggcagaggctggaggctctggggtcccacctgaagaggttgggctgtgcgrgtctagggaggggtgccgtgctgaggaccccatcctgcaggtcacatggtgggctttaaggaagaccactacatgctgcgggagaacctgatggcctctgaccacttggacacgcccatgctgcgcagcgggaacctcaagggccgtgacgtggtccgctggaaggtcaccaacaacatgcagcggcctggctttgccactcatgccgccagcatcaaccccacagagctgggtgagggcggggctgggcgccacagctctgggcagtgcccttcgggccctstgttccagatstgggatcacagcatgcctcttctctgggtgtggggtgcaggcacagggctcagccaccttttgccctgtgctgatggtgctatgaacctcatgcctcsgtgtgcgtggcctgctggccaggcatcccctgatcctagcatggttgctggagggatgctctgtggtgcctgtcatgcaggsggstgaccacctccatctcaccccctcccaccgcctttccttagtgccctaygggctgtccttgcgcctggcccgcctttgcaccgagaacctgctgaagcctgacactcgggagtgcgcccagctgcgccaggaggtggaggagaacgtaaggacccaggaactaggcctggccggagatgtgggtatgagggcgggtgaggtgggcagggcagagcgaatgcggtcgtggtaccgagattcattaactaggggagaggggtctctctggacctgtgcctggcagggggcatcctgggatctgtttccagagggcagaaggccagagcctgggcccaggatgctsccccacggggcatgccccagccaaccctgaggatctctgggtacagaggctgcctggctccctgggtccccagcctgagggcttgccacggggtggcctaggcccagcctcacgcccctcccttgcctggcagctgaacgaggtctacaggcagatctccggtgtacacaagctccagcagaccaagttccggtgagtcccggggtgcccgggttgggtgggggagccgctcctaccgggactccaggagccgaagcccccaggccgatcaggcctccayttcagggctatctagctcacagcgccctctttgtccccacaggcagcagcccaatgccgggaaaaagtgagtagaagactcgtgggtgagagggcccccacttcctgcccgcctgtccccagcccagccactgcctcgtccgtccctactccatctccatcccataggaagggagggtcagatgtgtccgtcaggttcggaccttcattcgttcctttgaccatttcttcaacaaatgctaatgtgaagtgcttgctatgaagtggcccctggactagagcaggcaaaagcaaatcaacccagtcyctgccctcatataggtgactgtccagccccccacccggtaccagcgatagcaggtacccatctccatccgctccagtgtccaagaccctgatcttgggtgcacctctggggaccaggcaggttaccgagaggatgggccagcaggtcacacaccttttttcccaggtcctacatcgagtcctggcccttcatggggagagagagggagtgaggagggggtcttgatgcagggacagaagagctagaatctcagcacatgaccatcagtaagaaccgttggctgtgcgtggtggctcacacctgtaatcccagcactttgggaggctgaggcgggtggatcacctcaggtcaggagtttaagactagccaggccaacatggtgaaaccccacctctactaaaaatacaaaaattagccaggtgtgttggtgggcacctgtaatcccagctacttgggaggctgaggcaggagaatcccttgaacctgggaggcagaggttgcagtgagccgagattgcgccactgcactccagcctgggcgactgagtgagaatccgtcttgaaaaaaaaaaaaaagaatggctgaccagcatttcttatcctgctacgggccaagcattgtcctaagggctttccgtgtgtggtcatcttatccaaccctctcgtcaagcctgtgaggtagagatcactgctgttcccattttgcagatgaggaagctgaggctcaaaagggttaagtgacttgcccaaggttacccagctatcgagaactagaaccagggctagggccgcggcagcctggcctgagcacacacacccttagcatctttgctgtccagcccttgatgaggtgggcagagaagcccatttcacagaggaggacgctgaggacagggaggcgccatggctgggctgaggctgcagggtaaagggtatggggctggcataggcctggagcactgcctgcctctgaagaccctgcacttcttgctgtcttacatcctggcccctgaaggggagaagacaggcaggagggacagggcagcaggtgccagcctgacccctccgcygcctgaaccttccaccctcgacccaggcaagaccacaccattgtggacacagtgctgatggcgccccgctcggccaagccggccctgctgaagcttacagagaagcaggtggaacagagggcyttccacgacctcaaggtggcccccggctactacaccctcactgcagaccagggtaggagggcgggtccgctgtgccactgcctcgcacctcccgccygtgtggccctgtgacccacctctgaccacctccgaacccccacccagacgcccgggrcatggtggagttccaggagggcgtggagctggtggacgtacgggtgcccctctttatccggcctgaggatgacgacgagaagcagctgctggtggaggccatcgacgtgcccgcaggcactgccaccctcggccgccgcctggtaaacatcaccatcatcaaggagcaaggtgggtctgggtggggagagtggggaargcaracgggggctcgggggcactggttcctcctgcttaagtggaattgcgacctggccacgtggcctgggctagtcacttaacctctgcaagccttggtttctccatctgtaaaatgggtaagggctcttttacggaatgcgtggctgttcacctcgccacagtgcctgcctggtggtgagcgctcagtaaatggaagcttctgttgcatcctcataagggccagccccttgctcctctctatctagaaaaagggttggccaaggcatcacaccgtggacatctgacccctcctcccacctgtgccggaagccacaggcctcaggcctgttcctgctctcctccagccctggggctgaaggctccatctctggtcctgcccgtgactggcctccctcctctgcctggcccttccargatgtctgctggacactttgttccagaaccacttttttttttcttgggacagagtcttgctctgccacccaggctggagtgcaatggcrccatcttggctcactgcaaccgctkcctcccaggttgaagtgattctcctgcctcagcctcccgagtagctgggattacaggcactcgccaccacgcccagctaatttttctatctttagtagagatggggtttcgccatgttggccaggctggtctcgaactcctgacctcaggtgatccacctgcctcagcctcccaaagtgctgggattacaggcacaagccactgcgcccggcccctcatctttttctggaaggattttccgtttcgctcctgtgcccttcccagagggcaatgcatagagggaaccaagcggactcctggattctgggctgggctgggcagggtcacaggagagcaggaggtgggaagggactgggcccagcacactctgacaaatgcccgggctccttgcagccagagacgtggtgtcctttgagcagcctgagttctcggtcagccgcggggaccaggtggcccgcatccctgtcatccggcgtgtcctggacggcgggaagtcccaggtctcctaccgcacacaggatggcaccgcgcagggcaaccgggtgaggctgcgccacagggtcgagggtgcagccyggggggctgcgtgggcaccgcattgggttcccaagacaaagcagcacatggcagctgcttgagtccctggatactggccgtgcccctggctggcctcccaaggacaygtccacctgctcctgccaccctgtggcaggggagtctcacctgcccagggtgccagtgacacgctggatgaggctccattgctgccagggactcaggccaagagggctcgctcttttttttttttttttttttttgagacagagtttcgctcttgttgcccaggctggagtgcaatggcacaatctcagctcaccgcaacctccacctctcgggttcaagcgattctgctgcctcagcctccctagtagctgggattacaggcatgtgccaccacgcatgtctaattttgtgtttttagtagagacggggtttctccatgttggtcaggctggtctggaactcccgacctcaggtgatccgcccgcctyggcctcccaaagtgctgggattacaggcgtgagccaccgcgcccggcccaagagggctctttcttccttcatgggccagggacctgcccagaccattcctgtcccctcctacaactcaggatccacagggtagccaaacctcttggagataaactccccctatatgccccagtccagggggctttgggtttcttgagctgggatcgaagaccccatgtccccaggccagactccccaagggctgtcacaatttgccaagcagcaggagcaacccttcaaggcagggagtgccatggctggaccagcatcaccttcactgctgagccccagtgctggggtacagccaaatcaggtggcacacaggctggactgggtttacaggcttcatagttttgtttcttttgttttgtgtggggattttttgcttcttaatttttgggggagacagggtcttgctatgttgcccaagctggtcttgaactcctgacctcaagtgatccacccacctcggcctcccaaagtgctgggattacaggagtgagctaccacgcccggcctagtttttgtatttttagaagagatggggttttgccatgttggccaggctggtcttaaactcctgatctcaagtgatccgcccccctcggcttcccaaagtgcagggattacaggtgtaagccagtgcacctggcctttctagtttttaaatgttggcaacacaatccataattaaaaacaaaggcggggcatggtggctcacacctgtaatcccagcactttgggaggctaaggtgggagaatcacttaaacccaggagttcaagaccagcctaggcaacgtggtgagaccatgtctatacatataatttaaacattagctgggcatrgtagtgcatacttgtggacccagctacttggaaggctgaggcaggaagatcacttgaggccaggaggttgaggctacagtgagccatgttcatgccactgtacttcagcctaggcaacagagtaagaccctgtctaaaaaaataataataattaatttttwaaaaatcaaacaaaaaaacaaagaaacaaaacctggctcagtgcagtagctcatgcatgtaatcccaacactgtgggagggcacagtgggaggatcacttgagcccaggagttgcaggccagcttgggcaacatagtaagaccctgtctctattttaaaaaaataataataataataaaggccaggcgaggtggcgtatgcctgtaatcctagcactgtgggaggccaaggcaggtggatcgcctgaggtcacgagttcgagaccagcctggccaacatggtgaaaccctgtctctactaaaaatacaaaaattagctgggcatggtgacacgtgcctctaatcccagctacccgggaggccgaggcaggagaattgctggaaaccaggaggtggaggctgcagtgaaccgagatcatgccactgcactacagcttgagcgacagagtgagactctgtctcgaaaaaagaaaaaaaaaattatctcaaaagtaataaagtctcgcctccctgggcccacaggcccattcagcaaacataggggagcgcgtagtcagcaggcccgggctgcctggccacatcctaattttatttacttctttttattgacaggaactgttctcattatttttccaatgtccccccataaaaattccaaagaataatttttttcttttaagagacaaggtctccctctagtccagggtggagtacaggggcacagtcctagctctctgcaatcttgaactcctgggctcaagcagtccttcaacctcaacctcccaagtagctgggactacagatgtccaccaccgcacggctaattttgtatttttttttctttgagacggagtctcactctgttgcccaggctggcgcgatctcagcttactgcaacctccacctccagggttcaagcgattctcctgcctcagcctcccaagtaacagggactacaggtgcgcaccaccacacccagctaaattttgtatttttagtagagacggggtttcaccatgttggtcaggctggtctcgaactcctgacctcgtgatccgcccacctcagcctcccaaagtgctgggattacaggcatcagccaccgcgcccggccattttatatttttagtagagatagggtttcgccatgttgcccaggctggtctcaaactcctaggataacatgatccttttgccttgccttctggctaccctgttacacttgtataaagatgctttgaggctgggtacagtggctcatgcctgtaatcccagcactttgggaggccagggcgggcagatcgcttgagatcaggagttcaagaccagcctggccaacatggcgaaaccctgtctgtaccaaaaatacagaaaattatctgggtgttgtggtgtgcacctgtggtcccagctactcgggaggctgaggtagagcccagtaggtggaggttgcagttagccgagatagtgccactgcactccagcctgggtgacagagtgaaacccctgtctcaaaaaaaaaaaaaaaaaaaaaagctttgatatttgttttttaaaacattttaatttctcacctttttatttttaaaaacttcaacttacagaaaaatggaaggaacagtaaaactagcacccatttaccctttacatagattcaccgattgctaatatttgctttctctctctttctatatagatagcaacatagaaatataaatagagatgtggacatctgtatcttcacattgattatactagtacctaaaattagtccatattccagccaggcgtggtggctcacacctgtaatcccagcactttgggaggctgaggcaggtggatcacctgaagtcaggagtttgacaccagcctgaccaacatggagaaaccccatctctactaaaaatacaaaaattagccgggcatggtggcacacgcctgtaatctcagctactagggaggctgaggcaggagaatcatttgaacccagtgggtggaggttgcagtgagccaagattgcgccacttcactccagtctgggcaaaagagcaaaactccatcccaaaaaatatataaaataaaataaaataggtccatattccaatgtccccttgttcggatgtcccaataatgtcctttatagcgtttttccccccaatgcaggaactaatcaaggatttggcattgacttttgtcacgtgtcttgactcctttaatctagaaaagtttcctggctttgtcttccgtgacactgacttttgttaagacaaggtctcgctctgtcacccaggctggagtacagtgcctcactgcaacctctgcctcccgggttcaagcaattctcctgccttagcctcccgagtagctgggattacaggcaccggccaccatgccgggctaatgacactgacgtttttgaagtatccatgtaggttgcttgcaggcagctccctggtttgttttttgtttgtttgttttacaactatgggtctcactttctgagttgggtggcatgaggttgcctccccagccatcgccctggctgctgcgcctggaattgaaatcttgccctgaagtgccacctagtggtcttctatgtgaaggattttctttttcctcccagttcttatcctggaaagctcaggcatgctccacggcactgaaaggaagatgggtggctcacgcctgtaatcccagcactttgggaggccaaggtgggcggatcgcttgaggccgggagttcaagaccagcctaggcaacatagggtaaccgtgcctctacaaaaaaaaaaaaaaaaaaaatagccaggtgtggtgcacgcctgtagtcccagctactcaggcggctgaggggaaggatggcctgagcccaggaggtcaaggcttcagtgagctgtgattgtgcccctacactccagcctgggtgacagagtgagaccctgtctcaaaaacaaacaaacaaacagaaacgtggctgggcatggtggctcatgtctgtaatcccagcactttgggaggccaaggtgggaggatcacttgaagtcaggagttcgagaccagcctggccaacatagtgaaaccccatctctactaaaaatacaaaaattagctaggcgtggtggcaggtgcctgtaatcccagctactcaggaagatgaggtgtgagaatcatttgaacctggaaggtggaggttgcagtaagccgagatcatgccactgcactccagcctaggtgacagagtgagattacgcctcaaaaaaaaaaacaaacaaaaaaaacacaaaaacctgaacctcgtgtaagtactccacccagcaagcagggatggtctctgcagtgtccatgaggttgggagggagcgtgtggccatgactcttgcctcagcccccagccatgaccctgaccctgaccccctccactcccaggactacatccccgtggagggtgagctgctgttccagcctggggaggcctggaaagagctgcaggtgaagctcctggagctgcaagaagttgactccctcctgcggggccgccaggtccgccgtttccacgtccagctcagcaaccctaagtttggggcccacctgggccagccccactccaccaccatcatcatcagggacccaggtaggcagagcctgggggtcggcttaagcaggaggagagggaagactggggggtctctcaactaggtctgtcagacttascaaatccaaacacaggacgcccaggtaaatctgaatttcaggtaaacaacatasamgttggtaggataagtatgtcccatgcaatatttggaacatacttatccttttttttgcaaaatgggctgggtatactggctcacacctgtaatcccarcattttgggaggccaaggtgggaggatcacttgagcccaggagttctagaccagcctgggcaacatagtgagacctcgtctctacaaaaaataaacaaattagcttggcatagtggtgtgcacctgcagtcccagctattccggagactgaggtgggaggatcacttgagcccagggggtctgggccgcagcaagctgtgatcgcaccactgcacagcacctgggccatggaatgagatcctgtcccccaagaaaaaataatcttgttgtttatctgaaattcaaatgtaactaggcatcctgcattttatctggcaaccctacagctagagaggctgttgtcaccacacaataggaattctcccatcagaccctggccctttggcttcagcctcaattccaactaacatgcagatgcttgtggaaggaaggagtgggccagttagttcctatcagccctcagcctcccaactgggagaaagcctgccaggaagatgggagaggagggagatactcagggtacagtgtggagatgggkyggggagcaaatgttctcatgtggaatgttccctgagctgccaagggagaaaggggcagaccaactccctcccgcttctgttcctccagagaccctcctgggtcctccgccaagcttggcaggatgctctatgtggcagcaatggggcaccaccaggtctccagagacgcgggtgggcaggtctgagttgaatgcgctgggtagagcgccctgggtgttgaagtgggtctctggcgccccctggtggygaagggggatctgagtggttgcccggccccaacctgacccgttagatgaactggaccggagcttcacgagtcagatgttgtcatcacagccaccccctcacggcgacctgggcgccccgcagaaccccaatgctaaggccgctgggtccaggaagatccatttcaactggctgcccccttctggcaagccaatggggtacagggtaaggcggggggctgagggycacgacaggtggatgggcggtctggcaccagcactcacagaagaggtgggcygtccvaggccagggccccctgagagagagcagacagtggaacctagcacaggtggtcagagggaaacccggtctgtgctgggaaagagggaagacccattcctgagtttatcagacatttgccctccttcctagaatggggccccctcccacccccgcatgggagatacccccacctgctctgccctagtcctgacgtgtgcacatggcagatctctcagcccctccctcgggcctcatctgtgcaaagaggacagtaagggcagaggtcagaggagggacaggcagcttgggtgcctgctgctccctgctgaccaggacccctgtccctgggggtaggtaaagtactggattcagggtgactccgaatccgaagcccacctgctcgacagcaaggtgccctcagtggagctcaccaacctgtacccgtattgcgactatgagatgaaggtgtgcgcctacggggctcagggcgagggaccctacagctccctggtgtcctgccgcacccaccaggaaggtgaggcctcgccatgtctgtccatttgtcccctggctgccctgatgccagcatgcccagacctccctccctctgccactgacagcactcttcctgtattycccgctccctagtgcccagcgagccagggcrtctggccttcaatgtcgtctcctccacggtgacccagctgagctgggctgagccrgctgagaccaacggtgagatcacagcctacgaggtctgctatggcytggtcaacgatgacaaccgtaagaaccagatccttctttcctgcccacagggagaacagccatggaaggggaggggacmaagctggagggagctcttggtcactccctggacctgctgtgcagggcactcgaggccttcatcctggtcagcggataagcctgaggcatctttagggttttggccagatttgggctgggttgcattctaagaccaaacccagaaggttgcagggtgggtggttacctatgtggagtgaggtcacaggcccaggggtacccctccccatgcaggtaaccagggagctcacacgtgcatggttttcttagggtgagaggaaagttaccggatttagcaaacagaaatacaggaggttctgaatttcagatagcactttaaaagattattttgtacattgagaggccgaggcaggtggactgcttgaggtcaggagttcaagaccagcctggctaacatggtgaaacmgtttctactaaaaattagacaggcatggtggctcatgcctgtagtcccagctagtcaggaggctgaggcaggagaatcacttgaacccagaaggcgcaggttgcagtgaaccgagatcgtgttaccgcactccagacwgggtgacagagccagactccgtctaaaaataaataaataaaaaggattattttatacattattttrtctagcagcccgagatcagaggtgcctagcagaacagttatttctccagtcctggaagggaggcagggtgggcaacccctatgcgtgcccttgccttgtgtggaggcaccgtggatatatgggtagaggtgacatcgaggccaacttgagtccagccctggctctgccacttactcagcagagtcccttggaggactggtgacatatgtccacgccagtcatgctgacgctcagggctccgcaggyggcaattcagcagtggctggctttgccttgcttccccagcccctgggtgccatccaggggatgcacggccgtcctgctgtgtcaggggtggtgttgggaccaggctgggacctgggtgaccctctgaagcactctctctgccccaggacctattgggcccatgaagaaagtgctggttgacaaccctaagaacyggatgctgcttattgagaaccttcgggagtcccagccctaccgctacacggtgaaggcgcgcaacggggccggctgggggcctgagcgggaggccatcatcaacctggccacccagcccaagaggcccatgtccagtgagtggtgggcasggaggtgaggggcagaccgggcaggggggcagggggcagcagccagggccctggctcactcccctgccctgcagtccccatcatccctgacatccctatcgtggaygcccagagcggggaggactacgacagcttccttatgtacagcgatkacgttctacgctctccatcgggcagccagaggcccagcgtctccgatgacactggtgagtggagacctgggacccacaasaggacagtgggggtcttgggtacagagtgagtccactgggtccagagagggcaaaggggccagcaactagaggacatggaggttaaggcagccttggacaaatgcaatggagtgcacatctgtgcatggggcacaggaaccagtgcctgggggacagacacacacagccttgtgcaagcgcacatgagttcatgcccacgggaccacgaagaaacacagcttcacaagttgaaggttcaccagctgtgccatgcacacaggacactcaggccaccccccaggggcaggcctggcccaggagccctgggcagccaccaggcggccacctggcaggggtaggggagccaaggagacaagaacacccccaacagctctgtccttcctccttgattcccagcacaaagtgctgcggagcccttagctgggcctcctgagtgctcagtgtcagctgtggctccacctgtgggacatcagatgaatcactcatcctttccatgcctcacttttctgctctgtataatgggataccaatcacacagtaccatgagtggaaaaacctctggggcacgtatatcttttgtattttcttctgtccctgccgatgcctcaagctgcccccggtgaacacatactggcccccacggggctcagcttgggcttaaggagccattttgaggggttcaggtggagcgcagctggtgtgactctggaaccccagctcagctgcttctaacactacctgcgaagcgctcggtggcttgcggaacggtccctgggaggcgggcaggggcaagattcctctctccattgtacaaacgggaaactgagtctcggagaggttaagtaaagcaagggagacctcacagctggtgacagagcccagacttcccccaggtytctggcgggtccgggggtctctcctccccagctgtgccgaggctgcacycgctcatctggaaaggcttcagccgcgcaagggtttcacctgccgcggccttcccgctccggccgtgcgcatctacccccgcccccaacacacaccccgggatcccgggagctggagacgggctcccctcgcagagcctacggccttcccccgcctggccctgctcggcccggcgccccccggcggtgccaacgcggcccttcgttgttcccaaggctgcggctggaagttcgagcccctgctgggggaggagctggacctgcggcgcgtcacgtggcggctgcccccggagctcatcccgcgcctgtcggccagcagcgggcgctcctccgacgccgaggcgccccacgggcccccggacgacggcggcgcgggcgggaagggcggcagcctgccccgcagtgcgacacccgggccccccggaggtgacaggctcacccgccgccccccgatccgcgcccacccagcctcactcgcgcctgagggcctggggtgggcgtctgcgctgcctcgggggccccagtttcagccaggcccgggccttggcggctgggagcacagctgctcagaggcagggcccagtgccaggggacgcgtgaggcaggcgcttgggcccttatggtgcctgcctggccagggggtgcaaattcagaagaggcttggggatctccccagggcagagctgactgcagacgcagcaaacccccgccactgccagggtcagcagtgctcacaccgatagagtggccggccagaggatatgggctgtggaagcctgggtggcccttgggctcctgcagggacagagggcctctgtccctagtggtttgagggaaactggttgtatttaagcaaaagccacccagagggtgggtgaccaggaatgtgcagggcccagcctgccccacggggcccgggtctggggcaggcctgaccaagggaccctgctctccccctgcagagcacctggtgaatggccggatggactttgccttcccgggcagcaccaactccctgcacaggatgaccacgaccagtgctgctgcctatggcacccacctgagcccacacgtgccccacygcgtgctaagcacatcctccaccctcacacgggactacaactcactgacccgctcagaacactcacactcraccacactgccsagggactactccaccctcacctccgtctcctcccacggtgagtgacctcagccaaccctgcctctcccactaacccttcctctcttccagctcctggagcctcgggcttctgtctgctgtccccaccgcccattctccaacatacacacacgcatgcacacatgcacgcacacacgtgcayacacatgcatgcacacatgtacacagacatgcatgcgcacacgtwcacacatgcatgcacaytccctgctcctctcactcttgttttgtcctgccctaggcctccctcccatctgggaacacgggaggagcaggcttccgctgtcctgggccctggggtcccggagtcgggctcagatgaaagggttccccccttccaggggcccacgagactctataatcctggctgggaggccagcagcgccctcctggggcccaggtagtacaggggtggccatcctgtctccacagctgtcctgctccatctgtcatccagccaccatagcagccgccagctgtgcccactgcttcccctccattccatccacaggacccccgcctgcccacaggcgstaaccacctgccctaccatcagtgstgatgcctaactctgcctctgccctcccagggggcggggctggggctggggcaggagaggggccaggccagctgagcagttgagggggtggggctggcagactcacggggctcactctcttttggcacaagcagggcstgcaccctgctggaggatgtgcggtaggtgctgggcagcmtggacagggtgttgcagggtgagtgagttgtccagccagcggtcagtgtagacatgccagctgagggagggaggtcagggggcagcactgtgactcccactgagaccctagcccctgcatctctggctgactgcggcctcctgtccscagactctcgcctgactgctggtgtgcccgacacgcccacccgcctggtgttctctgccctggggcccacatctctcagagtgagctrgcaggagccgcggtgcgagcggccgctgcagggctacagtgtggagtaccagctgctgaacggcggtgaggcatggtggctgccaggctgyggggtgcagccctgcaaggcctggccccagtgwgacacatagggtacctcagctgtgtcaggaacccacccaagtcccttgagcgctaaagcccccatccascctgaragggtctcccaccccattctccaccccacttctttgcctcccctcttctgaggtctcacccacctccctgggcctctctcctggtcattctctgctaggttttgcctaacaaggcccctttgggctgggatcctagggcctctsstggcctgagatgcctttgggggaacaaggaagtggcacttccctgggcaggcacattcaaagcagcatgaccaggatgcaggatgttgcctaaacatgagtgggattacaggctccactcttgtatagtacacaatctgaacaaccagccataccatactgtacccaacctgtacccaaaccacagctagtcctgggtgggtgataactaggtctcgatggcagcttagggacgaggaggatcaggccaggggtgggagtracactgcactactgtgtgcccccacctgatccccccaggtgagctgcatcggctcaacatccccaaccctgcccagacctcggtggtggtggaagacctcctgcccaaccactcctacgtgttccgcgtgcgggcccagagccaggaaggctggggccgagagcgtgagggtgtcatcaccattgaatcccaggtgcacccgcagagcccactgtgtcccctgccaggtgagttgcctcccccagccccagagctgcccccatcatgcccaccacccacccacaggctgatgctcttcctctactgcccccaggctcsgccttcactttgagcactcccagtgccccaggcccgctggtgttcactgccctgagcccagactcgctgcagctgagctgggagcggccacggaggcccaatggggatatcgtcggctacctggtgacctgtgagatggcccaaggaggaggtgctgcccaccccgggggcaggagtgrccaggggaggggtaaagaggsggccgcakasgctgaaggcrtcttccctgctcagggccagccaccgcattccgggtggatggagacagccccgagagccggctgaccgtgccgggcctcagcgagaacgtgccctacaagttcaaggtgcaggccaggaccactgagggcttcgggccagagcgcgagggcatcatcaccatagagtcccaggatggaggtaggcacctgtcctttccttcacccccacccctcctcgggccgtgcctccttctggcaccaccctctgactggcctatctgcccaccccaggacccttcccgcagctgggcagycgtgccgggctcttccagcacccgctrcaaagcgagtacagcagcatcwccaccacccacaccagcgccaccgagcccttcctagtgggtgagcactgagggctaggggatcccggctctcctgggacagggagctrgcagagggagaagggcagaccccaagccaggtcatytaatgcctcctcctccacagatgggcygaccctgggggcccagcacctggaggcaggcggctccctcacccggcatgtgacccaggagtttgtgagccggacactgaccaccagcggaacccttagcacccacatggaccaacagttcttccaaacttgaccgcaccctgccccacccccgccaygtcccactaggsgtcctcccgactcctctcccggagcctcctcagctactccatccttgcacccctgggggcccagcccacccgcatgcacagagcaggggctaggtgtctcctgggaggcatgaagggggcaaggtccgtcctctgtgggcccaaacctatttgtaaccaaagagctgggagcagcacaaggacccagcctttgttctgcacttaataaatggttttgctactgctaggccctgccttgcccattcttctggggcctgagaggtgctcccctagggtaggggagcggttctgacatcccccattctctgacacccaagcatacacccacctctagaggaggcaggtaccacattggaggcacaagtttattgagcacccggatatggaagatggcaccgggcacagagccgtgggactggcctgcaggccccgcaccctcaccgtgtgctgtcctgggggtgcctcacaagcacagcaccttggctccatcggctgcttgagagaggtagaaggtggcagtcccgccgtagtgctcctgtaagaggcgggctgggggtgagtggcagggccccgggaagctgccgctcctgcccgcccaggccctggtgcccgcccacctggatgtgccgcatggcgtggggagcagcggaggcctccagcagtgtcaccgtgcagccaccgaagccaccgcccgtcatgcggctgccataaaccccaggcacagcaagcgcagcctccaccagctggtccagctctgggcagctcacctcatagtcgtctctgcagagaggatattgaaggggtgggcctgggccggcctgtgcccggcaggagcggggcgcccagagggcctcacctgagtgagcggtggctctccaccatgaggcggccaaaggctctgtagtcgccacgtctcagggcggccgctgcctgggccgtgcgccgaatctcccccaccacgtgccgggcccgccggaagccctctttgctcaccaggtccctggcagctggggaggaaagaggagtcagcagccgccttctcactgcctggggccccgacgcctgtgaggaccagcaggcggtgatggcagtggccctggctggacggtgaagggtggaaggccgcgggggcggggcagcctggctctctcagacgtgggtctgaagagcccctttatcacagtgcctcctcccccgactgtaaaatgggacaccttggtccttcagggagcagtgagggttgaaacactccatgctttccaaggtgagtgctgccctcaagaggccaccacagagcaggaggagaagaagttctgctgagccacatggagcctccagggctggggctccagaagagggggcagaagcagccagggaccagcaggctgtcccatctgactggagctgaggctggaggggtacctgggtcagtaccagtactgactcagtgtactgcgcccggccaaacccgcaggtttaagggggaaggttgttagggtaggtggcatggcgggatggaggggcaagtagattcaaaggactgagaaatgaatgggtgggcgcggtggctcacacctgtaatcccagcactttgggaagctgaggcaggcagattgcctgaggtcaggagctcgagaccagcctggccaacatggcgaaaccccgtctctactaaaaatacaaaagttagccgggcatcgtggcaggcgcctgtaatcccagctactcaggaggctgaggcaggagaattgcttgaacctgggaggcggaggttgcagtgagtggagatcatgccactgcacttcagcctgggtgacagagtgaggctccctctcaaaaaaaaaaagaaagaaagaaagaaagaaatgagtggaaatgagacagtgggtggtgttttaggagggaagaaaactgagcatgtcttggaggctgagggaaggagccaggcagccaggcaggggatggaaggagagggattgcgcttctagggcaggactctggaggaggcagggtgagctgctcctatgcagaaggagacctggaggaggggcaaggacaggctggggtggggaggagggaccaacttgttccagtgtgaaaaccttggccaagggcatctgcacagagcaggcagggcaggtctgagcactgctctggagaacgtgacacagttcacaaaggaaaaggacagggaggtccctcggagctgtctagtgtccctgagataggcacacctacactgccaggaaggaacaactcagtgtgggcagcacggccagccagtcaagagcatgggccctggagctaatctgtccagatggggttcagatcccagcactgcctctcactgtagattcccccatcaaaaatatgacaactatggtagcagaatgtgctttacagagttttggagggaattaaatgagctaatattgataatgaccttaaaactgtccaatagactaccttcctggccatgtgtagcaggagccttaaggatacttgtatcttttttgttttggagacaggatctcactttgaggcccaggctggagtgccatggtgcaatcacagctcactgcagtctcaacctcctgggctcaattgatcctcccaccccagcctcctaagtagctaggactacaggcacacaccaccacacctggctaatttttgtatttctttagagatggggttttgccatgttgcccaggctggtctcgaattcctgagctcaatgaatctgcccaccttggcctcctaaagtgctgggattacaggcacagacgtgagccaccgcacccagcctacaatacttgtgtctcttgactctgtaatcctactcctaagaatccatttctaagaaactattaagagaatgcagataggccaggtgtagtggctcacgcctgtgcctgtaatcccagcactttgggaggccaaggcaggcggatcacttgaggtcaggagtccaagaccagcctggccaatatagtgaaacccagtgtccactaaaaatacaaaaaaaaaaaaaaattaactcgctctggtggcacacgcctgtagtcccagccactccagaggctgaggcaggagaattgcttgaaccctgaagacggaggttgcagtgagccgagatcacgccactgcgctccagcctgggctacagagcaagactcagtctcaaagaaaaaaaagagaatgcagataaaccgggtgcctttggttgcagctacccaggagactaggtgagaagattacttgagcccaagagttcaggtccagcctgggcaacttagcagaacccatctctttaaaaaataaaaaagatggccaggcacagtggttcatgcctgtcatcccagtactttgggaggctgaggtgggcagatcaccaggtcaggagttcacgaccagcccgaccaacatggtaaaacctcatctctactaaaaatacaaaaattagccaggtgtggtggcacatgcctctaatcctagctactcaggaggctgaggcaggagaatcacttgaacctgggaggcagaggttgcagtgagccgagatcgtgccactgcactgcagcctgggtgacagagcaagactctgtctcaaataaataaataaataaataataaaaaagataaataaaaaaagttaatcacagtgtgaggtgtatcagaaaatagttaagtaaatgacagagcacctgaatgctaaaatattgtggagctttaaagagccacacggaggccaggtgcagtggctcacacatgtaatcctagcacattgggaggctgaggcgggcagatcacgagatcaggagttcgagaccagcctggccaacatgaaaccccgtctctactaaaaatataaaaattggctgggcgtggtggtgggtgccagtaatcccagctactcaggaagctaaggcaggagaatcatttgaacccaggaggtggaggatgcagtgagccgagattgcgccactgcactccagcctgggcaacagggcaagcctccacctcaccaaaaaaaaaagaaaaaaaaaaaaaaagagccacaccgagatatgcctttcatggcataagataagatagggttctgggttctgagattatgtttagtttaaaaaaaaaaaaaaaagagaccggcactatggctcacgcctgtaatcccagcactttggaaggctgaggcgggaggatcacctgaggtcaggcgtttgagaccagcctggccaacatggtgaaaccccagtctctactagaactataaaaaatgtgccaggcgtagtggcgggcgcctgtagtcccagctactcgggaggctgaggcaggagaatcacttgaacccgggaggcagaggttacagtgagctgagatcgcaccattgcactccagcatgggtgacaagaccgaaactctgtgtccaaaaaaaaaacacggcaaatgggctgggcgcagtggctcatgcctataatcccaacactttgggaggccaaggcaggaggaccacttgaggccagagttcaggatcagcctgggcaacactgcaagaccgtctttacaaagataaaaattagccgggcatggtggcacacctgtaatctcagctacttggaaggctgagctgggaggatcccttgagctcaagagttcaagtttgcagtaagctatgatcacaccactacactccagcttgggcaacagaatgagaccctgcctcttaaaaaaaagggggtggggggggaaagtgatgatatattacatatactcagctttgaagacagatgtggaaaaatactgaaaggaaacgtgaaaatgtcagcagtggctatctctgggtagtggccttatagcttattattttctactttgtacttttctacattttccacaatggaaacatgatttttctgattagataagaccattttaggatttcaagcagccctgctgagattggaaccctgggtgcgcagtgtttgaagggactggggagagcatggcagaaggccctggagatcggggtcccaggcagggtcaaggccacactgaggcgccagcagggagcacagccgcctccaggatagagcaccctggcagttctcaccctctagctcttccagttgtacctcccggaggctttccttgcccagcgcccgggccacttcttcacattggcgccgccgcacagggtactcgctggaggccagggagtggcggacattagagttggtgatgagcacggccagcttggggtccgagagtggcaccaggctggtctccaaggacctggggtggagttacaatgggggagatgacgaggccaagcgtgtgcttgctgcgccaggcagtgggcacactccacccaggagctgctgagtgcagggcgggaggggacgaggggagcgagcccaacctgcagtcaatgagcagcgcgtggcctttctgtcccataagtgagatgaactggtccatgatgccacagggcatccctgcgaagctgtgctcggcctgctgacacacctgggcgcgggcagctattgtgcccgagtctgcagtacagggtgaggtggggaggctagggctggtggaagcagcagtggcttcaatgacactccagggagattccctgccaccccctccataaggcatagtagaagctgggaccacctggagacctcagggaaggagggctgggtcagggctggggcctagctggtacctggacagagctgctggaggaaggtgtacgtggccacttccaaggatgctgagctggacaggccaccccccaggggcactgagctgaccaccactgcactgaagccagggaggggggcagctgcaggggaaagaacaggtgatggtaagaggggctgcctgggaggatggcacaggaagggcaggtgtcctggcgggaagggcagcaacggcctagcagctgtttctagggtgtgtgtctcaattgtcagaagccaccaacctgctgggccaagggacccactgccctccattttcccaccctctgaggttgctgggacacttctaattgtcctcctggtttagggctctggagggaaaaaaggctggggttcaaatcctggctcctccaatcaggtcacgggaaacccagggcaagttcccgaccttctgggggcatcagtttcctcatctgtacaatgggatgctccactctacaagccttccccacagtgtatcag

SEQ ID NO: 97873 - DNA, 52715 bp, Homo sapiens
caacaccattaccttggcttgtaaaaacgtatcacctgctgctgggtaggcatacagtgggaagaactcaggagtcacaattctcattttagacctcattcatgtctagactccttttaggggatttaagtgtatcactttagctctgcctgagtatctgcaataagatggtgggtcacctgataaccaggatctgtaaagaacaagagaccagctaagaagcctctgagggtgaagagactcaagtggcctgggtgccccttacctgcatggtaagccttggcgttcacacccctgcagctgagctctatggccagctgttcacaagcctctctagtcctgcagtacacaatgccgcagccagataactgaatggggagatgcaggaagaaaataagcatagcaagaacagaacaataggcccagtgtaatgcaccctgctctaaaagaagctctgtgttccttctctcgtcggcttcagtctcttctgaggcaggacacccagtgaggctctgtcactttataaaaagcaggaccaggctggatgcaatggttcatgcctgcaatcccagcactttgggaggccaaggtggggggaatcacttgaggccaggagttagagaccagcctgggcaacacggagaaaccccgtctctgctaaaaatacaaaattaaccgggagtggtggcgcatgcctgtaatcccagctacttgggaggctgaggcaggagaatcgcttgaacccaggaggcggaggttgcggtgagccaagattgcgccattgcactccagcctgggcaacaagagcaaaactccatctcaaaaaaaaaacaggccaaaagctgctcaaaactcaacctgtttaacttctctgcctcctcttcatgagctttgcatgggtctgcagaggcatcacacagactggctggctgcttgccttccacaggatccagaacaaggaaaccctggtaaggaggacaatgccaggaaaccaaagagacaactctttttgtgcacaagttttaggaagcctggctgagaaagctagaaaaaccaaaggtcttagaccaatctccatctccatcacatcgcaccccactgctctaacagctgcttggcctccacctcaatgcctcacccctttatcagcctcctgtccaagagccttaaggcagaagtccttcaggttcccatagggatcagaaatcagttccttgaattgcacatcatagaagaggttggcccggaagcagggagtcttgaagatggcaactggtttcttcaggtgcagggcagcaaacacgtcctcttggacctgtggggtggctgtggcggtcagagccacacaaggggcatgtcccaggcgggagcgcagggcacccagacgcaagtagtcaggacgaaagtcatgcccccattgggaaacacaatgagcttcatccaccaccaagtaagacagcaggtggcgggacaccagggagttcagggtgggctggaaggaggatgaagctgccatctctggggtgatgtacagaatcttggtctggggcttttctcgctccaggtcagcaagcagctccttcctttcctgtgcagagagcttcgagttcagggaacttactcgtacctttagggttagcaagtggtccacttggtcctaagagaagagaaagaggctgtaactggccctcaggactcaggtaaacatcactgcaagtccctggaggatttcccagtcataaactgtcctcctcccaccctccaatatatattctctttgcatagaagtagtagaggttgaatatcctttatcaaatgcttgggaccaaaagtgttctagatttcagatattcctggatttaggaatatttgcagattgcatatacataatgagatctcttaaagatgagacccaagtctgaacatgaaattcattttttctttcacgtataccttatacatatagcctagatgtaattttatatatttttaataattttgacatgacgttgtgcacatgtacctagaacttaaagtataataaaaaatatatattaaaaataataataataattttgtgcatgaaaaaacagttttggctgagttttgaccgcaacccatcacatgaggtcagaaaggtgtggaactttccacttgtggaatcacgtcagcactaaaattttttggattttggagcatttcagatttcagatttttgctttagggatgctcaatctctatggaaggtgaagtggtttagagcacaggctctgaagtcagacagacttcagatttagatttcatcctggctcacttaatcgccacatgctcgctggctgtttcttaccctctgaacgatttatacaattctatctaatagcattgttgtataacttaaaatttacatctgagaggtgaaattaacgtatgtaagccgggcgcggtggctcacacctgtaattccagcgctttgagaggctgaggcgggcagatcacctgaggtcaggagttcgagatcagactgaccaatatggtgaaaccctgtctctactaaaaatacaaaattagccaggcatggtggcgcatgcctgtaatcccagctactcgggggactgaggcaggagaactgcttgaacccgggaggcggaggttgcggtgagccgagaacacgccattgcactcaagcccgggcaacaagagcgaaactccatctcaaaaaaaaaaaaaaaaaaaagaaagaaagaaattaatgtatgtaaggcacttagcacgaagcctgggacctggtgaacattcaccaagttattactgtagttccctctctaccttccttcatggtggatggctcttacccacacagccacacttcctcaattctgattctatcagcccatctgcaggccttaaatagtcagaacacctgtagagcagatgttaataaggtcccagacagtttctcatctttttttctgtttcacatactgtgcccttaccaaaataagcaggacaccagggattccccatatcaacttagctatctatccatctgcaacttctgtctcaacatcacgagtgcacgtgtgtgtatacatgagactgagtgtatatgtgtgtacaaatacagtttcatactcctctgaacaaaaaaataacaaaggagggtgagggacctcagaggagtcattcataacctcccagagtgatatgcaccagtggagaacactacattggggaaatacagaaacccaatatagcgaatgagataggcaaatcatagaaaataagaggcaggggcgggtgtggtggctcacacctgtaatcccagcactttgggaggccgaggtgggcggatcatttgaggtcaggagtttgagaccagcctggccaacatggtgaaacctcatctctactaaaaatacaaaaattagccgggtatggtggcatacacctgtaatcccagctatatggggggctgaggcacaagaattgctggaagccgggaggtggaggctgcagtgagccaagatcgcaccaccgcacttcagcctaggcgacagagtaagactctgtctcaaaaaaaaaaaaaaaaaaggaaaaagaaaaagaaaagaaaataagaggcaaaagaccaatagagaagtgaaatttccagcctcaaaaaaccttccccgaatctttttgggctaccatcttcattgccctaagcctcacctgaatcaaagcaatgagaggagagactacaatggtgatgcctttggccaacagagcagggagctgatagcatagggattttcctgcccctgtgggcatgcacacaaagacgtccttgttacctgaaaaaatacaagacaacaatatctcagtgcttcctgccttttcattgaagttgttgaaaattaaatgagaatgtaggaaaagcacctagcagagtgtctggcacatgggagggtctcgatgtaatcctaattcccctcctgtcctttctatgaaaaaggcaaggatcctgggaaacttggatacatgcccaaaccatttctagtaatggttaaaaacaagatttaaaaagtctgggtcaagcgcagtggctcacgcctgtaatcccagcactttgggaggctaaggcaggcagatcacgagggcaagagtttgagaccagcctggccaacatggtgaaactctgtctctactaagaatacaaaaattacccaggcatggtggcacgtgcctgtaatcccagctactcaggaggctgaagcaggagaattgcttgaacccaggaggcggaggttgcagtgagccgagatcgcgccactgcactccagtgtgggcgacagagcaagactctgtttcaaaaaaaaaaaaaaaaaaaaagaagtctgagtctgctgtgatatggatgattgaactaaacagccatgaaagcagagtactgctagatgagtgggtacatctgtgtagacatgagaggacattacttagagggcttttgtttagacatgtatcattaatattacattgctgctcgcctcttggcaacttccatttgtcaccgtatctcaggtttataacattattactctttccttctctatctgggaccaaggccactcaacctgcaacaagggaattacctaggaggccagtgaccgagttaagttattcctaccaccctcactgttgctgttcgtttgtgtgtacaaacgaacaataatgagaatctgaagtgttttcaaagaccatgtgtaaatctagctatgaaatatagaccagctgggtggttctgccactaaaactacaagctttgggccgggcgtggtggctcatgcttgtaatcccagcaccttgggaggccgaggtgggaggattgcctgagcccaggatttggagaccagcctgagcaacatgccaagaccccatctctaattaaaacaaataaacgaaactacaagctttgacaactctaaagatttccaaatccagttatggaccaaaggtgaggcagtacgaagggtgaggaggagggtgttctgccgcagcgttatggtatagccagcataaatttaaaggaaggtagcttggtaatgttaccttttactacagccatggtcgcactctcctgtaaaggcgtcttaaaagagtcaaacccaaagaccttcttcagcgtactccggactcgccgctcagggtcaaaaggaaaggtggtatggtggctgctcatcttagccaagaacagtggccaaaggttaaggcaaaggtagtaaaaggttgccacgagaaccctctgttttgcattaaaaatacagattatttttctgtaacaatttgctatattacacttaaataatgtattatttttaagtaataaagctgaaggtgaactgcctcaagcaatacattcctcagtaattaacatctccacttttacgctcaatgaaaatgaaaacattgaactattccaggccacggtatagcacagagctagaaatcagatcaagagaagaaacataaatgtcttcagaacagcttggagaacggggaaccgttttcctaagatccaccacctgctcctacttctataagcgcaaccacgacgaccgttcttccaccccgggaccccgaaccccttctcccgtcttcctgagcccaagatccgcaattttctctcttggctggccgacacctccctctcttcaccctaagatatcagaaccggccgtggtccgcccaagaattaaaggctgctggctggttccggaactgttcgaagacccctatacacaaccccaactcagagaagccaaagcgctgggaattcagctttaggcagaacccacgcaatcttatatccgtcgcgcagtgatgacgtagcgcgagcgagggcatgagggcggagacaggcgcaggaaactgccgttttgattggtttccagtgtggcgcgggggtctcctgggttccgaaagaacctgcctttccgcccggaagtcggcgtcttgagtcataggagtgagccacgcccgggctgtgggaataagatggcggggaagaagaatgttctgtcgtctctcgcagtttacgcggaagattcagagcccgagtctgatggygaggctggaatcgaggcggtgggcagcgcggctggtaaggcccaagtgcgaagctggaagggggaatcgggtgtctgcccggaatgctgtaccctcgctgggcgggagggaacaagatggtcattgtrctccaagcaccggaccccgaagaatggtccagggtccggggtgagatagagcattagagactgtggactaagaatgaagaatctccttcccgttatttcgattaatttgcctaaacttactgaaasactccgtgccggctatagtgatagacagagggatggacgaagagggagcggctgctcagccactgcctgtttcccctgggctcgttgtttgatgagggagagcgataagtaaaacatacgtggaagatggtaaagattgtgttcgttaactttataacttttagttaggaatgtgccctaaacacatcttggagcttttaaaaacaaacgtatctgatgcccaaagtgagagaacctaattcggtagaactggggtaggatgtgggcatttgtgaactttttaaggatcccaggtgatttttcttattttgtgagtttttaaagcctaacggtgatgttctcctcctcaggttgagaagcacaatgttagataatggaaacagattcctttgggagaataaagaacaagttacctaacaacatatsaggaccttagcttcctcatctggaaagtgaaggggattggattaggttaggtacttccatgttttgtgattttgtgtggtctcttccagtcagaaagttctctgatggtttcctataaacactttagtgtttatctagtgtttatagcattagaaacagaatttagtactcggttttgttccctgaccttttaatgattttattcagtaaatgctggccttctcagagagccgaatctgggcctattgtaacttaacatgagatttaggttccctttgtatcttcagagatagtcttggccactcaaatctctggacattttttcttacattgtaactcttgttttttttttcttgctttttgtttgtttgtttgttttttaacctttcagaggagaaaggcggattggtatctgatgcctatggggaggatgacttttctcgtctagggggtgatgaagatggttatgaagaagaagaagatgagaacagtagacagtcggtaggtraatctcccagatccagagctactgaaagcacaatttcatttgtcagattttggaactgtgccaacagtgttccatttcatggttagctccatcccttgctctcccgttttgttttagtattagtggaagaaactggattggatatcagatctgtttgaaaatgtattttcacatggatyattttttattaatctttgaattgaaatttgggggaaaagatagtggattattttatttaacccagatatcaatgggtgttttatgttgatttttccctgtttaaatgatttactccatttatagcaggcattcatcctaactggtgtatcatttatatctacagtcaactctgcattatttttaatcttggttggggctcatttaagtcttctcagtttattaacaagataagaaaggaaaattcgttttcacctgctttttcttttcttttttttttttgagatagggtctcactctgctgtccagattggagtgcagtggtgtgatcatagatagttcactacagtcttgaactcctgggcgcaagtgatcctcccacctcagcctacccagtagctgggactacaggtgggcgccaccatgcctagctaacctattattatttttttttgtcggaatcttgctctgtcgcccatgctggagtgcagtggtgcgatctctgctcactgcaacctccacctcccaggttcaagcaattctcctgccctcagcctcctgagtagctgggattacagacacctgccatcacgcctggctaatttttgtatttttcacagagacggtttcaccatgttggccattctggtctctaactcctgacctcaggtgatccacccgcctcatccttccaaagtgctgggattacaggcgtgagccactgctcctggccgatttttaaaatttaaaaaaaaattttttgtagagacggtgtttcactatgtttcccagtctggtttcaaacttctggcctcaagcaattcccctgcctcaccctcccaaagtgctgggattacaggtatgagccaccatccctggccttcttaacttctttcttgacattttatttggcactttttataatggtgcccttagttcttgatcacaaatcttgcctgaagttcagtaggtgctggagaaaggagaacctgtgctattattaacaagaaagtctttagacacataatcacctgagcaacatgagccagaatttaagtttgcagaaaacgcaaggaaattgaagttggtgcttagcataagacaggcagagttgagtctagatgtcaaatctgactgcttagcaagttttaattaaatcacttaaaatatattatttgtttgaaatttttgttacatgttggtatgtaaatgttagcattaaaattctttccagccaagcacggtggctcatgcctgtaatcccagcactttgggaggctgaggtgggcggatcacaaggtcaggagatcaagaccatcttggccaacatggtgaaaccccatctctactaaaaatacaataattagcagggcatggtggtacgcacctgtagtcccacctactcgggaggctgaggcaggagaatcgcttgaacccgggaggcggaggttgcagtgagccgagatcacgccactgcactccagcctgggcaacagagccagactccatcttaaaaaaaaaaaaaattatttccacaacaaacagaaatgcgttttgtacatgatgcattttgggagatactttcatgcctttagccccatccattaatattgataattcagagttgactgaaattattcagaaaagttttgcaagttgttttctgacttttctgaagtacacacattctggcttaatattcataactctttagtacgtttgcataatgtgtttttgaagtgttatttcatatttgctttgcttagaattttcatcatgtttaagcttcatttcatattttagtaaaatcctctcatcagatcttgttgtagagattctgaaatgtgattgtatttgtctgagctccatctctgtttatttggcatgactgatttcattttaaggagattatggagattgcatttaaagccttggactcactggtaccttacaggacagttaagtctccaaatcatgagtctagtttgttcaagtctctcgagtggtatttatattaatatatggagtgctgtgtaatgtttgggctgaaatgtagctttgttgaaaatagtagtttcaaatgaaaccattttttcctgggtatttagttaaaggcttctgtgcattgggagtgttctkggtagtggaggtgacatggatttagccagctaataaggtagctggtccagcatctgctcctgatctttgaccttcatagcatcagcgttagcgttcagtggaatgrcgggctcgctttggagaatgccttaccgtgtgtgatcctttgtgtcaggctgacctcatctggataaggaacaggactgggtagaatggatcactggcagttctgtgagcacttaggtggaggcagagcccactcaactgggactcctgaaaggttgggcattgccctttagtcctgcctttcccaggtcacttgctcargtagtttgatgcctgccttcctgtgttgatgtttgtgcaaatgccggttgaggtgctgcgatacagctgtgtgtaagccttggcacttggtgttggacactgttagagtaggtccgagtctgatgtacatgtgtatatgaaaaggaaagaaggctcataatcctgatttgaaataactgatacttcagtggaaacacgatgcctgttttattgtgtggcctgatcttactctttcctaaaacatattgcaagctttctccatttttatgtatgtgactttgaactcgggcatcttcattgatgtggactgtctcaccactaaagtaacttgactttgagctgctgatgcttttttgttttttgtttttttcccctccagaatatctctttttccccttatttttctctggttctgagttatatggtaggggagggattcttggtgggatgaccccagctgggtaaatgggctgtttgctccggcccctagttatgcatgtgagactcctcaggcccgctcctttaagcttaatcctctaaattctttgtcttgtaggaagatgacgattcagagactgaaaaacctgaggctgatgacccaaaggtatttggtgttggctgtggtgggtggctggatgcaaacaaggtgtttgaacactgtggctcagttcgtatgtttggtcaagatctgtcccactgacaaactgtgcaactgtgtggacattttctgggataaaataagctttataaagaaagaacctggagacractcaggaatgaacaaatcctgagacacattggatttccagcctttcagattgtgccatatctcctgactagaaaggcgagaggcctggctgaggccaacaacccacttgcattctgcatcccagatggggctttaagtgtcactgccctgcaggtggattagtctgtttctagacccaggaaggtgtaagggccgcctcgcgtgctttgggttctctttagtcatctagaagtgaacaagaggctataagaaggtcagaccaaaatgaggcctctccccagctctcagggatggtgggtctaatgctcattttcctgggggtgtgtccatccacttttgggcaagctgtacagaatggtctttttcggaacaacataactattctcatagtgtcatcctagtagcagccaagagtaatttgtagcaattcctatcacattccataatgatctgttgtgaaggttaagacacccttgtgttggttaagctgctgtgctgtgcattggccattagaaatgtgtacttgctgaagagtcattttttatgaggaaaaacttcccccctgtacccccaaagaaaaagacttaattatatcactctagacccggggaataaggacccattttgcagttaaaaactgctttgaggccagccgcagtagctcacgcctgtaatcccagcactttgggaggctgaggcgggaggatcacttgaggtcaggagttcaagaccagcctggccagtatggtgaaaccccgtctctactaaaaatacaaaaattaactggtgagactggtgggtggtgcacacctgtgatcccagctactggggaagctgaggcaggggaattacttgaacctgggaggcagaggttgcagtgagccatgatctgccaatgcactccaacctgggcaacagaatgagaatctgtctcaaaaaaaaaaacaaaaaaaaactgcttggaaaccagctgtaactttcaagatgacctagtaaaatttaggaaatttatgcccaattawaatctaaaacagtaatattcttgaaaatatagtgtgagctgttccatatttgagctgattctgtgattggatagaactgtatgtagccactaaaatcttgagacgttgtgagtgagaaagataagagtgtgttttaccaggaaagaaagttttggcgccagcatgcaggagggaaaaaaaagaacccctgaaaactgtaaatgcaacctgctttctatgctgagtgaaaaacctggaacccaggcctgagaactcgccctgcctgagaactggcaagatggtatgggcagacccatggccccatagttcaaagtcagtcacagctctcctcgggcttgcagaacaaaacactcagtagtgataatcttctctgcctagtatttagggtatrtgggacttggagcctgcacgtaaaacaagcccagggagccgttaagtgtttgggtttcagttgtggagggaagggaggatctgggtcctagagtctttctgggtacagttgcagccttttcttagggctggaaggcttcctggggaagttggctggagaggagggtacataacacttaacggtcaccccttctaaaatactgtaatccaggcaacaaatccttgggagatgacagggctttgtgagtcagggtgggggtcacatgaaaaacaaaacagactttactgctgtccagtagcagtcactaaagagcggggtgggagggacccaaaaaaggtgaagctgggaagattgtggaaatgccttttgtgctcaggctccccttctcagcccyacatcacggctgacagcctcgtcattcctgcctgctccttgactgatgtgcttcgctgttcctcattcactcatgtgcatttcaagttttactgtggaatgaaaagttttcatggaataatttctgttcctcttgaggagccctcagaaatcagaacacaaaatccaaccctcaaagtcacttgatatagttcttttggagggtgatggagaagggtttagataaagcttgccagcttcaatgttctgcaatccccagtggctgccaggcctttaggagtcctcgtggcatctccaaggactacaaatgatccccagcatgagtcttctgtgatactcttatcttagtcctggccctgtcatccttctgcttgagctggcctcagactctcttccacatagcaacatgtacctcaaatccagaactttctggcacatttacattttatttttatttatttattttatttatttttttgagacagagtcttgctctgtcgctcaggctggagtgcagtgctgtgatctcggctcagtgcaacctccgcctcctgggttcaagcgattctcctgtctcagtttcccgagtagctgggattacaggtgtgagccaccatgcccagctaattttttgtatttttaatagagacagggtttcaccatgttggccaggctggtcttgaactcatggcctcaagtgataggcccgcctctgcctcccaaagtgctgggattacaggcataagccactgtgcccagcccacatttttttaaattgatgtgtaacaatattttttatattcaaaacccttaattttggacattctgctttaagcatatgaagtttttttgtttgtttttkggtttttttttttttttttttttttttttttgaggkggagtctcctctgtcgcctggagtgcagtggtgccatcataacttactgcagccacaacctccctggctcaattaatcctcccacctcagcctcccaaacagctgggactacaggtgtgtgcatcacacctagcaattttttttaatttttttgtagagraaaggttttgccatattgccccggctggtcttgaactcctgggctcaagtaatctgcccacattggcttcccaaagggctgggattagagctgtgagccaccaggcccagtgcacatgaacataggaagtttctaacaatagaatatgttacaagtgtggatctttgttagaagtgttgtttaacaattagattactgtcataattgtcatctccactaggtggcattctcctttctactttggttttttgttgtttttttgttttgttttgtttttgagtaggagtttcgctcttgttgcccaagctggagtgcaatggcgcaatctcagctcactgcaacctctgcctcccgcattcaagccattctcctgcctcagcctcccgagtagctgggattacaggcacatgccatgtcgcccagctaatttttgtatttttagtagagacggggtttcaccatgttggccaggatggtcttgatctcctgacctcgttatctgcccacctcagcctcccaaagtgctgggattacaggtgtgagccacctcgcccggcctctactatggttttttaagatcttttaatttttttcagtagttctcaaaacatttaggtttctttacacaattaaaaattgaggatctcagagttttcattttggttttatctattgatgtttactattttataagttaaaactgagaaaattttaaattacttattttaaaataacaaacctgatccggccacagtgacttgtgcctgtaatcccagcactttgggaggccgaggtgggcagattggttgagcccaggagtttgagaccaacctggacaacgtgataaaaccccatttctataaaaaaaatacaaaaattagccgggtgtggcggcgcatgcctctagtcccagctactcgagaggctgaggtgggagaatcacttgagcctgggaggtagaggttgcagtgagctgtgatcttgtcactgcactccagcctgggtgacagactgaaaccttgtctcaaacaaacaaacctattacatattaacataaataacatttttagaaaaaataagtatttccaaaaaaatgttaatgcaaagagtggcactgtgtcaccactttacaaatctctttaatgtctggcttaatagaatatggctgggtacatataactgcttttgcattcaggtaattataggtattcttctttgatacttcatcaaaactcaacaggtgatagtttccttgaaaggttagttacatcatggaatgcaaagccttaccagtgaactctgcattctgcttccctaaaatccactggtctgtcttgccctttgaatggatcttttacccatacatgatttgatatcgtcaggctctggtgatttgaaaattgctgatgtactgagttacacagatctaaatgttgacacattttgttctgtcgtatcaaaaaagtagtatttattagtgacatcactaatctcatcagaaaatcattaaatgttagaaaccttttagcaagcccacaataaggagcaatacattttttaagataatgtgtttctaataatttttgtttgaaagcatgaatttatcattttcaatatgtgctatcagagctttccttgaagtaacaggctttggtcttgagaaaatgtctgccaaatacccaagtccagataactagtttgtcattmtttcaaataaaaatggtgtttcctgaagaaaactgtcagttcaactggtgactcaaataatcacaaacggtagtccatccttttccgtggcttcagtaacctgaggtcagctgcagtctgaatatattacatgcagtaagctattttgagagagagttcacattcgcatagcttttattacagtatataattctaattgttgttaatctcttactagtttataaattaaactttatcataggtatgtatgtataggaaaaagacatagtatgtataggtctcagtactatcagaggttcaaggcatctactgggaatcttggaacgtataccccacggataagggggcattgctatgtgtgcttttccctgagacatttgtctgactttgttatgcagcagaagtatttatgcatgcctctcatgtcattgcccaaaatattaaagagatgtatattcaaatgtcaagatgtcataaaactaatcatttttactgtcctggcagaaaacttttttttttttttttttttgagacactcactctgttgcccaagctggagtgcagtggcacaatctcrgctcactgcaacctctgccttccaggttcaagtaattctcctgcctcagcttcctgagtagctgggatacaggcacgcgccaccatggccggctaatttttgtgtttttagtagagacagggtttcaccatattggccaggctggtctcgaactcctgaccttgtgatctgcccgcctcagcctcccaaagtgctgggattacagatgtgagccaccacgcccggcctatggctgaccattcttaagtgaaactggctttttttttttttttttggaaacgaagtctcgctctgtcacccaggctggagtgcagtggcgcaatctcagctcactgcagccttcacctcccagttcaagcgattctcctgcctcagcctcccgagtagctgggattacagatgtgaaccaccgtgcctgactaatttttgtattttttttttttttttttggtagagttggggtttcaccatgttggtgaggcaggtctcaaattcctgacctcaagtgatccacccacctcagccttccatagtgctggrattacaggcatgggaatcccatgggattacacccagcccttttttttttttttttttttttaaatcaaacggctacagtttggtgctgccacctcaatttgttctaaaggctagcagtttacccaccattgcttgtgcaaaggtcaacacgatgaaaaagacaatgacttaaaacggttttgactttgcagaccccttagaaaaactactattattctaaaacagaaatcatgggtcagtgattcagtagttgtttgagaactgtttttattgctctgaaaatgtccgttaagttgttagccttatgggrtcttgagccatgttgagggtgggttagtattcagagtaagatgattcagccctggcatggtggggaggagttcaagctctggaatgagactggggttttcttggggaagtcctttaacctcagtttttctcatcgcgaaaataatcatcataataaaatctgtctcatttattttaaggttcaactaagtaaaaataaaatgcagttgtccctcactatctgtggggatcccaggaccccctcctcagatgctcaaggttctgatataaaatggtgtagcatttgcatttagccttgggaatccttctggatactttaaatcatcttatgatacttgatacaatgtaaatggctgtgtaactagttgttagactgtgttgtttagggaataatgacaagcaaaaaagtctgacacgttcaacacagacacaatttaaaacacacacacacacacacacacacacacacacacaattggaggtgagttctggccatggattcagaaccacagatccagagggccggctgtactcgactcagtatgtctggtgtgtgtttgttcagtagcattggctgaactgaccatcacttccagttccacctgtgcacacttcccaggctggtcataccatgttgtcggccggttttggaagagcagattccatgttttaaactggagtgctctcagaagagcagtcataaaggtgaggggactcaaaagcacatcacctgagggaaaggtagagctggaagacagaagactcgggaagagccggggttgcgctctggtgtttgaaggtctgctgagggaaaggctaaggcagcctgaggcagacctgaagccgcgcgcagaattccacagaagtttaccttcayataacgaaggaccttttgtgatctccggccacaagtgggttgagctgtttcataaggtagtgagctccctgtttctagaggtttttcaggcaagttttttttttttttttttttgagacggagtctcgttctgtcgcccaggctggagtgcagtggctccatctcagctcactgcaagctccgcctcccaggttcacgccattctcctgcctcagcctcccgagtagtacctgggactacaggcgcccgccaccacacctggctaattttttgtatttttagtagagacagggtttcaccatgttagccaggatggtctcgatctcctgacctcgtgatctgcctgcctcggcctcccaaagtgctgggattacaggtgtgaaccaccatgcccggccttcaggcaagttgtaagaaacgacttgtcatcaacatcataaaatctgttggtagaggttggattaaactccagggagttccctgggaaccccctaggaaaggacttgggcattatacataagcaaagttgagtattctctaactttgttatctgatgactttaaaatatgcacagactggaattgccctggtttttattgctctgatgtttggggttacctgtgagcacagagtcccatgtttgggagcgtgagtaagaactaactctggcccacctgggcagagagacttggtcctgtcctttaggttggggcagcagggattgggctctgcaggtgctgagtttgccccaaactagcgaacaggagattggagaaggaggctgggcgttgcataggaaacaagctttgtttcctgtgttccattattttttcgtctctaacttcaagtttctgatcttgtctcttcggtaagcagcaaattaacaggaggtggcactgctgttctggaaaaagagcagacgtgacagtcctggggccagcacctcactccgggaaaggagtgcctggtggctgaagtgcttcctccccctgtttacctttggcacccgaacatccctttcgccactctcctttgtccatttttacctcgtttgctctggacggtttcccttgtttatttttttctccactcctacagttcctgtggatgaagctgtttccattcactcactgtccctgacacacccttcctttgaaaacaaacatgggggttgagagcctggagcaagaaagatggagcagcctattgccagctgactgggagggactgggatcgccggcctccctgaggtgctgatctaggaaaagatctagatctcacgctctgatctaggaaaagaatcctcccagcccaggagtgtacatctgtgaaaacaaaattccgtcttctgggtcaaggaggtggcatcaggtgggggttggggggaattgttctggcattttttaaaaaggcgtgtataaccccagttaagagaagacatttttaaaattctaagatccctaaagtagtactaaaatgtggagctcacaaacaatttagagccggtctggtggacttgtggtccgaagacctgggttgtgccctggcctggcttccctctggctgtggaaccacaggcctgtaacttaagcttcactcggctccatttgggcagtcagggccgtgagaccccctttgcaaggtggttgtgactgcggcgtgagagaatgtacatgaaggtgcttttcgcagtatacaatgcacttgttagcagtgcttggccttttcagtgtaactaagtctgattatacgcccttatcctgtaggttagaaggcgccacgatttctcggctcactgcccttcatgtctccatagtttttcacagacctctggaacaaaaagaaatgcctaatggctgagtgtggtagctcaagcctgtaatcccagcacttggggatgcccgaggcaggagaattgcttgagcacaggagtttgagaccagcctgggcaacatggtgaaacccgtctctacagaaactacaaaagttagccaggcatggtagtgtgtgcctgtagtcccaggtacttgggaggctgagatgggaggatcatttgatcctgggaggcagaggttgctgtgagccgagatctgtaccactgcactccagcctgggcagcaaaccaagaccctgtctgaaaaaaagaagaaaaaatgcctaacgaatggttctgtttcttatgtcattagcttcagacactaagtattactgtcctcacaattcagtagctgcttaaaaaaataatatgtgtaagtgtgtgtggtatgtgacatgtggagtaaggctgtgtttcctgtaacagttttgttaaatatcctgtggcacctttgtgagtttgctgggttaccccaggtagtagtctgggaactgtggcagtagattgtcttaagagttccagagtgggggccttgacaagtcctcacttagcctcctctggaggcccagccgggtgagtggttctctgcctcagtggctattcatacccatcctgaagaagaccaggtctcccagttgacgggagttactgactcacagtctagatgaggatttgtattgggcagagctgactcggtaattccctcacccactctcctctcaactccttcccactgtccttgcattactcctgatcttttgaagtaccagaatcaaatatctgaaaactgcctaaggggctaatctcccaggaatttgttgttgactgctgattataggaagaactttgaggagcctgccagcaattgcatgcaggcagcactgcaggttgaaatcttatattctttttattgaacacagacccagaacacgggcagcttctgcaggattgctgcagagcacaagtgtttcccatctgggctcctggtatattcgctgcccttccaagactctgggatctgaaaggaagatgctgtggcttttcataaacaagcagcaaagggttgcattcctcctgatattgaaggatatttaggagggtatgtgatgtggtatgagataggagccccgagtccttttgcagcattgcaaacaggttgtttgtgtgcctttgttgatgcgctgctggcgagccctgacaactgagaattactctgcagaacgaaagagcaaacttgagctctcagagcttaagcttggactttttttttaatggacagagttatttttttataaaaatataaaatgtttttatattgtgtttatttttatttttgtcaaattattgtagcaagattgagtattttgcaaaaggaaaaaaaatcacctaatctcatgatgctaaccatacgaccatttttttttttttgagacggagtttcactcttgttgcccaggctggagtgcagtggcgtgatctcagctcactgcagtctccacctccttggttcaagcgattctcctgcctcagcctctcgagtagctgggattacaggtgtgcaccaccacacccggctaattttgtatttttcagtmgagatggggtttctccatgttggtcaggctggtcttgaactcctgacctcaggtgatacacctgcctcggcctcccaaagtgctgggattacaagcgtgagctgggattacgggtgcaagccactgcacccggcctcatacagccatttttattcttcttttatgtttgcctataataacatatgttttgcatccagctttgtctctatctatatataaacattttcaatgttgctgtactgtataattataatagcaatatgacacaaatgaacagttaaaaacaaacactgaagaattgtatggcatatgaggctgggcgcagtggctcatgcctgtaatcccagcaactttgggaggccaaggcgggcgaatcacgaggtcaggagatcaagaccatcctggccaacatagtgaaacccccatctctactaaaaatacaaaaattagccagacatggtggcacgtgcctgtaatcccagctactcaggaggctgaggcaggagaatcacttgaagcagggagtcggaggttgcggtgagctgagatcacgccactgcactctagcctggtgacacggtgagacttcgtctcaaaaaaaaaaaaaaaaaagaattgtatggtataggagttatatctcaataaagctgctgtaagaaaaatttattttatttatttatttatttttwttttttttgagacagagtctcactctgtcgcccaggctggagtgcagtggtgcgatctcagctcactgcaacctccctcctggggttcaagcaattcttctgcctcagcctccccaatagctgggactacaggtgcacaccaccacgcctggccaatttttgtattttttttagtagagctgggatttcaccatgttggccaagctggtctcggactcctgacctcaaatgatctgcctgcctcagcctcccaaagtgctgggattacaagcatgaaccatggtgcttggtaaaaaataataataataataataattttttaaatattccaaatggagatttttttaaaaacccattgagatctaccaacttttgttctagtagtgacaccagtccttagccccacagattttcacatcatttccctcattctcatattttcttcagctatataagttaaatccagaaataagcacgttacactagcaaaatctgaataggtttttataattgaatgctatgtctgcagtttccctctaatgaagttctctggtgaacaggaaatgggccatgtgctttacttgggtcagaaggaataactcgttctttaagctcgtgttcttattggaagtccacatggttgttcccccaggaagggagaagagctgggtagagttcaggatttggtagcattttttctgtgagtccccaggaagtctctaggctaaggacagggaggtagcacccacggtttgtgtgattaagcctgcaggaccaaccctttcaaacaagttaactcagatgtgactcactggggccccatggactctagagctgtttcccctgatcgtcataggtgaaagataataattctggctgtcttcccttaagtccagggttttaatacctgcttcactctgacctgctagagaatcattcctggaggggtgcttttccttcttggtcttcactgttggcttacccagtggttgaaccaacagcttcctagaaaccgctaccctttgcagcctcttagtctagagggagaaggtgggaagttgggaataactggataactgggcttttgagccaaacagatttggccttgaatttcaacattgccatttattgggtgagctgcttcattgtgttttacctcagtttactcgtgtgcaaaatggaaataataatgtctacctcatagggttattgtgagacttgaatagtgtaggttagcttgtagtgggttctacgtttagggtgtcatgtggggtgctatgtgagtgggagagtatatgcttcatccttccatcctgttttattagtccacctgcccctgtgttctatctcccataccctgtaatcttttgagtgctgattagaagggaacaaaattacagtatgactcacccaggaccagagaaggaaatggcccttgaccattgctggtttgtgagccatccaccacccttctcttggaagttgtaatgtgggccttgaactattgagaatgcccaagcctacgtagcattcggcacttccctgcgctcaacacgatggatggtcttctttaggcttttcctcaacaacactagggttgccttgcacagctgggagacatggaatttccagaagctcgtggagtggctgtgctgggaagaacctaccccagcctgaggtctagggttctgggggttctaggggcctgctgggtgataaccggatctgagcaggagtcagaaaggcaggcaggccatgaaagtcactcttcaattgtcgcaagggaaggaaatccaagcctgctttggctttgtcctgccaccttccaaggaaggcctcactacatcataagctgaacactgctggtagaagcgctggtagttgttggaagttgtgatctcatgcaaaggggaacaatgaccattattctccctctgacccctccttggctccattgcactgccagaggggccttcttgatggcagttgatccaagtaacctgaagctgagactcccagaagccccacctcactcctgtggttccacagcccacagggagccaccgcgtgtctggtacaccctcccrtcagccgtgcaagccccaacatacctccttcccttcgggccagatgccatggattgctaactgaggtgtggctgggcccctccttccccatctgggactcatttytttgaaattatatgatacagaggactgcctgtccttagggatccagcacttccgaccttcgttctgtattttcatccatgtctcctgaaatgctgctgtgtgatttctgggttcaataggattttgctcatttctattcctaactttggagttaggtaaatattttctgggctgtgcttcaaagatgcttgccttctttttggccctctaagtaactcagtccccttcctaccggtgtcgatgatgaccagtttgcatttctgtcaccctgactttcagggactgcgagtatatttgcctgagatgttgatgtaactaactcctcagcttgtcggccagcctctcagatggaatgcttttgtaatttggtagccatgtagagttgtgtgccttccagacttgcattctcaacctcacaaagctgtctcttttgtccttgtctgtctccaggctccccccaaccccccaaatatatcaacytaaagcacagagatactgttcttgtgggaagccttgaagggaaaaagcctgtcctggcctcaccaccaagagcttgactcagatccttggtgtgaggcaaactctggacctagwtacacccgttcctgacactctggggataagacaaaaagggaatggccctctctgaccatcttctgtaactttcaagaaaccaaaaatcttgaagtgtcttgaatcaaatgtagattgtacttggaatagtcggataacaaaagtcccccttggaaatagctccctgcatttacattgaagtctagttggttgtaacatgttccatgtaacaacatcaggagccgtgctgagycacgtgggctttgtaaatttagccagatttttcaaatagagaaactgtttcccttcctcctccctaccttgtcttcagtctacaaggccaattctatagccggcttaataagtcttggcaaactcctgtttcacccattcctatagaaaccttctgtggttggggccgggcgcagtggctcacgcctgtaatctcagcactttgggaggctgaggcaggcagatcacgaggtcaggagatcgagaccatcctggctaacraggtgaaaccccgtctctactaaaaatacaaaaattagccaggcgtggtggcgggcgcctatagtcccagctactctggaggttgaggaaggagaatggcgtgaaccctggaggcggagcttgcagtgagccgagattgcgccactgcactccagcctgggcaacagagcgggactccatctcaggaaaaagaaaaaaaaaaagaaagaaaaaaagaaaccttctgtggttgggagcagagccttcccrtcagcaagtggtctaagcaaaggcaaccccagcgtgtcccagagggccccaccaacttccgcccatttttctgataaattgagtgtttccattcccaggcaggcagtgtgcccacggcagtggctcagtcctggccgacaggatacaactaaaggaaatgtgctagcaatgggctttctccagggctctccagtgggggtggctggcatctggcctctggggtgggatgttcccatgcagcattgggtttggaggctttgctgagctgttgacagctctcactcctagcccccaaccatgtctctgtcaaaccaacatcattttattctggaacttggaggtattttataaaggtaatccagcattgttgctttcttggcaacctgaagtgactcacattgatctcagaaaaccttgttttgactattactttgatgcctccacaagagggtttctggaggatggcatagcagttgttctgaagcagctgtattgcctgatggttaagagcacagtttcatgggactgttgtgaaaaatgagattcttaattgaagagcttagcataatacctaaacttattcccctagattgagttttcatattttatcctcaatgcttggcccattgcttggtgtataaatcatgctcaataaattatctgtggaaaaaataaatgaattaactatacagtaattatttttgtcttaggatttaggagcattaggcccagtgttcggaaagaggatgcagggccagatgtggtggctcacacctgtaatcccagcattttgggaggctgtggcaggaggattgcttgagcctacgagttcaagagcagcctgggcaacatagtgagaccccatctctacaaaaaatttaaaaattagccagccatggtggtgcatgcctgtaatcccagctacttgggaggctgaggcaagagaattgcttgagcccaggaggtcaaggctgcaatgagctatgattgcgccagtgtactccagcctgtgtgacagagtgagaccctgtctcaggaaaaaaaaaaaaaaaaagatgatgcagaaagatgaacaaagaattgggtttgaaatttttttgtaattcagcrttggtgtcccctccccaccttctcctgccccttggcagacttttattgcaagcctagcccttttgttagctgctcttctgctgcctgtccgtctgacatttctagtgaatctacacatgaaactcactgtggagttgaccaggctgggagtctgaagttaaaacataacagctgaaggtaggtgtggaacctaaacttgacagaagacaaactgacagtgtttggggkgkgtgtgtgtgtgtgtgtgtgtgtgtgtgtgtgtgtgtgwgwgwgacagagagaggtcagtgcttgagcaccttctgtggaccaggctgactattagacttggtgatttttgtgagtacacagagtagagtagtttgtcttcatcggccaggtgagcatgagggtagaggaaggcttccctgggctgggctgaggcctacacggggctttctaggcaggagtggggagaaggtgatttcagggagcaggcattgcaaagatcctgggtgcagaaaggggaggaagaggctgaaatgggcagcagggaatcctcaaggctcgtgggccacagtgaggatctgtttttaaggagctattgtgctcgtgaagtgagatctcatcaggccatgggctgtcccaggtctgagagaataaaggtttgaaaggagtcattttactaatctgcctccctagctgccacgtacttgtaagatgcaagattacattgcccaacaggaaacccccagtctgtagcattcttgcctgtggcctcggggctggctgccctgtgcccctgttcagagtgctttctctgtgcccgctactcccgaagctggaaagaaaacatgacgtttagatttggtgggatctagatgctggcggctgcctttgtggaactcaagtttgacactggagctttgtggggccggttccaggaaggattgaggaagcattgttggctgtaaataaacctccattctcttactcaggacttggtacttctctgctgagtaaatcctcccagctcaaatggcagcttgtccagtttcgtgggtctatattgttgttacttccttcctgcgctccagtcagcttcatcaatggctggacttttgtattctctgcaggaggaaccatattccaggttctgtaattcttgagaaccaggcccctgccactgacctacagttgcatcttccaagtctcagtcacagttggttaagaaaccaaattggcaggttgagatcactattcttctccagggacagcgcccagtgtgccgcagccgcctcctgctctggttgttgggcctttagtctcaggtggggtctgggtggatgaggggtgcaggcagaggaggagacctcggctcagattggtgtcctccaccagctcagcgtttaaaccatacttcctctttcctcctttctgttttctaacttggcttttgtttttgtcttttcgtttttccttgtatcttttttttttttttttggagacaatcttgctctttcaggctggagtgcagtggcgcaatctcggctyactgcaacctccacctctcaagtagctgggattacaggcatgcaccaccatgcccggctaatttttgtatttttagtggagaggaggttttaccatgttgtccaggctggtcccaaactcctggcctcaagtgatctgcgcacctcagcctcccaactcscccagcctgtttttccttgtgtcttgattggaattgaatgagggggctgaagaggtgggcctagtcttttctcccaggagcagccttcctttcctaggtgaggtgctttgttttcaccttccttaggaactgggtgaaaagccctcagcctgttctggctgtgtgttgttgctcatgtctctgggctgcgggttccrtgccctctggctratgtagacagatgcctggtgactagacatccaggatgagctcattactttaaccaactgagaatttctacctgaaggccagtgggtggattcatacgagtcaagacaggtgtttcctgtgcatttcaaaacgctgctggcggggaagagatgaacagtgctttcttgttgctttttgcttgtatcctcacagcccttctttccgcttcctgcctctttaagggcatagtgagaatctcccccagagcaggtggtttaacaccagtgccttgaacgactggcagtttaataatcgagcctttcttccgtctccttaattctgtcatttaaaatatttcagtgggcgagaggtgacttctatcaattaaaagatttcaatgggagggaggtgaggaatgaaaaattacctaccgggtacagtgttcactttctgggtgatgggtacactgggagcccaaaccttacttatcattacacartaatatatccatgtaacagacctgcacatataccaccaaatctaaaataaaatacttttttttaaattataaaataaatcgttcatcacatgttttttctgacacatggctggcttccatgataactgtcatgggtgcttggtccatttttcatactaaatacctcctatctgagacatgactggtaagagggcatctctttaggcctgtcctccctgtggtggaggtcgttatagaggcatatcattactgtttgaatagaggtcacttttattggatgaaacttgattcagtggatggttgtgtgtaaatggtactaaaaagcagctctggggtatttcagggtctccctgtgtcacccaggctggagtgcagtggcatgatcatagctcactgcagctttgacctcccagactcaggtgatctctcctcagcctcccaagtagctaggactacaggctggtctcaaactcctggactcaagcagtcaggcccacctcagcctctcaaagtgctgggattacaggcgtgagccactgcgcctgaccaagcgagcactttaggatccagagaacttaggttgttgtctttcttctttaggagaagctcggcacagtgacagaggcacccagggctcagcaagctcatggcccagcttgttggactcagagggcagaagaatcacattctaaacatgataaggtatagccagcaggaggcagattcccagattgattctccagagccttgtaggtcccaagggtgcctatgacaccaatgggaatctgaaccaacacagacagcacagtcttcttaggagaccctagtgcagcagcgctggcctcctcctgagcgtgcacgcttatatggcttctgagctggccaggctacttcatgcatttggtttaatgggtcctcgtaaggcaggagaatcttcttgaacttggagttgggtctgtggtccattggtcagtactttgttcagaggcactgagggtgggaaggctcatggagctggattctgctgctgggaagctgggtgggccttgtttgtgggcctcaggttcaggactgaatgagagtcctcttgttgcgagttgagggtgtactctgggcatgccatgccctttttttgtactaagagggtagaaaagcaaagaccagactagttggcaaattggaacccaactacccagtttatttatttcttaggcgtagaaggaataatttagggggaactgaagagccaacctaaaggaaaaaaataaaataaagggataaaatacttcctgtgattttgccccatcatctcttttcttccagagacgtgactcaacaacctcarctgagcctggcagcacacacaccccacactcctttccatctccaggttcacaaaagccacaagaagccacggggaggctcctggcctcttactttacctaaggaggccctgaagtggcaagtgtgtttccccttgaagagccattgcatgtttggtgactaacttcctgtggctttggggtagacatggtagactccttgtgtggggattgggcctctgcagttgagtccatgagaaggggtgggtgtggtatggtgcggagccttggggaagggtgagtgggggctggagggagagttaacgaatggtcagtccctgtatgatcagccagctggcgggtgagggaggagctgatgttttcctacaatcagcacccagaaagctgttctctagagggaaaatgtgagggcattttacagtcccatgtattgttactaacactcttgaacactggtttcctgagagtcactgctacaaagggattgttggtcccctgagagactggcagtctctatagggctgctgatttatgactgcggcagtctctatagagccgctgatttatgactgcaacctgaagttggtgtggcagtcctccaggcgcgcctccctgcctgctcccagcctcctctttgcccacctgattggcagggggcagtggctcgaagagatgggttgctaagcagcctggcctggacgtggtgccctgccaggttgaatgaatagctgcagtgttctgaggaatggggaatttggcctgtcccagcatcaggagggactttctggaaagggggctaaractgagtctaggttcagtgtggggaactgggtggccttcctggcaccttccttttggagccgtggcgtggtgtgccatgtctgtgtaagtggagcctgcggagctctgcacctgtcctcgaaaaggtcttgttgcagggtcttcctgtctcatctcctccctcactcatcagcaggaaaagacatggcgtccagcaactttctgtgaactctgcctctgctgttttgatgatgagcacgtgtggcccttgagattgttgatctaactggctttgaggggctgggtgtcagcaacccagaaatgggggaaacaggtgtgttcttgccattttacacttgagacaatggaggcaagggaagacttgtgacggagggcttggaccgtggctttctcagcattgattttggtttagatgaaacatttactacagaacagtgaaatccagaaaacgtctaagaagcctttgctctcaggtttctgcaggacatgtggatgtagctgtcatgggacactgtttgcattagggawtggaggaagcttttctttggagggagtataaagccagtgtaaagggagctgagagccagagagaggcttccttgagcctggggcctctctgggatccccattctgccacttattaaaggtttgctgcatgcttgctctgaggttccatgagctgcccctttatcctcatgatgaagcctcccttctttgaactaaaaataagaagagtatcttgggagcagctagtctgcattttcatctcgggagtctgctgttacaaagcagtcacctcttgcttccttggtaccagcggtagaggtggtgatgtctgggctggccgggcccttgagctctgcactccattcaggcaagcttcctcagacccaggggagagcaacaggcagggtatacgttgcccagttggctgcagcaggcttgctggcttgtgttctcctcagcgatggtgggtttggtcactgaaaaggcatggaggagagaccggcgtggggctcgggagcatccggctgctgcgatgcgggaagaagagggttcggaggctcgggggtgccagaggcccctgaagcatcagcttacccttagtgttcctggcagtgcttttactttttctccttccttaaaaatcctgagtggtctcagtagagagtagctggttcaggagccccagtcttacctcctcgtatttgtttgtcttttgcaggataatacagaagcagaaaagcgagacccccaggaactcgtgggtgagtattgggggatcctgggggcacgtttctcagccttgctcctagcagcctggcttccagccatgccaggcctgccgccccacagggcttctgtctgctgtgagcactgttgtccctttggctccctctcagggctttrgcatttcctaggatgcccgggtgagacgtccrgggaacagttcttctttggaaatcatatttgtggtgtgttttaatgggctttggtcggttgccagcgctgtcaagagggaattcagggcactcagctgggagcgtgtcttggtctctgcttcccctagtgccctgggcttgtcctctgtctttgcaacccctcctccccctctccgctggcrtatgcatgctgctcagggagtcagcatgtggcctctgctggcactttgctctgtccccaggcaggaacatgcctcacagccctggagtctggggctctttgtgatttgggaggagcagggacactatgtttctggaaaacagcatacatcatccaagtcctgtgctagccccagccttttaatccttttagaaagccccccagctcctttcacgtggctcccaaagcccgaccggggggcagttcccggcatctgagtcagagctcttggtggggttggccctccctctctgtggcaaccattaccagctctcctgtccgtcctgctgatcttcacaaacaggctcctgcctcctgcggtcttgcctcggtggctcactgactccagccctgggggttctgagcccagggaccacctggaagcgctgccccagtagtcagtccttcccacccaggcttcctcccagtagggcctttctgctgggagttctgctacaaagcctgttctccttttccagaactaaaggagctaggaatcgttcattctatttgtcttttgaagaaggattgggtgggaacacggtaacgctgagcagcccagaccctcagcaggagggccttaatccctggcctctctgatggagtttcagtctttcaaatcctataaaaaccaagattttcctaaaacctagagtttcttctttagaaagtgacgccttaggggtgcaacatttggctttgagggcagaggaagcagagtgtgcatctgctgggaagccgatggcctgccctaagggggcgatccacgggtcgggcgtggacgggagccttggcctcttatccccgccatcacccgagccgaccctgctgtttactgtgagaaactacacggctggggatcagagagcagcctgtcacgtgccaacgcagagatgcccttgctcttgctagtagtgctgggcaggcagtggaatgtgtgtgggcatcagccatctcagcccccagttgcttccagagccaacttgtcactttttctccctgtgccactttttggaaatagctttattgaggtataatttacatagagtaagacttgccaattttacgtgtgccattttatgaattttgacaaatgtgtatagttgtgttagccccaccacaattgtgatacagaacgcacccatcactccgaaatgttcccttgtgccccgaccgtgttacaggtgattccctccctcagcctcaggcaagctgtgatctacactctcctcactatagctttgcctttctttagaatttcctataaatcaggatctccccaccctggccctactgacacttagggctggatgagtctttgttgtggggctgtcctgtgctttgcagggtgtttagcagtgtccttggtctctacccactacgtgccagaggcactctcccttccccagatgtgacagtgatcaatgtctccagacattgccaaatgtccccttggggcagaatcacccctagttaagaaccagggatagaaagggaactagtgtttttgtctggcttctttcactcagcacggtgcttgcaagactcatccatgtagttgggcatgtccagagtttctttttgtagccaagtaatatttcactgtagggatacaccacagtttgtttactgattcacccatgaggacacaaatggatctttaagcggcatcgttttgattactcaccattcctcattgacgagtagctagtttagttcctcttactgaagacgtaattagttgaaggacagtggcttccattcatgatgcagtgcctgtcagcccctctacctaagcttttgtccactctggtgtcaggactcaggttgcttaccaggtatgggaagtgtgtccatgcatgtagacagccccagcttttagagaacaagcaggagagcagagaagccaaaccacaggcatctgcagcactgcagccccttgacagagccgagcatgcacaccctgtctgtgccctccagggcctcgcagatgcccacggctgagcctggagcagtggtgctggtgtggcagtgcacgtgggttctctctgtcactcaggagctggagatactccaccgtcccctggggccccccagctcgctcactccctgccatcccataagcccgtccaactagctgttcctgcacagatccctccctggcagctgtgggtactctgggtgttttctgacttgggcacgcaccagggcaagtcacgctgacagctggcttctcaagtcctaagtgcggctgcctctgagaacacacccatcagacccaggcagcagccacagacccagcgctgcttccaagagactgtggacacatcgctttactggcttgaggctctgtctgcttacaagaaatgtggggctcagctggtcgcagtggctcatgcctgtcatcccagcacttggggaggctgaggcgggcagatcacgaggttgggagttcaaaagcagcctggccagcgtggtgaaaccccatttctactaaaaatacaaaaaaaaaaaaaaaaattagccaggcatggtggtacttgcctatagtccaagctacccgggaggctgaggcaagagaactgcttgaacctggcaggtggaggttgcagtgagccgagataacaccattgcactccagtctgggcgacatagcgagactccatctcaattaaaaaaaaaaaaaagaaaagaaacagaaatgtggggttcaagtcttccacattagattcattccaggactcagaagggagaggaccactgaaagattgcttccaaactctgtgttgtacacttctatctagttttcccgaatgtgttcctttatttgccagttacttcctaggaattatcttgtttcaagccctggactgaggaggggctcccctcctctttttttttttttttttttggagacggggtctggctttgtcacccaggctggaggggctggagtgcagtggtgcaatctcggctcactgtaagctccgcctcctgggttcacaccattctcctgcctcagcctcccgagtagctgggactacaggcgcccaccaccacacttggctaaatttttgtatttttagtagggatggggtttcactgttttagccaggatgatctcgatctcctgaccttgtgatccgcccgcctcggcctcccaaagtgctgggattacaggtgtgagccaccgcgcccggcccctcctcttacactgtacaccatgtgagccccagagtgtggctgggttgctgtggcaacagggtcacaccctgtttttccaaaggctttcctggcaaatgccaaagggcactctttgtctctctgtcacaagcacagataggttctctccagcccagggaagaagttaaccctgcttgtttatgtgcctagcgcctgccaaggccctccttgcttttgttgttgctgcttgtgagataggaccagctccccccagctgattccactctccaccagcttctgcaacctcagccttggcactttcacctattccagggctgggaagaaggaggaagttagaggagacttgaattccagccatatctgggtttcacctttgcttgaggagtcaggagaccaaaggaaggtgctgggcaaagagaagcacctcgtctcctgctcttgggctgcactggcatctggggcccacagcaggacctctgatcaatgtatcacccagtctctgtcctcttgccgtcacctaaaatggcagattagtgctctgttcttggggcgcttccagtgagaatccactgacaacagtgaaaatcaacacatgaagtcatgtttttaggatggccccaggctcgactcctgtctcagtgtatttgcagtyggcataggcttatcctgcagcagctggactggcagagtctgggagccttgtccccagccctccttggcactgtgttctttacagtaactgaaactccaggcagagatcaaagcaccttgtctactaagcaaacattaacccagcatggggagaggagaaggggctggctgtgcgaagccagccgggcagctcagcagtgggttagctggggcctgcacacagtaggtgctcagtaagtgcttgctgagtgttactggtgttttgttcattctttctcttcatcctgccccaccctgccctggctgctctttgctcattgtatgatccttttcatgagagagtgttttgaagagcgcagacagaatcttaacaaatagcgcattgtcccagcgatccaaagcaggactgcagtgccggggtggcccaaggctgcggggaagaggctggagagagcaaggcctgccggacagtggcagatctctaaggaaattgtcccctgggggttgtggttcttcccatcagaatcaggccttttgttctcaggaatgaggtgggctaagagagagttgattggtttatttttaaaagatcctcagctgataatggtaaaaagtatcatttatacacaaggccattttgtttactttgggacccaaaacttagggaaccctgaattctgtttctcctgtagcctaggcaggtcagccttagacgagacgrgtggccccaagcacctctgagtttccaaaatcttgcaagtattttagagacatatgcagtggtggctggagctggtttacagacatatgcagtggtggctggagctggtttacagacatatgcagtggtggctggagctggtttacagacatatgcagtggtggctggagctggtttacagacatatgcagtggtggctggagctggtttacagacatatgcagtggtggctggagctggctcatgttgtgagcctattgtgtacatctcttcccagccttgagttcagtgacttcaccttggtagcttgaaattggccatggcaggagaatttacaccacaagaaatggcaaatgccacagatcatggcgcctccctgcttccccatccccacgcccagctggtcattaaacatttaccagcacactgctgactctttccttaaaagttaaccattgtgggccaggcacagtggctcatacccataatcccagcactttrggaggctgaggctggaggatggcttgatccaacagttcaagaccagcctgggcaacataacgagaccccatctttacaaaaacttttaagattagtcaggcatggtggcatgcacctgtagtcctagctactcaggaggctgagacaggagttcgaggttgcagtgagatatgattgtaccactacgctctagcctgggttacagagtaaaacccccatctctttgttttatttttttatttcattttatgtattttattttcctttttgagacaagagtcttactttgtcacccaggctggagtatagtggcgtgatcttggctcactgcagccaccaccttcgggttcaagcaattctagttcctcaatagctgggtttacaggcatgcatcaccatgccagttgcttttgtatttttagtagagacggggtttcgccatgttggccaagctggtctagaactcctgacctcaaatgatctgcctaccttggcttcccaaaatgttgggagtataggcgtgagccaccgcacccagctgaccccgtctctttaaaaaaaaaaaaaaaaacggaaaagttaactgctgtatacatttattccctctgcctgaacttttcttctcccaagctggcacatggcccaccccttccggtcattcagtctcagctcagatgacacctcagagaggccacatccgaacactcagttgtactgttttcatagtgtttatccctacctgataacattttatgtgcttatgtttttttgtccatgtctgtcccttgttctaatccccacctacagaatttttccttcttctctcaacagcctccttttctgaaagagttcggaacatgtcgcctgatgaaatcaagatcccgccagaaccccctggcagatgttcaaatcacttgcaagtaagcatgagactcggctactgaggtcggatagattagatagcctgggttacgtgtttggtttggtcttaatcttaagagaccatggcagggaaagggactgaggcttctataaaagaaactgacaggtgggaaggatcccacagtccactttacctcctgttagcctcatctcaggagttggctcctacacccaccgccatgtcccgtggtgctgctccagcagggcggccctgtcttgccttcagtgaagtcctaagcagagacagagaaaagaacgtaaccttttctgtgcagccctactgggccagtggtagcttctcagaaagagctttgctaagaaactgaggaaccctcagaatgtaaaataaattacagaaatgaaaaartcacaggcattatatgtatacattttctatcctaatctatttctaaaatgctgattcagtagcttcttccctgacagaatgtgcagccctgactggaggttttgaaatcccaaggagtcgaggcttttgtgcagttacactccctggggggacagctagggttcagcccgtggctctccttgtccctctgtgggttcccttgtgatgaacaatagaacaggcacccaaggctgcacaatcatggctcctggaccacctgcttcacctttgatcctggagctcccactgggtgcctctggctacacagcaagcccgtgacaccgccctaacggatggatgactaatgggacctgaggctaaggaatgcagcaagctaggggagggccagagcaggactgggggtgcagcacagattcccttcccttcccggaagtctcctcccattgctgggtcgtctccccaccaccgccctccagaatcacgtcaccctccgtgccagacaaccagacaacaagctccagcctgtaaggacgactccagcaacccgccaggcagagacaaacggcgcacagcatacagtgccaattgtgcctcctctttagaccctcctgatggtggaaaccatgacattcgagcaaacattttagttcatcttgagtagtagaactgatcttatggcccaggagacacagccaagtcatctgtatgacatgggttctcctcaagttgccaagccttctgtatatggctccctccatgaccctggaggagacagcttggaggacagaggttcttcagtctcggctgaagtcacagacctctctctgcagttcagctctgctctggccagtcttggtagaaagatttggcctctaacaaggggagtggatcacccctcctgacgtgtcctaaatgttgtcatgtgggccctccaggcctgcccacctgcttttgccggcacagtgcctcagatgtttcccttctggagaatctatatttaacccccactgcagggggaggctgcaggtagatcttgccctgggccagtgcycgccttccttgctaagactgctctttctagaggtggctctgccatgacactctggtgtcttggccctcttcattggcactgggtcatgctgatgccgtctactttgggcatcatgtccatgggctgggcaggacccccttcctgaggacgcctgtggcactggccacagtaggtaagcctggatcccccgaggtggttctccactctcccatcgaaagccagggcagtgacctgtsggggagtttgggtgagagataagcagttaacccttgatgccctcgataaaccagcgcggaccagccacctgtgagcctccccataaaagacacattctaaaaagtttgcaagaccgaatccaaaaaactctattcccgcctcccgttaaaaggacatagcccttccgaagtctcctgtggctcacagttctgctgaggacttgatctcatgttaaaattgaaaaccaggatttagtccctgcgtatcaacaccaacccctaaaccctacttcggatgattctggaactgattaaccagttggggctttgttcattattttctctatggctcctctgctgtgtgatcttttcactgctcactatactgtcatccagagagcgtcaggaaacctcagcagtgaaagcagcctggtctcggtttatcttacttgtgtgcagttctgggcaaaggcagggtggagaaagagaatagattaattttttgttttgttttgtcgagacagtctcactgcatcaccaggctggagtgcagtggcatgatctcagctcactgcaacctccacctcccaggttcaagctattcttctgccttagcttcccaagtagctgggactacaggcttgccccaccacacccagctaattttgtttgtatttttagtagagatggggtttcaacatgtgggccaggatggtctcaatctctggacctcgtgatccacccgcctcagcctcccaaagttctgggattacaggcgtgagccaccgtgcctggctgaggataggttaaattttaacatgaggtcaagttgggctttgcctgactggagcctcatgttcatgctgcacatgtagctggtgaccaggggctgggacggtggaggggtgggcttctgtcatacacccccccaccccctctgctcctcttcayaggacaagatccagaagctttatgaacgaaagataaaggagggaatggatatgaactacattatccaaaggaagaaagaatttcggaaccctaggtaagtttcccttgagcctgcagagtttrttgagttattaatgttggactaaggactaagacgtccccaaggaggtggtgaggaaaagcccagagcccaaaccatcacccagacttgtcattacactgagtgcctgctggacatggcggactgtgctaacccagccagaggcttgccatttaagatccagaaaaaacacaaagcaattcataccgagacctagacggggatgagggagacctggctgagttctcgtccctgctctgagcctaaagcacatgacctctcaagtcccctgtcctcatggaaggaattggactagacaattactgtaggttcatcttccaactctaaaaagctgatttttgcatataggtgagaggtcttaggaccagagcgatgtctggtcttcctccattgaatgttcaagctagtgacatacagggaaaagagcatggcccttgtgtgggtctgagtgtggtaagcccaatccagctgtgcagactgaaggtcagtgagacaaaactcagccgtcaccttgaccctgtgctcctcccggcccctagctaacaggtccatctccctgggagagtggagggccatcaggaagcttgcttagagcagctgagctggatttaaaagttgtgaaggttttgtgtcagccccaggagctggatggttcaggtcccatgcagggacgtggacttgtgcctgctcagcgccggcactgttctttcagcatctacgagaagctgatccagttctgtgccattgacgagcttggcaccaactacccaaaggtgcgtctggcacacggggctggagggtgatggggacacccagggtcctttgcttgttccatgggatttgacctgcagccacagaaaggtccacstggtggcacggctcgttgaaagcacagtccctgtctcttttgtttgagtccctattgttctgaaatagtccaataaagagattccggtggccggcctggtgcctggcccctgactggtggggacatgtgtggacctgctgctcctggggttcgctggatgggggcttcgtgctcccatgttcttcagcacttgccagccgccccttggctaaagaccaaagatgacagccgagccccgggtaaggggaccccagaccaagaagctctatgggaagacttgggccaggaacttgggtttctgagtcatttgtcatctgagtcattcgccttttcctttgcaggatatgtttgatccccatggctggtctgaggactcctactatgaggcattaggtagcctttcgtccctcctcccatataccttgtccgcccacccgactgtccctttatccagtcagttggttatccaggtgacacatatttcagggtctactctatgtcaggccatgttcaagggggctgggtacaggcctgaatgagacagacccacccctgccttaagaggcttatgccacagcaaagaagatggaacgtcacgccagtaacgccagcatcgatgagtgttggtgatgacggagttgctgggtacaggggagctttggcaagcagggtcatctaatctggccaaagggatgggaaggcctcactgacaaaactgtgttcaagctgaggtttgaagaggcagaggggccaggcaggtgtaggcagaatgttctgaggccagtgagaggatggctttttcttaagataccagtttgggagcactgggagaaatgtcaaagggcccaaacccctagaccataggtcttaagcctgcagcccatggcccagatcttggcctgtagaggtgctttgtttggccttcatgaattttgtcatcttttaatttgaattcattgccaacattttatataatctctgattccagcttctctccatcagtaggagggtagtccccattgggcctgtattcccgtgtgtggcagtccacaggagctcaggagtagctgacccttccgggcacacacagggcatgcagcccgccagtctggagctgaaggcccctgccctatgccgaccaagggctggcttcattttgccaagcacaaagaacactgagcccatgaaggcctttagcccgctgaaaagaacgcagggatcagagtaggctccctcagcccagagctgctcgggggccacctttgtaacagcttctcttgtcttcatagccaaggcccagaaaattgagatggacaaattggaaaaggccaaaaaggagcgaacaaaagtaagtgatggcagacctcctagatgaaaaaggcacatgtggagtgcatgggtcctgctggctgagcccagaaggtgtccaggctgcccccaaccctggccccgtgtcatcacccggcgatgctctgagcctctcagcagggcctgtgtgctgagcagacctgctgggttcacggcgctcgtctgctgcttttgccctcggagrcttgtttgctacattgtgcccccctttcctccccgccaattgcagagccttggggggctttgtccgttttgggtcatgggggccctttgtagcctgaagggagggaaatagttccctaagagagtgccaggcccagcttgcgctgctcggtgagtgtcttggcctccagagctgccctcagtggctcgcctgggtgctacctattaggtcccacgttagggccctgagcaccacttgttccctggcagtgtggtctgggttcttcagggagcatcagtttggctgggagaccaaactgttatctctgggccttgttccctttgtgaccagtctcagagccgggcatcaggacaccagctcctcccacttctggctcggcctgaccatcctcaagcagctgcggcctccagaccgcttccctcaccccaagcagaggggctgtggggcctgrgcatgctggtggccctctggaggtgctggctgctgggccaggaacgtgggagctggtgcaaggggatagttggggtttctcattcttaacccttgattgaatctcccttctctctctttccctctcccttccaaaccccaggcttgttgcagggacgtgtctgcagcgcctggggaccggagctgtccttcccctgtgcgggcgggcaccgcctcctcctgggtgtgaggaggaggggcctggccaaacggttctgggcatgtgaggtggggcggtgggcggggggtgccgggcatgtgcagagacctggtgatgccgggagggatacagtactgtttggaaagttcttttaagagtgaaaagcccctttgggttcttcttagacatctcgccctaccccagatgggcagagcagagttcatttccaatgcctcttttgtgtagtgccaagctcctgtcccccaggagctgacggatggcaaaaagctgtggacacccagctttgcctggtcttattctcttccctctccctctccagattgagtttgtgacgggcaccaaaaaaggcaccacgaccaacgccacgtccaccaccactaccactgccagcacagctgttgcaggtagattgcagagctgccctgcctcctgccacacacatggagccagggtctccctggcttgtttgggcgacagacagcacrtggatctgggcctgggctcagccttgctactttgagaagcacctttggagtctggggtgggccrcttcggggtctgctccctagactcccgctggcctgcagggggaagggaaaragggcaccgctcattggtggatcgtgatcctgayttctgctttatctccagatgctcagaagagaaagagcaagtgggattcggctatcccagtgacaacgatagcccagcccaccatcctcaccaccacagccaccctgccagctgttgtcacggtcaccaccagcgccagcggctccaagaccaccgtcatctctgctgtgggcaccattgtgaagaaggccaagcagtgacckgaggggccaccctaggacttgaaaggaccgtgcagcccagtgaccactgcccagtgggaggcgccactttgtatatttcaggactgggacctactccccagatgccacctgagaggagcttctgtttggcattccagatggaaggacaggcagcacgggagccaggcgctgtggacagggtctgtccacgcaccacctggggtctgccgcctattaaaagtgccgtattcttacctcttggcatctcagatgcactggcctctcctgcattctgtttgcaggcaaatgcttcagctcacatgtcccccaagactcaatagtcttggttgggactattgcctcagggttgacaacagggtgatggaggcctgggacgctgttcagaggggtgacccaagaagtcaccgttgttatccgtgtatgcctctgggcatggacaggcgggagtccccgagccccacgtatgccccatctgccgccttgatcccaaaacccagccagttctcgggtgatggtggagctgtgctcccttgagtgcacttgagcactccccagaccagatcactttttggacacacccaggaaggcttttgaagtcaagccagtttccagaagggctggggtgagatcctgacctgtgcagagagtggggaggcgtcagcgcctggccagggctgccccagtcctttggtgcccggtgagcgcagccagcaggagctgagcagcgggggagatgaatcacctcctgccttggcgaggcggcagctcattgtttacaggcaagccctgctcctgggagggctcctgccaccccacccttcctctgtgtgttatctctgccccacagcagcccctgggcagcaccagtggccactgggctccccccggggttgaaacgggtttcccagaccaggggttcagaggagactatttacccttcatgatctttggcgattctccactggagcggaagggctgtgtgtcaaaagaaggaagccaggctgtgaagggccgtgttgctttcagtgggtgggcagaggtttagaaaggtggttctgaaatggcacctggtactcttgtgggacctggggaatataaggaactctgtgcatgaggtttcaaaaataaaaattgagtccactctccccgtacacacacactcgggcacttcaggaggtcagttctcaccccttcctcgatggggctttaaagctctggggagaagagctgctccccactcatgccccagagggactgtgaaaaggcttcctgtgacctccgatggcggcccctcattggccaagggcactgtggatgttttgtgggaggcagcatggcaccgtggaaagggcagtagacgtggagccggcmcctctggtctggattccmcttaaaaccagttgagtggtctcaagcccttaacctctgtaagcctgtttyttctctgaaatcmcagtaataaagcgtcgtaagatggttgggaaraaccaraggtgacttatgcaaaagctttataaactgtaaagttcctgccagtgttttttgttggctaaatccaatttttttttgttgtagaccaaggagagaagcaaactcctggcctgtcccccgtctcgtgctctgtcggcggggtagggtttggcaggtctttcccctccccgctttcctctgggcagccctggcgctgccattcatctgtccagttaaagcagtaatgactgtctcctgcggggccgcagaggtagggggcctggagaatgaacataggcttagaagttgggcaaccccaggccaaaactgctgccccacttaccagcctcgtgagttgggtcaaggtttttaatccttctagactttcatttactcttctataaaatggtgcttgcccaccttagtcacatcaaggatggcccagaggtgtgtgaacagttcctgttgtgggtggatggcccaggcactaggggccaaagttgtttctaaccagtgtgtgtctgctcgccagagaacagtgtccaaactgaactctgtccacggctcctactgtcccccacccacacacctgctacctctcccgagggctctgatcttgggtgggcatcaggattcatttagcttcccaccttgcacatgtagtaccccaagatgtgtctcaggtttgtataatcccctcctgactctgctggacaggtaggtgctcctttctcaacactcacagcacccccttgcttttaggatcacactgaactgccgtgtaatctctgcccacaagcgggatgagacagctcatgtctcctagttcttgtaagcagaaacaaagcaggcataaataacactctgctccagtgcctggcatgagataagtacacaggtggttgggggaatggagggatgaaaggagaggtgagtttgctcatcttccaaaggggtggtctctgctcctagggtcactgaaatgaaagtttccagcccccaagccctgtgctcacagcatcactcaagcctcctagggctcgatttccaaagggctgctgtcgattggtgatgcattgacaattattgaggttcagtgataggtacaggagtgttcaatattctctttaattttgtatctatttggaaatctctataataagggattttttaagggctattgagcctggtgcagtggctcacgcctgtaatcccagcactttgggaggccaagacgggcagatcacaaggtcaggagattgagaccatcctggctaacacggcgaaaccccgtctctactaaaaatacaaaaaaaattagctgggtgtggtggtgggtgcctgtattcccagctactcaggaggctgaggcaggagaatggcgtgaacccaggaggcggagcttgcagtgaaccgagatcgcgccactgcactccagcctgggcgatagagtaagactccatctcaaaaaaaaaaaaaaaagccgggcgtggtggcaggtgcctgtaatcctagctacttgggaggctgaggcaggagaatcgcttgaacccaggaggcgaaggttgcagtgagcctagattgcgccattgcactccagcctgagcgacaagagcaaaactccctctcaggggcggagggggttggaaggctattaagccacacaaaaaagaacaaggggccgggcgcagtgattcacgtctgtaatcccagcactttgggaggccaagggactggatcccatgaggccaggagttcgagaccagcctgaccaacatagtgaaccctcatctctactaaaaaaaaaaaaaaaaaaaaaaaatagctggtcgtggtggcgcatgcctgtagtcccagctagttgggagactgaggcaggagaatagcttgaacccgggaggcagaggttgcagtgagctgagattgtgccaatgctcttcagcctgggcaacaagagcaaaaactccgtctcaaaaaaaaaaaaaaagggagccgggcgcggtggctcatgccttttaataccaggactttgggaggccaaggcgggcagatcacaaggacaggaattcaagaccagcctggccaacatggtgaaaccccatgtctactaaaaatacaaaaactagcctggtgtgatggcaggtgcttataatcccagctactcaggaggctgaggcaggagaattgcttgaagccgggcagcagagattgcagtgagccgagattgcgccactgcactccagcctgggcaatacagtgagactctgtctcaaaaaaaaaaaaactgaaaaaaagatcttcatggatagattatttggagtgatctttaggagagattaaatgaaaaaaggtatcaaacagtacatgtaataaattatcttgtataagaagggagaaaatactatacaaataaaaaataattggctgggcgtggtggctcatgtctgtaatcccaacactttgggaggaggcaggcagatcacttgaggccaggagttcgagaccagcctggccaacgtggtgaaaccccatctctactaaaaatacaaaaatcagccgataatggtggtgggcacctgtagtcccagctagttgggaggttgaggcaagagaatcacttgaacccgggaggcagaggttgcagtgagccaagatcgtgccactgcactgcaccctgggcaacagggcgagactcttatcttaaataataataataattgccaggcgtgggggcatgcacctgtagttccagctgctcaggtggctgagatgggaggatcccttgagcccaggagttgaaggctgctgtgagccaagatttcaccactgcattccagcctgaaccacagcaagactccatctctaaaaaataataatagaagaaggagctacaaaaataaaaccaaataaattaagaaaaatctctaatattaaatttgaatgatttgaatgaagatatcaatatgaactcaggatttaagaaaaagatacatttcctatctgtccattgcaaggagctaggacctcctgctttgtatatggtgagttaaaaaaaaaacaaaacctggaagcaatgacagacaccctggtagcatccagcacacagtattcacatcgtggtctctaataccattccccactgaaaggaaccaagccggggccccttggagaaacagcagatcctgaaatctaagtaggactggggcagttctagaaagcagggaagacacggaagtcagatcaaaatgtcaaaaaagctagggtgaagggatctcctactggccaaatttggttacatttgaacatgaaggaagaatgattacaatgaattgtgtgttttttgttttttttttttttttgagacagcgtctcactctgttgcccaggctggagtgcagtggcacggtctcggttcactgcaacttctgcctcctgggttcaagcggttctcctgcctcagcctcccgagtagctgggattacagatgcccaccaccacgcccagctaatttttgtatttttagtagagacggggtgtcaccatgttggccaggctggcctcaaaactcctgacctcaggtgatccaccctccttggttttccaaagtgctgggattacaggcgtgagccactgcacctggcctacgatgaattgtaaactattgagcaaataaaaattctttcattcacagtgataatttgaaaaaaaaatgtatttgccaccattagacttgaatatatctactccttactctgaaattgataattaggtgagaagaattaaccattgtgcaccattgatgggattttgaagtgcaactgctgtggaaacagtatggcagttcttcaaaagtttcttttttttttttaagacagtctcactcttgcccaggctggagtgcaggggtgccatcttggttcactgcaacctactcctaggctcaagcaatcctcctgcctcagcccccaaagtatccgggactataggcatgagccaccatgctcggctaatttttggttggttggtttgttttttgagacagtctcactctgtcacccaggctggcatgcagtggtgcgatcttggctcactgcaacctctgtctcctgggttcaagcaattctcctgcttcagcctcccaagtagctgggactacggcacgtggcgccatacccaactaactgttgtctttttggtagagacagggtttcactatgttggccagagtggtctcgaactcctgacctcaggtgatccacctccctcagcctcccaaagtgctgggattataggtatgagccaccatgcccagccagtccttcaaaagttaaaaatagaactatcatatgacccagtggtcccacttctggatatatatccaaaataattgaaggcagggtctcaaagagatagttacacacccatgttcatagcagcatcattcacagtagccaagaggtggaagtgcccaaatgtccattgacagatgagtgaataaacaaataatgatatatacatacaatatacatacacgcatacttaaatattcagccttaaaaaggaaggaaatcctgtcacattcaacacatgaatgaacctcaaggacgttatgctaagtgcaataagccagtcacaataagaaatactgaataattccatttatatgagacatccagtgtagacaaattcataacagacaggaagtagaatggtggttgctaggaactgggcatgcagaagggtgaaatggagagttgcttaatgggtacaggattttagttttgccacatgaaaagttctggtgatctgttacacaacaatagatatattgaactgtacacttaaaaaatggtaaagatggtgaactttaacgtgttttcaggatctttttatattttattttatttatttatttattttaagacggagtctcgctctgtcgcctgggctggagtacagtggcgcgatctccgctcactgcaagctcagccttctgggttcacgccattctcctgcctcagcctcccgagtaactgggacttcaggcacctgccaccactcctagctaatttttttttgtgttttttgtagagacggggtttcaccgtgttagccaggatgatctccatctcctgatctcgtgatccacctgtctcggccccccaaagtgctgggattataggcatgagccaccatacccggcccatcttttttaaaaaaaaatattttgggttgctgtgtaatagtaattttttaaagtttctataactcaaaactttatttaaaaaagcatttaccctgcatttttaggggaacatagttcattcccagttgattaaaggaagctctattttttttttaatcagaaagacacttattaaatgtagaaaggagctgggcacaatggctcacacctgtaatcccagcactttgggaggctgagatgggaagatcacctgagatcaggagctcaagaccagcctggccaaatgtcgaaacaccgactctactaaaaaaaaaaaaaaaaatttagccaggtgtggtggcatgcacctgtactcccaggtactcggggggctgaggcaggagaatcacttgaacccaagaggtggagtttgcaatgagctgagatcacgccactgcactccagcctgggcaacagagcgagactctgtctcaaaaaaaaataaaaataaaaaataaaaaatttaaaatttaaaaaatagggctgggcacagtggctcacgcctgtaatcccagcattttgggaggccaaggtgggcagatcacgagatcaggagatcgagaccgtcctggttagtacgatgaaaccccgtctctactaaaatacaaaaaattagccgggcgtggcggcacgtgcctgtagtcccagttactcgggaggctgaagcaggagaatggcatgaacccgggaggcggagcttgcaatgagctgagattgtgccactgcactccagcctgggcgacagaacaagactccatctcaaataaataaataaataaataaataaataaatatttaaaaaattaaa
